(19) United States
(12) Patent Application Publication
(10) Pub. No.: US 2007/0214517 A1
(43) Pub. Date: Sep. 13, 2007

(54) Sequence-determined DNA fragments and corresponding polypeptides encoded thereby

(75) Inventors: Nickolai Alexandrov, Thousand Oaks, CA (US); Vyacheslav Brover, Simi Valley, CA (US)

Correspondence Address: BIRCH STEWART KOLASCH & BIRCH, PO BOX 747, FALLS CHURCH, VA, 22040-0747, US

(73) Assignee: Ceres, Inc., Thousand Oaks, CA (US)

(21) Appl. No.: 11/713,768

(22) Filed: Mar. 2, 2007

Related U.S. Application Data
(63) Continuation of application No. 11/056,355, filed on Feb. 14, 2005.
(60) Provisional application No. 60/544,190, filed on Feb. 13, 2004.

(51) Int. Cl. A01H 1/00; C12Q 1/68; C07H 21/04; C12N 15/82; C12N 5/04

(52) U.S. Cl. 800/278; 435/6; 435/419; 435/468; 536/23.6

(57) ABSTRACT

The present invention provides DNA molecules that constitute fragments of the genome of a plant, and polypeptides encoded thereby. The DNA molecules are useful for specifying a gene product in cells, either as a promoter or as a protein coding sequence or as an UTR or as a 3′ termination sequence, and are also useful in controlling the behavior of a gene in the chromosome, in controlling the expression of a gene or as tools for genetic mapping, recognizing or isolating identical or related DNA fragments, or identification of a particular individual organism, or for clustering of a group of organisms with a common trait. One of ordinary skill in the art, having this data, can obtain cloned DNA fragments, synthetic DNA fragments or polypeptides constituting desired sequences by recombinant methodology known in the art or described herein.

[0001] This Non-provisional application claims priority under 35 U.S.C. §119(e) to U.S. application Ser. No. 11/056,355 filed Feb. 14, 2005 and U.S. Provisional Application No(s). 60/544,190 filed on Feb. 13, 2004, the entire contents of which are hereby incorporated by reference.

[0002] This application contains a CDR, the entire contents of which are hereby incorporated by reference. The CDR contains the following files:

| Creation Date | File Size | File Name |
|---|---|---|
| 2005-02-14 | 45,865 | 2005-02-14 Sequence Listing Batch 1a |
| 2005-02-14 | 119718 | 2005-02-14 Sequence Listing Batch 1b |
| 2005-02-14 | 48031 | 2005-02-14 Sequence Listing Batch 1c |

### FIELD OF THE INVENTION

[0003] The present invention relates to over 100,000 isolated polynucleotides from plants that include a complete coding sequence, or a fragment thereof, that is expressed. In addition, the present invention relates to the polypeptide or protein corresponding to the coding sequence of these polynucleotides. The present invention also relates to isolated polynucleotides that represent regulatory regions of genes. The present invention also relates to isolated polynucleotides that represent untranslated regions of genes. The present invention further relates to the use of these isolated polynucleotides and polypeptides and proteins.

### BACKGROUND OF THE INVENTION

[0004] There are more than 300,000 species of plants. They show a wide diversity of forms, ranging from delicate liverworts, adapted for life in a damp habitat, to cacti, capable of surviving in the desert. The plant kingdom includes herbaceous plants, such as corn, whose life cycle is measured in months, to the giant redwood tree, which can live for thousands of years. This diversity reflects the adaptations of plants to survive in a wide range of habitats. This is seen most clearly in the flowering plants (phylum Angiospermophyta), which are the most numerous, with over 250,000 species. They are also the most widespread, being found from the tropics to the arctic.

[0005] The process of plant breeding involving man's intervention in natural breeding and selection is some 20,000 years old. It has produced remarkable advances in adapting existing species to serve new purposes. The world's economics was largely based on the successes of agriculture for most of these 20,000 years.

[0006] Plant breeding involves choosing parents, making crosses to allow recombination of gene (alleles) and searching for and selecting improved forms. Success depends on the genes/alleles available, the combinations required and the ability to create and find the correct combinations necessary to give the desired properties to the plant. Molecular genetics technologies are now capable of providing new genes, new alleles and the means of creating and selecting plants with the new, desired characteristics.

[0007] When the molecular and genetic basis for different plant characteristics are understood, a wide variety of polynucleotides, both endogenous polynucleotides and created variants, polypeptides, cells, and whole organisms, can be exploited to engineer old and new plant traits in a vast range of organisms including plants. These traits can range from the observable morphological characteristics, through adaptation to specific environments to biochemical composition and to molecules that the plants (organisms) exude. Such engineering can involve tailoring existing traits, such as increasing the production of taxol in yew trees, to combining traits from two different plants into a single organism, such as inserting the drought tolerance of a cactus into a corn plant. Molecular and genetic knowledge also allows the creation of new traits. For example, the production of chemicals and pharmaceuticals that are not native to particular species or the plant kingdom as a whole.

[0008] The achievements desribed in this application were possible because of the results from a cluster of technologies, a genomic engine, depicted below in Schematic 1, that allows information on each gene to be integrated to provide a more comprehensive understanding of gene structure and function and the deployment of genes and gene components to make new products.

I. The Discoveries of the Instant Application

[0009] Applicants have isolated and identified over one hundred thousand genes, gene components and their products and thousands of promoters. Specific genes were isolated and/or characterized from arabidopsis, soybean, maize, wheat and rice. These species were selected because of their economic value and scientific importance and were deliberately chosen to include representatives of the evolutionary divergent dicotyledonous and monocotyledonous groups of the plant kingdom.

[0010] The techniques used initially to isolate and characterize most of the genes, namely sequencing of full-length cDNAs, were deliberately chosen to provide information on complete coding sequences and on the complete sequences of their protein products.

[0011] Gene components and products the Applicants have identified include exons, introns, promoters, coding sequences, antisense sequences, terminators and other regulatory sequences. The exons are characterized by the proteins they encode and Arabidopsis promoters are characterized by their position in the genomic DNA relative to where mRNA synthesis begins and in what cells and to what extent they promote mRNA synthesis.

[0012] Further exploitation of molecular genetics technologies has helped the Applicants to understand the functions and characteristics of each gene and their role in a plant. Three powerful molecular genetics approaches were used to this end:
[0013] (a) Analyses of the phenotypic changes when the particular gene sequence is interrupted or activated differentially; (arabidopsis)
[0014] (b) Analyses of in what plant organs, to what extent, and in response to what environmental signals mRNA is synthesized from the gene; (arabidopsis and maize) and
[0015] (c) Analysis of the gene sequence and its relatives. (all species)

[0016] These were conducted using the genomics engine depicted in FIG. 1 that allows information on each gene to be integrated to provide a more comprehensive understanding of gene structure and function and linkage to potential products.

[0017] The species Arabidopsis was used extensively in these studies for several reasons: (1) the complete genomic sequence, though poorly annotated in terms of gene recognition, was being produced and published by others and (2) genetic experiments to determine the role of the genes in planta are much quicker to complete.

[0018] The phenotypic data, MA data, and reference data and sequence data indicate the results of these analyses and thus the specific functions and characteristics that are ascribed to the genes and gene components and products.

[image]

II. Integration of Discoveries to Provide Scientific Understanding

[0019] From the discoveries made, Applicants have deduced the biochemical activities, pathways, cellular roles, and developmental and physiological processes that can be modulated using these components. These are discussed and summarized in sections based on the gene functions characteristics from the analyses and role in determining phenotypes. These sections illustrate and emphasize that each gene, gene component or product influences biochemical activities, cells or organisms in complex ways, from which there can be many phenotypic consequences.

[0020] An illustration of how the discoveries on gene structure, function, expression and phenotypic observation can be integrated together to understand complex phenotypes is provided in schematic 2. This sort of understanding enables conclusions to be made as to how the genes, gene components and product are useful for changing the properties of plants and other organisms. This example also illustrates how single gene changes in, for example, a metabolic pathway can cause gross phenotypic changes.

[image]

[0021] Furthermore, the development and properties of one part of plant can be interconnected with other parts. The dependence of shoot and leaf development on root cells is a classic example. Here, shoot growth and development require nutrients supplied from roots, so the protein complement of root cells can affect plant development, including flowers and seed production. Similarly, root development is dependent on the products of photosynthesis from leaves. Therefore, proteins in leaves can influence root developmental physiology and biochemistry.

[0022] Thus, the following sections describe both the functions and characteristics of the genes, gene components and products and also the multiplicity of biochemical activities, cellular functions, and the developmental and physiological processes influenced by them.

[0023] A. Analyses to Reveal Function and in Vivo Roles of Single Genes in One Plant Species

[0024] The genomics engine has focused on individual genes to reveal the multiple functions or characteristics that are associated to each gene, gene components and products of the instant invention in the living plant. For example, the biochemical activity of a protein is deduced based on its similarity to a protein of known function. In this case, the protein may be ascribed with, for example, an oxidase activity. Where and when this same protein is active can be uncovered from differential expression experiments, which show that the mRNA encoding the protein is differentially expressed in response to drought and in seeds but not roots. The gene disruption experiments reveal that absence of the same protein causes embryo lethality.

[0025] Thus, this protein is characterized as a seed protein and drought-responsive oxidase that is critical for embryo viability.

[0026] B. Analyses to Reveal Function and Roles of Single Genes in Different Species

[0027] The genomics engine has also been used to extrapolate knowledge from one species to many plant species. For example, proteins from different species, capable of performing identical or similar functions, preserve many features of amino acid sequence and structure during evolution. Complete protein sequences have been compared and contrasted within and between species to determine the functionally vital domains and signatures characteristic of each of the proteins that is the subject of this application. Thus, functions and characteristics of arabidopsis proteins have been extrapolated to proteins containing similar domains and signatures of corn, soybean, rice and wheat and by implication to all other (plant) species.

[image]

[0028] Schematic 3 provides an example. Two proteins with related structures, one from corn, a monocot, and one from arabidopsis, a dicot, have been concluded to be orthologs. The known characteristics of the arabidopsis protein (seed protein, drought responsive oxidase) can then be attributed to the corn protein.

[0029] C. Analyses Over Multiple Experiments to Reveal Gene Networks and Links Across Species

[0030] The genomics engine can identify networks or pathways of genes concerned with the same process and hence linked to the same phenotype(s). Genes specifying functions of the same pathway or developmental environmental responses are frequently co-regulated i.e. they are regulated by mechanisms that result in coincident increases or decreases for all gene members in the group. The Applicants have divided the genes of arabidopsis and maize into such co-regulated groups on the basis of their expression patterns and the function of each group has been deduced. This process has provided considerable insight into the function and role of thousands of the plant genes in diverse species included in this application.

[0031] D. Applications Of Applicant's Discoveries

[0032] It will be appreciated while reading the sections that the different experimental molecular genetic approaches focused on different aspects of the pathway from gene and gene product through to the properties of tissues, organs and whole organisms growing in specific environments. For each endogenous gene, these pathways are delineated within the existing biology of the species. However, Applicants' inventions allow gene components or products to be mixed and matched to create new genes and placed in other cellular contexts and species, to exhibit new combinations of functions and characteristics not found in nature, or to enhance and modify existing ones. For instance, gene components can be used to achieve expression of a specific protein in a new cell type to introduce new biochemical activities, cellular attributes or developmental and physiological processes. Such cell-specific targeting can be achieved by combining polynucleotides encoding proteins with any one of a large array of promoters to facilitate synthesis of proteins in a selective set of plant cells. This emphasizes that each gene, component and protein can be used to cause multiple and different phenotypic effects depending on the biological context. The utilities are therefore not limited to the existing in vivo roles of the genes, gene components, and gene products.

[0033] While the genes, gene components and products disclosed herein can act alone, combinations are useful to modify or modulate different traits. Useful combinations include different polynucleotides and/or gene components or products that have (1) an effect in the same or similar developmental or biochemical pathways; (2) similar biological activities; (3) similar transcription profiles; or (4) similar physiological consequences.

[0034] Of particular interest are the transcription factors and key factors in regulatory transduction pathways, which are able to control entire pathways, segments of pathways or large groups of functionally related genes. Therefore, manipulation of such proteins, alone or in combination is especially useful for altering phenotypes or biochemical activities in plants. Because interactions exist between hormone, nutrition, and developmental pathways, combinations of genes and/or gene products from these pathways also are useful to produce more complex changes. In addition to using polynucleotides having similar transcription profiles and/or biological activities, useful combinations include polynucleotides that may exhibit different transcription profiles but which participate in common or overlapping pathways. Also, polynucleotides encoding selected enzymes can be combined in novel ways in a plant to create new metabolic pathways and hence new metabolic products.

[0035] The utilities of the various genes, gene components and products of the Application are described below in the sections entitled as follows:

I. Organ Affecting Genes, Gene Components, Products (Including Differentiation Function)

[0036] I.A. Root Genes, Gene Components And Products
[0037] I.A.1. Root Genes, Gene Components And Products
[0038] I.A.2. Root Hair Genes, Gene Components And Products

[0039] I.B. Leaf Genes, Gene Components And Products
[0040] I.B.1. Leaf Genes, Gene Components And Products
[0041] I.B.2. Trichome Genes And Gene Components
[0042] I.B.3. Chloroplast Genes And Gene Components

[0043] I.C. Reproduction Genes, Gene Components And Products
[0044] I.C.1. Reproduction Genes, Gene Components And Products
[0045] I.C.2. Ovule Genes, Gene Components And Products
[0046] I.C.3. Seed And Fruit Development Genes, Gene Components And Products

[0047] I.D. Development Genes, Gene Components And Products
[0048] I.D.1. Imbibition and Germination Responsive Genes, Gene Components And Products
[0049] I.D.2. Early Seedling Phase Genes, Gene Components And Products
[0050] I.D.3. Size and Stature Genes, Gene Components And Products
[0051] I.D.4. Shoot-Apical Meristem Genes, Gene Components And Products
[0052] I.D.5. Vegetative-Phase Specific Responsive Genes, Gene Components And Products
   II. Hormones Responsive Genes, Gene Components And Products

[0053] II.A. Abscissic Acid Responsive Genes, Gene Components And Products

[0054] II.B. Auxin Responsive Genes, Gene Components And Products

[0055] II.C. Brassinosteroid Responsive Genes, Gene Components And Products

[0056] II.D. Cytokinin Responsive Genes, Gene Components And Products

[0057] II.E. Gibberellic Acid Responsive Genes, Gene Components And Products

III. Metabolism Affecting Genes, Gene Components And Products

[0058] III.A. Nitrogen Responsive Genes, Gene Components And Products

[0059] III.B. Circadian Rhythm Responsive Genes, Gene Components And Products

[0060] III.C. Blue Light (Phototropism) Responsive Genes, Gene Components And Products

[0061] III.D. Co2 Responsive Genes, Gene Components And Products

[0062] III.E. Mitochondria Electron Transport Genes, Gene Components And Products

[0063] III.F. Protein Degradation Genes, Gene Components And Products

[0064] III.G. Carotenogenesis Responsive Genes, Gene Components And Products

IV. Viability Genes, Gene Components And Products

[0065] IV.A. Viability Genes, Gene Components And Products

[0066] IV.B. Histone Deacetylase (Axel) Responsive Genes, Gene Components And Products

V. Stress Responsive Genes, Gene Components And Products

[0067] V.A. Cold Responsive Genes, Gene Components And Products

[0068] V.B. Heat Responsive Genes, Gene Components And Products

[0069] V.C. Drought Responsive Genes, Gene Components And Products

[0070] V.D. Wounding Responsive Genes, Gene Components And Products

[0071] V.E. Methyl Jasmonate Responsive Genes, Gene Components And Products

[0072] V.F. Reactive Oxygen Responsive Genes, Gene Components And H2O2 Products

[0073] V.G. Salicylic Acid Responsive Genes, Gene Components And Products

[0074] V.H. Nitric Oxide Responsive Genes, Gene Components And Products

[0075] V.I. Osmotic Stress Responsive Genes, Gene Components And Products

[0076] V.J. Aluminum Responsive Genes, Gene Components And Products

[0077] V.K. Cadmium Responsive Genes, Gene Components And Products

[0078] V.L. Disease Responsive Genes, Gene Components And Products

[0079] V.M. Defense Responsive Genes, Gene Components And Products

[0080] V.N. Iron Responsive Genes, Gene Components And Products

[0081] V.O Shade Responsive Genes, Gene Components And Products

[0082] V.P. Sulfur Responsive Genes, Gene Components And Products

[0083] V.Q. Zinc Responsive Genes, Gene Components And Products

VI. Enhanced Food

VII. Promoters As Sentinels

### SUMMARY OF THE INVENTION

[0084] The present invention comprises polynucleotides, such as complete cDNA sequences and/or sequences of genomic DNA encompassing complete genes, fragments of genes, and/or regulatory elements of genes and/or regions with other functions and/or intergenic regions, hereinafter collectively referred to as Sequence-Determined DNA Fragments (SDFs) or sometimes collectively referred to as “genes or gene components”, or sometimes as “genes, gene components or products”, from different plant species, particularly corn, wheat, soybean, rice and Arabidopsis thaliana, and other plants and or mutants, variants, fragments or fusions of said SDFs and polypeptides or proteins derived therefrom. In some instances, the SDFs span the entirety of a protein-coding segment. In some instances, the entirety of an mRNA is represented. Other objects of the invention that are also represented by SDFs of the invention are control sequences, such as, but not limited to, promoters. Complements of any sequence of the invention are also considered part of the invention.

[0085] Other objects of the invention are polynucleotides comprising exon sequences, polynucleotides comprising intron sequences, polynucleotides comprising introns together with exons, intron/exon junction sequences, 5′ untranslated sequences, and 3′ untranslated sequences of the SDFs of the present invention. Polynucleotides representing the joinder of any exons described herein, in any arrangement, for example, to produce a sequence encoding any desirable amino acid sequence are within the scope of the invention.

[0086] The present invention also resides in probes useful for isolating and identifying nucleic acids that hybridize to an SDF of the invention. The probes can be of any length, but more typically are 12-2000 nucleotides in length; more typically, 15 to 200 nucleotides long; even more typically, 18 to 100 nucleotides long.

[0087] Yet another object of the invention is a method of isolating and/or identifying nucleic acids using the following steps:

[0088] (a) contacting a probe of the instant invention with a polynucleotide sample under conditions that permit hybridization and formation of a polynucleotide duplex; and

[0089] (b) detecting and/or isolating the duplex of step (a).

[0090] The conditions for hybridization can be from low to moderate to high stringency conditions. The sample can include a polynucleotide having a sequence unique in a plant genome. Probes and methods of the invention are useful, for example, without limitation, for mapping of genetic traits and/or for positional cloning of a desired fragment of genomic DNA.

[0091] Probes and methods of the invention can also be used for detecting alternatively spliced messages within a species. Probes and methods of the invention can further be used to detect or isolate related genes in other plant species using genomic DNA (gDNA) and/or cDNA libraries. In some instances, especially when longer probes and low to moderate stringency hybridization conditions are used, the probe will hybridize to a plurality of cDNA and/or gDNA sequences of a plant. This approach is useful for isolating representatives of gene families which are identifiable by possession of a common functional domain in the gene product or which have common cis-acting regulatory sequences. This approach is also useful for identifying orthologous genes from other organisms.

[0092] The present invention also resides in constructs for modulating the expression of the genes comprised of all or a fragment of an SDF. The constructs comprise all or a fragment of the expressed SDF, or of a complementary sequence. Examples of constructs include ribozymes comprising RNA encoded by an SDF or by a sequence complementary thereto, antisense constructs, constructs comprising coding regions or parts thereof and constructs comprising promoters. Such constructs can be constructed using viral, plasmid, bacterial artificial chromosomes (BACs), plasmid artificial chromosomes (PACs), autonomous plant plasmids, plant artificial chromosomes or other types of vectors and exist in the plant as autonomous replicating sequences or as DNA integrated into the genome. When inserted into a host cell the construct is, preferably, functionally integrated with, or operatively linked to, a heterologous polynucleotide. For instance, a coding region from an SDF might be operably linked to a promoter that is functional in a plant.

[0093] The present invention also resides in host cells, including bacterial or yeast cells or plant cells, and plants that harbor constructs such as described above. Another aspect of the invention relates to methods for modulating expression of specific genes in plants by expression of the coding sequence of the constructs, by regulation of expression of one or more endogenous genes in a plant or by suppression of expression of the polynucleotides of the invention in a plant. Methods of modulation of gene expression include without limitation (1) inserting into a host cell additional copies of a polynucleotide comprising a coding sequence; (2) modulating an endogenous promoter in a host cell; (3) inserting antisense or ribozyme constructs into a host cell and (4) inserting into a host cell a polynucleotide comprising a sequence encoding a variant, fragment, or fusion of the native polypeptides of the instant invention.

### DETAILED DESCRIPTION OF THE INVENTION

### I. DESCRIPTION OF THE DATA

[0094] As noted above, the Applicants have obtained and analyzed an extensive amount of information on a large number of genes by use of the Ceres Genomic Engine to determine. This information can be categorized into three basic types:

[0095] A. Sequence Information for the Inventions

[0096] B. Transcriptional Information for the Inventions

[0097] C. Phenotypic Information for the Inventions

[0098] I.A. Sequence Information

[0099] To harness the potential of the plant genome, Applicants began by elucidating a large number gene sequences, including the sequences of gene components and products, and analyzing the data. The list of sequences and associated data are presented in the Sequence Listing and Sequence Listing-Miscellaneous Features documents of the present application (sometimes referred to as the “REF” and “SEQ” Tables). The REF and SEQ tables include:

[0100] cDNA sequence;

[0101] coding sequence;

[0102] 5′ & 3′ UTR;

[0103] transcription start sites;

[0104] exon and intron boundaries in genomic sequence; and

[0105] protein sequence.

[0106] The REF and SEQ tables also include computer-based, comparative analyses between the protein sequences of the invention and sequences with known function. Proteins with similar sequences typically exhibit similar biochemical activities. The REF table notes:

[0107] sequences of known function that are similar to the Applicants' proteins; and

[0108] biochemical activity that is associated with Applicants' proteins.

[0109] To identify gene components and products, Applicants took a cDNA/coding sequence approach. That is, Applicants initiated their studies either by isolating cDNAs and determining their sequences experimentally, or by identifying the coding sequence from genomic sequence with the aid of predictive algorithms. The cDNA sequences and coding sequences also are referred to as “Maximum Length Sequences” in the REF tables. The cDNA and coding sequences were given this designation to indicate these were the maximum length of coding sequences identified by Applicants.

[0110] Due to this cDNA/coding sequence focus of the present application, the REF and SEQ Tables were organized around cDNA and coding sequences. Each of these Maximum Length Sequences was assigned a unique identifier: Ceres Sequence ID NO, which is reported in the Tables.

[0111] All data that relate to these Maximum Length Sequences are grouped together, including 5′ & 3′ UTRs; transcription start sites; exon and intron boundaries in genomic sequence; protein sequence, etc.

[0112] Below, a more detailed explanation of the organization of the REF and SEQ Tables and how the data in the tables were generated is provided.

[0113] a. cDNA

[0114] Applicants have ascertained the sequences of mRNAs from different organisms by reverse transcription of mRNA to DNA, which was cloned and then sequenced. These complementary DNA or cDNA sequences also are referred to as Maximum Length Sequences in the REF Tables, which contain details on each of the sequences in the SEQ Tables.

[0115] Each sequence was assigned a Pat. Appln. Sequence ID NO: and an internal Ceres Sequence ID NO: as reported in the REF Table, the section labeled “(Ac) cDNA Sequence.” An example is shown below:

[0116] Max Len. Seq.:

[0117] (Ac) cDNA Sequence
[0118] Pat. Appln. Sequence ID NO: 174538
[0119] Ceres Sequence ID NO: 5673127

[0120] Both numbers are included in the Sequence Table to aid in tracking of information, as shown below:

<210> 174538 (Pat. Appln. Sequence ID NO:)
<211> 1846
<212> DNA (genomic)
<213> Arabidopsis thaliana
<220>
<221> misc_feature
<222> (1) . . . (1846)
<223> Ceres Seq. ID no. 5673127
<220>
<221> misc_feature
<222> ( ) . . . ( )
<223> n is a, c, t, g, unknown, or other
<400> 174538

| | |
|---|---|
| acaagaacaa caaaacagag gaagaagaag aagaagatga | 60 |
| agcttctggc tctgtttcca | |
| tttctagcga tcgtgatcca actcagctgt . . . etc. | |

[0121] The Sequence and REF Tables are divided into sections by organism: Arabidopsis thaliana, Brassica napus, Glycine max, Zea mays, Triticum aestivum; and Oryza sativa.

[0122] b. Coding Sequence

[0123] The coding sequence portion of the cDNA was identified by using computer-based algorithms and comparative biology. The sequence of each coding sequence of the cDNA is reported in the “PolyP Sequence” section of the REF Tables, which are also divided into sections by organism. An example shown below for the peptides that relate to the cDNA sequence above

PolyP Sequence

[0124] Pat. Appln. Sequence ID NO 174539

[0125] Ceres Sequence ID NO 5673128

[0126] Loc. Sequence ID NO 174538: @ 1 nt.

[0127] Loc. Sig. P. Sequence ID NO 174539: @ 37 aa.

[0128] The polypeptide sequence can be found in the SEQ Tables by either the Pat. Appln. Sequence ID NO or by the Ceres Sequence ID NO: as shown below:

<210> 174539 (Pat. Appln. Sequence ID NO)
<211> 443
<212> PRT
<213> Arabidopsis thaliana
<220>
<221> peptide
<222> (1) . . . (443)
<223> Ceres Seq. ID no. 5673128
<220>
<221> misc_feature
<222> ( ) . . . ( )
<223> xaa is any aa, unknown or other
<400> 174539
Thr Arg Thr Thr Lys Gln Arg Lys Lys Lys Lys Lys
1 5 10 15
Met Lys Leu Leu Ala Leu Phe Pro Phe Leu Ala
25
Ile . . . etc.

[0129] The PolyP section also indicates where the coding region begins in the Maximum Length Sequence. More than one coding region may be indicated for a single polypeptide due to multiple potential translation start codons. Coding sequences were identified also by analyzing genomic sequence by predictive algorithms, without the actual cloning of a cDNA molecule from a mRNA. By default, the cDNA sequence was considered the same as the coding sequence, when Maximum Length Sequence was spliced together from a genomic annotation.

[0130] c. 5′ and 3′ UTR

[0131] The 5′ UTR can be identified as any sequence 5′ of the initiating codon of the coding sequence in the cDNA sequence. Similarly, the 3′ UTR is any sequence 3′ of the terminating codon of the coding sequence.

[0132] d. Transcription Start Sites

[0133] Applicants cloned a number of cDNAs that encompassed the same coding sequence but comprised 5′ UTRs of different lengths. These different lengths revealed the multiple transcription start sites of the gene that corresponded to the cDNA. These multiple transcription start sites are reported in the “Sequence # w. TSS” section” of the REF Tables.

[0134] e. Exons & Introns

[0135] Alignment of the cDNA sequences and coding portions to genomic sequence permitted Applicants to pinpoint the exon/intron boundaries. These boundaries are identified in the REF Table under the “Pub gDNA” section. That section reports the gi number of the public BAC sequence that contains the introns and exons of interest. An example is shown below:

[0136] Max Len. Seq.:

[0137] Pub gDNA:
[0138] gi No: 1000000005
[0139] Gen. seq. in cDNA:
   [0140] 115777 . . . 115448 by Method #1
   [0141] 115105 . . . 114911 by Method#1
   [0142] 114822 . . . 114700 by Method #1
   [0143] 114588 . . . 114386 by Method #1
   [0144] 114295 . . . 113851 by Method #1
   [0145] 115777 . . . 115448 by Method #2
   [0146] 115105 . . . 114911 by Method #2
   [0147] 114822 . . . 114700 by Method #2
   [0148] 114588 . . . 114386 by Method #2
   [0149] 114295 . . . 113851 by Method #2
   [0150] 115813 . . . 115448 by Method #3
   [0151] 115105 . . . 114911 by Method #3
   [0152] 114822 . . . 114700 by Method #3
   [0153] 114588 . . . 114386 by Method #3
   [0154] 114295 . . . 113337 by Method #3

[0155] (Ac) cDNA Sequence

[0156] All the gi numbers were assigned by Genbank to track the public genomic sequences except:

[0157] gi 1000000001

[0158] gi 1000000002

[0159] gi 1000000003

[0160] gi 1000000004; and

[0161] gi 1000000005.

[0162] These gi numbers were assigned by Applicants to the five Arabidopsis chromosome sequences that were published by the Institute of Genome Research (TIGR). Gi 1000000001 corresponds to chromosome 1, Gi 1000000002 to chromosome 2, etc.

[0163] The method of annotation is indicated as well as any similar public annotations.

[0164] f. Promoters & Terminators

[0165] Promoter sequences are 5′ of the translational start site in a gene; more typically, 5′ of the transcriptional start site or sites. Terminator sequences are 3′ of the translational terminator codon; more typically, 3′ of the end of the 3′ UTR.

[0166] For even more specifics of the REF and SEQ Tables, see the section below titled “Brief Description of the Tables.”

[0167] I.B. Transcriptional (Differential Expression) Information-Introduction to Differential Expression Data & Analyses

[0168] A major way that a cell controls its response to internal or external stimuli is by regulating the rate of transcription of specific genes. For example, the differentiation of cells during organogenensis into forms characteristic of the organ is associated with the selective activation and repression of large numbers of genes. Thus, specific organs, tissues and cells are functionally distinct due to the different populations of mRNAs and protein products they possess. Internal signals program the selective activation and repression programs. For example, internally synthesized hormones produce such signals. The level of hormone can be raised by increasing the level of transcription of genes encoding proteins concerned with hormone synthesis.

[0169] To measure how a cell reacts to internal and/or external stimuli, individual mRNA levels can be measured and used as an indicator for the extent of transcription of the gene. Cells can be exposed to a stimulus, and mRNA can be isolated and assayed at different time points after stimulation. The mRNA from the stimulated cells can be compared to control cells that were not stimulated. The mRNA levels of particular Maxiumum Length Sequences that are higher in the stimulated cell versus the control indicate a stimulus-specific response of the cell. The same is true of mRNA levels that are lower in stimulated cells versus the control condition.

[0170] Similar studies can be performed with cells taken from an organism with a defined mutation in their genome as compared with cells without the mutation. Altered mRNA levels in the mutated cells indicate how the mutation causes transcriptional changes. These transcriptional changes are associated with the phenotype that the mutated cells exhibit that is different from the phenotype exhibited by the control cells.

[0171] Applicants have utilized microarray techniques to measure the levels of mRNAs in cells from mutant plants, stimulated plants, and/or selected from specific organs. The differential expression of various genes in the samples versus controls are listed in the MA_diff Tables. Applicants have analyzed the differential data to identify genes whose mRNA transcription levels are positively correlated. From these analyses, Applicants were able to group different genes together whose transcription patterns are correlated. The results of the analyses are reported in the MA_clust Tables.

[0172] a. Experimental Detail

[0173] A microarray is a small solid support, usually the size of a microscope slide, onto which a number of polynucleotides have been spotted onto or synthesized in distinct positions on the slide (also referred to as a chip). Typically, the polynucleotides are spotted in a grid formation. The polynucleotides can either be Maximum Length Sequences or shorter synthetic oligonucleotides, whose sequence is complementary to specific Maximum Length Sequence entities. A typical chip format is as follows:

| | | |
|---|---|---|
| Oligo #1 | Oligo #2 | Oligo #3 |
| Oligo #4 | Oligo #5 | Oligo #6 |
| Oligo #7 | Oligo #8 | Oligo #9 |

[0174] For Applicants' experiments, samples were hybridized to the chips using the “two-color” microarray procedure. A fluorescent dye was used to label cDNA reverse-transcribed from mRNA isolated from cells that had been stimulated, mutated, or collected from a specific organ or developmental stage. A second fluorescent dye of another color was used to label cDNA prepared from control cells.

[0175] The two differentially-labeled cDNAs were mixed together. Microarray chips were incubated with this mixture. For Applicants' experiments the two dyes that are used are Cy3, which fluoresces in the red color range, and Cy5, which fluoresces in the green/blue color range. Thus, if:

[0176] cDNA#1 binds to Oligo #1;

[0177] cDNA#1 from the sample is labeled red;

[0178] cDNA#1 from the control is labeled green, and

[0179] cDNA#1 is in both the sample and control,

[0180] then cDNA#1 from both the sample and control will bind to Oligo#1 on the chip. If the sample has 10 times more cDNA#1 than the control, then 10 times more of the cDNA#1 would be hybridized to Oligo# 1. Thus, the spot on the chip with Oligo# I spot would look red.

| | | |
|---|---|---|
| | Oligo #2 | Oligo #3 |
| Oligo #4 | Oligo #5 | Oligo #6 |
| Oligo #7 | Oligo #8 | Oligo #9 |

If the situation were reversed, the spot would appear green. If the sample has approximately the same amount of cDNA#1 as the control, then the Oligo#1 spot on the chip would look yellow. These color differentials are measured quantitatively and used to deduce the relative concentration of mRNAs from individual genes in particular samples.

[0181] b. MA_Diff Data

[0182] To generate data, Applicants labeled and hybridized the sample and control mRNA in duplicate experiments. One chip was exposed to a mixture of cDNAs from both a sample and control, where the sample cDNA was labeled with Cy3, and the control was labeled with Cy5 dye. For the second labeling and chip hybridization experiments, the fluorescent labels were reversed; that is, the Cy5 dye for the sample, and the Cy3 dye for the control.

[0183] Whether Cy5 or Cy3 was used to label the sample, the fluorescence produced by the sample was divided by the fluorescence of the control. A cDNA was determined to be differentially expressed in response to the stimulus in question if a statistically-significantly ration difference in the sample versus the control was measured by both chip hybridization experiments.

[0184] The MA_diff data show which cDNA were significantly up-regulated as designated by a “+” and which were significantly down-regulated as designated by a “−” for each pair of chips using the same sample and control.

[0185] I.C. Phenotypic Information

[0186] One means of determining the phenotypic effect of a gene is either to insert extra active copies of the gene or coding sequence, or to disrupt an existing copy of the gene in a cell or organism and measure the effects of the genetic change on one or more phenotypic characters or traits. “Knock-in” is used herein to refer to insertion of additional active copies of a gene or coding sequence. “Knock-out” refers to a plant where an endogenous gene(s) is disrupted. Applicants have used both methods of addition or disruption to determine the phenotypic effects of gene or gene components or products, and have thereby discovered the function of the genes and their utilities.

[0187] 1. Knock-In Results

[0188] The coding sequence of a desired protein can be functionally linked to a heterologous promoter to facilitate expression. Here, Applicants have operably linked a number of coding sequences to either one of the promoters listed below:

| | Specific Promoter | Plant Line |
|---|---|---|
| GFP Pattern | activity | Descriptor |
| Root epidermis/mostly toward the lower | Specific to the root basal | Root basal |
| region of root (more intense than CS9094) | region. | |
| Root-endodermis/cortex (initials sharp); | Specific to the root | Root/Petiole/Flowers |
| shoot-mesophyll of one leaf, sharp guard cell | endodermis-cortex | |
| marking. New leaf petioles near tip of | region, leaf petiole, and | |
| primary inflorescence; floral stems; in | flowers. | |
| flowers at base of sepal, anther stems, and | | |
| pistil | | |
| Broad root exp. (some dermal, some cortical, | Specific to root and stem. | Root/Stem 1 |
| some vascular); shoot apex. Faintly in | | |
| petiole; stem | | |
| High expression in stem, excluded from 1st | Specific to stem and root. | Root/Stem2 |
| true leaves/High in root. Faint expression in | | |
| stem | | |
| Shoot meristem/whole root region; little bit | Specific to roots, shoot | Root/Stem/Leaves/F1 |
| on cotyledons. Base of leaves(axillary | meristem, base of leaves | owers |
| meristem?); base of sepals; inflorescence | and flowers. | |
| meristem; small amount in unfertilized pistil. | | |
| root tip vascular initials; vascular system | Specific to vascular | Vascular/Ovule/Young |
| throughout plant; Bud petal vasculature and | systems. | Seed/Embryo |
| pistil septum; Flower petal vascualture; | | |
| Flower pistil septum; Pre fertilization ovules; | | |
| Post fertilization ovule at chalazal end; | | |
| Developing seed (young, maturing siliques); | | |
| Seed coat and young embryos. GFP not | | |
| observed in mature embryos. | | |
| Flower, sepal/vascular tissue of root, stem, | Specific to flowers, seed | Flowers/Seed/Vasculature/ |
| and cotyledons. Stems of new flowers; | and vasculature. | Embryo |
| vasculature or petals, anthers, sepals, and | | |
| pistil/silique; Vasculature throughout | | |
| seedling: root, hypocotyl, petioles, stem, | | |
| cotyledons, first true leaves; Rosette | | |
| vasculature; Cauline leaf vasculature; Bud | | |
| pedicel vasculature; Flower vasculature: | | |
| (sepals, petals, filaments, pistil); Bud | | |
| vasculature (sepal, petal, filament, pistil); | | |
| Funiculus in both flower and bud; Some | | |
| possible seed coat expression; Silique | | |
| funiculus; Very faint fluorescence in mature | | |
| embryo (auto fluorescence perhaps); | | |
| Root expression - primarily in cortex (upper | Specific to root. | Roots2 |
| refion of the root). No shoot expression | | |
| Root expression - less intense in whole root | Specific to root and shoot | Root/SAM |
| of young seedling. Shoot apical meristem; | apical meristem. | |
| organ primordia in SAM region. | | |
| Root epidermis/tip; shoot epidermis/vascular; | Specific to seed and to | Seed/Epidermis/Ovary/ |
| leaf epidermis; expression in developing | epidermal layers of roots, | Fruit |
| seed/ovule - mature embryo; Primary and | shoots and leaves. | |
| lateral root cortex; Very strong in root cap; | | |
| Base of flower bud and epidermis of carpels; | | |
| Base of flower, epidermis of filaments, | | |
| epidermis of carpels; Trichomes; Weak | | |
| (hardly detectable) gfp expression in | | |
| vasculature throughout seedling; Strong | | |
| expression in trichomes; POST - fertilization | | |
| SEED only; GFP strength increases as | | |
| silique matures; Weak at suspensor end of | | |
| the embryo; GFP observed in seed coat; Root | | |
| and post fertilization seed specific gfp | | |
| expression; Expression in seed coat. | | |
| Young root dermis; dermal/cortical?/vascular | Specific to roots, shoots, | Roots/Shoots/Ovule |
| in older root; general (epidermal?) shoot | and ovules. | |
| expression; ovules. some in sepals; | | |
| vasculature of stem | | |
| Vascular tissue of root; Meristem tissues: | Specific to root structural | Vasculature/Meristem |
| axillary meristems, floral meristems, base of | leaf vascular region and | |
| flowers/sepals; Weak expression in | to floral buds and axillary | |
| hypocotyl, petiole and cotyledon | meristem | |
| vasculature. | | |

[0189] The chimeric constructs were transformed into Arabidopsis thaliana. The resulting transformed lines were screened to determine what phenotypes were changed due to introduced transgene. The phenotype changes, relative to the control, are reported in the Knock-in tables.

[0190] I.D. Brief Description of the Individual Tables

1. Reference and Sequence Tables

[0191] The sequences of exemplary SDFs and polypeptides corresponding to the coding sequences of the instant invention are described in the Sequence Listing and Sequence Listing-Miscellaneous Feature documents (sometimes referred to as the REF and SEQ Tables. The REF Table refers to a number of “Maximum Length Sequences” or “MLS.” Each MLS corresponds to the longest cDNA obtained, either by cloning or by the prediction from genomic sequence. The sequence of the MLS is the cDNA sequence as described in the Av subsection of the REF Table.

[0192] The REF Table includes the following information relating to each MLS:

[0193] I. cDNA Sequence
[0194] A. 5′ UTR
[0195] B. Coding Sequence
[0196] C. 3′ UTR

[0197] II. Genomic Sequence
[0198] A. Exons
[0199] B. Introns
[0200] C. Promoters

[0201] III. Link of cDNA Sequences to Clone IDs

[0202] IV. Multiple Transcription Start Sites

[0203] V. Polypeptide Sequences
[0204] A. Signal Peptide
[0205] B. Domains
[0206] C. Related Polypeptides

[0207] VI. Related Polynucleotide Sequences

[0208] I. cDNA Sequence

[0209] The REF Table indicates which sequence in the SEQ Table represents the sequence of each MLS. The MLS sequence can comprise 5′ and 3′ UTR as well as coding sequences. In addition, specific cDNA clone numbers also are included in the REF Table when the MLS sequence relates to a specific cDNA clone.

[0210] A. 5′ UTR

[0211] The location of the 5′ UTR can be determined by comparing the most 5′ MLS sequence with the corresponding genomic sequence as indicated in the Reference Table. The sequence that matches, beginning at any of the transcriptional start sites and ending at the last nucleotide before any of the translational start sites corresponds to the 5′ UTR.

[0212] B. Coding Region

[0213] The coding region is the sequence in any open reading frame found in the MLS. Coding regions of interest are indicated in the PolyP SEQ subsection of the REF Table.

[0214] C. 3′ UTR

[0215] The location of the 3′ UTR can be determined by comparing the most 3′ MLS sequence with the corresponding genomic sequence as indicated in the REF Table. The sequence that matches, beginning at the translational stop site and ending at the last nucleotide of the MLS corresponds to the 3′ UTR.

[0216] II. Genomic Sequence

[0217] Further, the REF Table indicates the specific “gi” number of the genomic sequence if the sequence resides in a public databank. For each genomic sequence, REF tables indicate which regions are included in the MLS. These regions can include the 5′ and 3′ UTRs as well as the coding sequence of the MLS. See, for example, the scheme below:

[chemical structure]

[0218] The REF Table reports the first and last base of each region that are included in an MLS sequence. An example is shown below:

[0219] gi No. 47000:

[0220] 37102 . . . 37497

[0221] 37593 . . . 37925

[0222] The numbers indicate that the MLS contains the following sequences from two regions of gi No. 47000; a first region including bases 37102-37497, and a second region including bases 37593-37925.

[0223] A. Exon Sequences

[0224] The location of the exons can be determined by comparing the sequence of the regions from the genomic sequences with the corresponding MLS sequence as indicated by the REF Table.

[0225] i. Initial Exon

[0226] To determine the location of the initial exon, information from the

[0227] (1) polypeptide sequence section;

[0228] (2) cDNA polynucleotide section; and

[0229] (3) the genomic sequence section

[0230] of the REF Table is used. First, the polypeptide section will indicate where the translational start site is located in the MLS sequence. The MLS sequence can be matched to the genomic sequence that corresponds to the MLS. Based on the match between the MLS and corresponding genomic sequences, the location of the translational start site can be determined in one of the regions of the genomic sequence. The location of this translational start site is the start of the first exon.

[0231] Generally, the last base of the exon of the corresponding genomic region, in which the translational start site was located, will represent the end of the initial exon. In some cases, the initial exon will end with a stop codon, when the initial exon is the only exon.

[0232] In the case when sequences representing the MLS are in the positive strand of the corresponding genomic sequence, the last base will be a larger number than the first base. When the sequences representing the MLS are in the negative strand of the corresponding genomic sequence, then the last base will be a smaller number than the first base.

[0233] ii. Internal Exons

[0234] Except for the regions that comprise the 5′ and 3′ UTRs, initial exon, and terminal exon, the remaining genomic regions that match the MLS sequence are the internal exons. Specifically, the bases defining the boundaries of the remaining regions also define the intron/exon junctions of the internal exons.

[0235] iii. Terminal Exon

[0236] As with the initial exon, the location of the terminal exon is determined with information from the

[0237] (1) polypeptide sequence section;

[0238] (2) cDNA polynucleotide section; and

[0239] (3) the genomic sequence section

[0240] of the REF Table. The polypeptide section will indicate where the stop codon is located in the MLS sequence. The MLS sequence can be matched to the corresponding genomic sequence. Based on the match between MLS and corresponding genomic sequences, the location of the stop codon can be determined in one of the regions of the genomic sequence. The location of this stop codon is the end of the terminal exon. Generally, the first base of the exon of the corresponding genomic region that matches the cDNA sequence, in which the stop codon was located, will represent the beginning of the terminal exon. In some cases, the translational start site will represent the start of the terminal exon, which will be the only exon.

[0241] In the case when the MLS sequences are in the positive strand of the corresponding genomic sequence, the last base will be a larger number than the first base. When the MLS sequences are in the negative strand of the corresponding genomic sequence, then the last base will be a smaller number than the first base.

[0242] B. Intron Sequences

[0243] In addition, the introns corresponding to the MLS are defined by identifying the genomic sequence located between the regions where the genomic sequence comprises exons. Thus, introns are defined as starting one base downstream of a genomic region comprising an exon, and end one base upstream from a genomic region comprising an exon.

[0244] C. Promoter Sequences

[0245] As indicated below, promoter sequences corresponding to the MLS are defined as sequences upstream of the first exon; more usually, as sequences upstream of the first of multiple transcription start sites; even more usually as sequences about 2,000 nucleotides upstream of the first of multiple transcription start sites.

[0246] III. Link of cDNA Sequences to Clone IDs

[0247] As noted above, the REF Table identifies the cDNA clone(s) that relate to each MLS. The MLS sequence can be longer than the sequences included in the cDNA clones. In such a case, the REF Table indicates the region of the MLS that is included in the clone. If either the 5′ or 3′ termini of the cDNA clone sequence is the same as the MLS sequence, no mention will be made.

[0248] IV. Multiple Transcription Start Sites

[0249] Initiation of transcription can occur at a number of sites of the gene. The REF Table indicates the possible multiple transcription sites for each gene. In the REF Table, the location of the transcription start sites can be either a positive or negative number.

[0250] The positions indicated by positive numbers refer to the transcription start sites as located in the MLS sequence. The negative numbers indicate the transcription start site within the genomic sequence that corresponds to the MLS.

[0251] To determine the location of the transcription start sites with the negative numbers, the MLS sequence is aligned with the corresponding genomic sequence. In the instances when a public genomic sequence is referenced, the relevant corresponding genomic sequence can be found by direct reference to the nucleotide sequence indicated by the “gi” number shown in the public genomic DNA section of the Reference Table. When the position is a negative number, the transcription start site is located in the corresponding genomic sequence upstream of the base that matches the beginning of the MLS sequence in the alignment. The negative number is relative to the first base of the MLS sequence which matches the genomic sequence corresponding to the relevant “gi” number.

[0252] In the instances when no public genomic DNA is referenced, the relevant nucleotide sequence for alignment is the nucleotide sequence associated with the amino acid sequence designated by “gi” number of the later PolyP SEQ subsection.

[0253] V. Polypeptide Sequences

[0254] The PolyP SEQ subsection lists SEQ ID NOs and Ceres SEQ ID NO for polypeptide sequences corresponding to the coding sequence of the MLS sequence and the location of the translational start site with the coding sequence of the MLS sequence.

[0255] The MLS sequence can have multiple translational start sites and can be capable of producing more than one polypeptide sequence.

[0256] A. Signal Peptide

[0257] The REF tables also indicate in subsection (B) the cleavage site of the putative signal peptide of the polypeptide corresponding to the coding sequence of the MLS sequence. Typically, signal peptide coding sequences comprise a sequence encoding the first residue of the polypeptide to the cleavage site residue.

[0258] B. Domains

[0259] Subsection (C) provides information regarding identified domains (where present) within the polypeptide and (where present) a name for the polypeptide domain.

[0260] C. Related Polypeptides

[0261] Subsection (Dp) provides (where present) information concerning amino acid sequences that are found to be related and have some percentage of sequence identity to the polypeptide sequences of the Reference and Sequence Tables. These related sequences are identified by a “gi” number.

[0262] VI. Related Polynucleotide Sequences

[0263] Subsection (Dn) provides polynucleotide sequences (where present) that are related to and have some percentage of sequence identity to the MLS or corresponding genomic sequence.

| Abreviation | Description |
|---|---|
| Max Len. Seq. | Maximum Length Sequence |
| rel to | Related to |
| Clone Ids | Clone ID numbers |
| Pub gDNA | Public Genomic DNA |
| gi No. | gi number |
| Gen. Seq. in Cdna | Genomic Sequence in cDNA |
| | (Each region for a single gene prediction is |
| | listed on a separate line. |
| | In the case of multiple gene predictions, the |
| | group of regions relating to a single prediction |
| | are separated by a blank line) |
| (Ac) cDNA SEQ | cDNA sequence |
| Pat. Appln. SEQ ID NO | Patent Application SEQ ID NO: |
| Ceres SEQ ID NO: | Ceres SEQ ID NO: |
| 1673877 | |
| SEQ # w. TSS | Location within the cDNA sequence, SEQ ID |
| | NO:, of Transcription Start Sites which are |
| | listed below |
| Clone ID #: # −> # | Clone ID comprises bases # to # of the cDNA |
| | Sequence |
| PolyP SEQ | Polypeptide Sequence |
| Pat. Appln. SEQ ID NO: | Patent Application SEQ ID NO: |
| Ceres SEQ ID NO | Ceres SEQ ID NO: |
| Loc. SEQ ID NO: @ nt. | Location of translational start site in cDNA of |
| | SEQ ID NO: at nucleotide number |
| (C) Pred. PP Nom. | Nomination and Annotation of Domains within |
| & Annot. | Predicted Polypeptide(s) |
| (Title) | Name of Domain |
| Loc. SEQ ID NO #: | Location of the domain within the polypeptide |
| # −> # aa. | of SEQ ID NO: from # to # amino acid |
| | residues. |
| (Dp) Rel. AA SEQ | Related Amino Acid Sequences |
| Align. NO | Alignment number |
| gi No | Gi number |
| Desp. | Description |
| % Idnt. | Percent identity |
| Align. Len. | Alignment Length |
| Loc. SEQ ID NO: | Location within SEQ ID NO: from # to # |
| # −> # aa | amino acid residue. |

[0264] 2. MA DATA

[0265] The MA DATA presents the results of the differential expression experiments for the mRNAs, as reported by their corresponding cDNA ID number, that were differentially transcribed under a particular set of conditions as compared to a control sample. The cDNA ID numbers correspond to those utilized in the Reference and Sequence Tables. Increases in mRNA abundance levels in experimental plants versus the controls are denoted with the plus sign (+). Likewise, reductions in mRNA abundance levels in the experimental plants are denoted with the minus (−) sign.

[0266] The “cDNA_ID provides the identifier number for the cDNA tracked in the experiment. The column headed “SHORT_NAME” (e.g. At_{—}0.001%_MeJa_cDNA_P) provides a short description of the experimental conditions used. The column headed “EXPT_REP_ID” provides an identifier number for the particular experiment conducted. The values in the column heades “Differential” indicate whether expression of the cDNA was increased (+) or decreased (−) compared to the control.

[0267] In some cases, data relating to how the experiment was conducted follows the results of the experiment. Here, the data following the expression results provides the experimental parameters used in conducting the microarray experiment. Again, the “SHORT_NAME” identifies the experiment t(e.g. At_{—}0.001%_MeJa_cDNA_P). The firest column, “EXPT_REP_ID,” indicates the individual experiment (e.g. 108569). The comnd column, “PARAM_NAME,” identifies the parameter used (e.g. Timepoint (hr)), while the third column, “Value” provides the descriptor for the particular parameter (e.g. “6”). As an example, when read together one understand sthat the “methyl jasmonate” section of the Specification provides information pertinent to the 0.001% MeJA (methyl jasmonate experiment 108569, which contains data taken from a 6 hr timepoint.

3. MA Parameters DATA

[0268] This data provides the experimental parameters used in conducting the microarray experiments. The first column indicates the pertinent section of the Specification. The second column provides the “Short Name” for the experiment (e.g. At_{—}0.001%_MeJA_cDNA_P). The third column gives the “Experiment ID” number. The fourth column is the particular parameter being described (e.g. Timepoint (hr)). The last column provides the descriptor for the particular parameter (e.g. “6”). As an example, when read together one understands that the “Methyl Jasmonate” section of the Specification provides information pertinent to the 0.001% MeJA (methyl jasmonate) experiment 108569, which contains data taken from a 6 hr Timepoint.

4. Ortholog Pair DATA

[0269] This table lists pairs of orthologs that were identified using the T Blast X program. Each column contains a cDNA_id number corresponding to a sequence from Arabidopsis, wheat, corn, soybean or canola. The sequence corresponding to all cDNA_id numbers can be found in either the SEQ Table or the REF Table.

5. Phenotype DATA

[0270] This table provides information regarding the phenotype associated with expression of particular cDNAs. The first column identifies the cDNA_id or clone_id number of the sequence associated with the experiment.

[0271] The “Promoter” column identifies the promoter used to drive expression of the cDNA. “35S” refers to the Cauliflower Mosaic Virus (CMV) 35S promoter while the remaining entries signify a particular cDNA_id number. The endogenous promoter for the identified cDNA sequence, located immediately upstream from the cDNA start site, was used. These sequences appear in the “Promoter Table”

[0272] The“line_id” column gives the identifier number associated with the plant transformed with the cDNA or clone listed in the first column. For example, “ME0589-01“is a plant that resulted from a unique independent insertion of cDNA 3265003 into the plant genome. Likewise, “ME0589-02“was also the result of a unique independent insertion event. Consequently, the portion of the identifier located after the dash (e.g. “−03,”“−04,” etc.) indicates which of the series of “T1” plants generated was scored for a phenotype. That is, if ten T1 plants were grown from the transformation involving cDNA 3265003, these would be identified as ME0589-01 to ME0589-10.

[0273] The “Phenotype Present?” column identifies whether a gross visual phenotype was present. “Yes” indicates that a phenotype different from wildtype was observed while “No” indicates no visible change from wildtype. “Questionable” indicates that the transformant showed a phenotype, but that it was uncertain whether the phenotype was due to the gene inserted or to other factors (e.g. environmental).

[0274] The “Developmental Stage” column provides information as to the developmental stage of the plant when it was scored for phenotype. The following chart correlates a numerical value with a short description of a particular developmental stage.

| DEV_STAGE | DESCRIPTION |
|---|---|
| 0 | N/A |
| 0.10 | Seed imbibition |
| 0.50 | Radical emergence |
| 0.70 | Hypocotyl and cotyledon emergence |
| 1.00 | Cotyledons fully opened |
| 1.02 | 2 rosette leaves 1 mm in length |
| 1.03 | 3 rosette leaves 1 mm in length |
| 1.04 | 4 rosette leaves 1 mm in length |
| 1.05 | 5 rosette leaves 1 mm in length |
| 1.06 | 6 rosette leaves 1 mm in length |
| 1.07 | 7 rosette leaves 1 mm in length |
| 1.08 | 8 rosette leaves 1 mm in length |
| 1.09 | 9 rosette leaves 1 mm in length |
| 1.10 | 10 rosette leaves 1 mm in length |
| 1.11 | 11 rosette leaves 1 mm in length |
| 1.12 | 12 rosette leaves 1 mm in length |
| 1.13 | 13 rosette leaves 1 mm in length |
| 1.14 | 14 rosette leaves 1 mm in length |
| 3.50 | Rosette is 50% of final size |
| 5.10 | First flower buds visible |
| 6.00 | First flower open |
| 6.10 | 10% of flowers to be produced have opened |
| 6.30 | 30% of flowers to be produced have opened |
| 6.50 | 50% of flowers to be produced have opened |
| 6.90 | Flowering complete |
| 8.00 | First silique shattered |
| 8.50 | 50% of the siliques have shattered |
| 9.70 | Senescence complete |
| 10.0 | All Stages |
| [NULL] | No mutant phenotype or plant died |

[0275] The “Phenotype Observed” column describes the phenotype associated with the plant transformed with the particular cDNA_id or clone_id. The term “[NULL]” appears when no gross visual phenotype was present or where the plant died. Note that a single plant line may have more than one phenotype associated with it. For example, ME05809-01 has a short petiole phenotype associated with its rosette leaves as well as an oval leaf shape.

22. PROMOTER Table

[0276] This data identifies nucleic acid promoter sequences using the heading “PROMOTER ID NO.” The “PROMOTER ID NO” is a number that identifies the sequence of the promoter used in the experiments

### II. HOW THE INVENTIONS REVEAL HOW GENES, GENE COMPONENTS AND PRODUCTS FUNCTION

[0277] The different experimental molecular genetic approaches focused on different aspects of genes, gene components, and gene products of the inventions. The variety of the data demonstrates the multiple functions and characteristics of single genes, gene components, and products. The data also explain the pathways and networks in which individual genes and products participate and interact. As a result, the circumstances or conditions are now known when these genes and networks are active. These new understandings of biology are relevant for many plant species. The following section describes the process by which Applicants analyzed the experimental result relavent to the present invention.

[0278] II.A. Experimental Results Reveal many Facets of a Single Gene

[0279] The experimental results are used to dissect the function of individual components and products of the genes. For example, the biochemical activity of the encoded protein could be surmised from sequence analyses, and promoter specificity could be identified through transcriptional analyses. Generally, the data presented herein can be used to functionally annotate either the protein sequence and/or the regulatory sequence that control transcription and translation.

[0280] II.A.1. Functions of Coding Sequences Revealed by the Ceres Genomic Engine

II.A.1.a. Sequence Similarity to Proteins of Known Function can be Used to Associate Biochemical Activities and Molecular Interaction to the Proteins of the Invention

[0281] The protein sequences of the invention were analyzed to determine if they shared any sequence characteristics with proteins of known activity. Proteins can be grouped together based on sequence similarity, either localized or throughout the length of the proteins. Typically, such groups of proteins exhibit common biochemical activities or interact with similar molecules.

II.A.1.a.1 Presence of Amino Acid Motifs Indicates Biological Function

[0282] Localized protein sequence similarity, also referred to as amino acid motifs, have been attributed to enzyme or protein functions. A library of motifs, important for function, have been documented in PROSITE, a public database available at http://www.expasy.ch/prosite/. This library includes descriptions of the motifs and their functions. The zinc finger motif is one such entry in PROSITE, which reports that the zinc finger domain of DNA-binding proteins is typically defined by a 25-30 amino acid motif containing specific cysteine or histidine residues that are involved in the tetrahedral coordination of a zinc ion. Any protein comprising a sequence similar to the zinc finger amino acid motif will have similar functional activity (specific binding of DNA).

[0283] Protein sequences of the invention have been compared to a library of amino acid motifs in the pFAM database, which is linked to the PROSITE database. If any of Applicants' protein sequences exhibit similarity to these amino acid motifs or domains, the Reference Table notes the name and location of the motif in the “Pred. PP Nom. & Annot” section of the Reference tables. A description of any biochemical activities that are associated to these domains, and therefore associated with Applicants' proteins, is included in the Protein Domain table.

[0284] For example, polypeptide, CERES Sequence ID NO: 1545823 is associated with zinc finger motif as follows in the Reference Table:

[0286] (C) Pred. PP Nom. & Annot.
[0287] Zinc finger, C3HC4 type (RING finger)
[0288] Loc. Sequence ID NO 133059: 58 →106 aa.
   II.A.1.a.2 Related Amino Acid Sequences Share Similar Biological Functions

[0289] When studying protein sequence families, it is apparent that some regions have been better conserved than others during evolution. These regions are generally important for the function of a protein and/or for the maintenance of its three-dimensional structure.

[0290] The Reference Table reports in section “(Dp) Rel. AA Sequence” when a protein shares amino acid similarity with a protein of known activity. The section reports the gi number of the protein of known activity, a brief description of the activity, and the location where it shares sequence similarity to Applicants' polypeptide sequence.

[0291] Using this analysis, biochemical activity of the known protein is associated with Applicants' proteins. An example for the polypeptide described above is as follows:

[0292] (Dp) Rel. AA Sequence
[0293] Align. NO 524716
[0294] gi No 2502079
[0295] Desp.: (AF022391) immediate early protein; ICP0 [Feline herpesvirus 1]
[0296] % Idnt. : 33.7
[0297] Align. Len.: 87
[0298] Loc. Sequence ID NO 133059: 52→137 aa.
   II.A.1.b. Differential Expression Results Explain in which Cellular Responses the Proteins of the Invention are Involved

[0299] Differential expression results show when the coding sequence is transcribed, and therefore when the activity of the protein is deployed by the cell. Similar coding sequences can have very different physiological consequences because the sequences are expressed at different times or places, rather than because of any differences in protein activity. Therefore, modified levels (increased or decreased) of expression as compared to a control provide an indication of the function of a corresponding gene, gene components, and gene products.

[0300] These experiments can determine which are genes “over-expressed” under a given stimulus. Such over-expressed genes give rise to higher transcript levels in a plant or cell that is stimulated as compared to the transcript levels of the same genes in a control organism or cell. Similarly, differential expression experiments can reveal “under-expressed” genes.

[0301] To increase the cellular response to a stimulus, additional copies of the coding sequences of a gene that is over-expressed are inserted into a cell. Increasing transcript levels of an over-expressed gene can either heighten or prolong the particular cellular response. A similar enhancement can occur when transcription of an under-expressed gene is inhibited. In contrast, the cellular response will be shortened or less severe when the over-expressed genes are inhibited or when expression of the under-expressed genes are increased.

[0302] In addition to analyzing the levels of transcription, the data were also analyzed to gain insight into the changes in transcription over time. That is, while the plants in the experiments were reacting to either an external or internal stimulus, a differential experiment takes a snapshot of the transcription levels in the cells at one specific time. However, a number of snap-shots can be taken at different time points during an external stimulus regime or at different stages of development during an internal stimulus. These results show how the plant changes transcription levels over time, and therefore protein levels in response to specific stimuli to produce phenotypic changes. These results show that a protein can be implicated in a single, but more likely, in a number of cellular responses.

II.A.1.b.1. The Transcript Levels of a Protein Over Time in Response to a Stimuli are Revealed by Transcriptional Analyses Over Many Experiments

[0303] Applicants produced data from plants at different times after a specific stimulus. These results show whether the expression level of a gene spikes at a key moment during the cellular response, or whether the transcript level remains constant. Thus, coding sequences not only can be determined to be over- or under-expressed, but also can be classified by the initial timing and duration of differential expression. This understanding of timing can be used to increase or decrease any desired cellular response.

[0304] Generally, Applicants have assayed plants at 2 to 4 different time points after exposing the plants to the desired stimuli. From these experiments, “early” and “late” responders were identified. These labels are applied to either the regulatory sequences driving transcription of the gene as well as to the protein encoded by the gene.

[0305] The following example illustrates how the genes, gene components and products were classified as either early or late responders following a specific. The mRNAs from plants exposed to drought conditions were isolated 1 hour and 6 hours after exposure to drought conditions. These mRNAs were tested utilizing microarray techniques. The graph below illuminates possible transcription profiles over the time course, plotting all the (+) data points as +1 and all the (−) data points as −1:

[image]

[0306] (The value for each time point was determined using a pair of microarray chips as described above.)

[0307] Data acquired from this type of time course experiment are useful to understand how one may increase or decrease the speed of the cellular response. Inserting into a cell extra copies of the coding sequence of early responders in order to over-express the specific gene can trigger a faster cellular response. Alternatively, coding sequences of late responders that are over-expressed can be placed under the control of promoters of early responders as another means to increase the cellular response.

[0308] Inserting anti-sense or sense mRNA suppression constructs of the early responders that are over-expressed can retard action of the late responders, thereby delaying the desired cellular response. In another embodiment, extra copies of the promoters of both early and late responders can be added to inhibit expression of both types of over-expressed genes.

[0309] The experiments described herein are grouped together to determine the time course of the transcript levels of different coding sequences in response to different stimuli.

II.A.1.b.2. The Transcript Levels of a Protein Over Different Developmental Stages can be Identified by Transcriptional Analyses Over Many Experiments

[0310] Differential expression data were produced for different development stages of various organs and tissues. Measurement of transcript levels can divulge whether specific genes give rise to spikes of transcription at specific times during development, or whether transcription levels remain constant. This understanding can be used to increase speed of development, or to arrest development at a specific stage.

[0311] Like the time-course experiments, the developmental stage data can classify genes as being transcribed at early or late stages of development. Generally, Applicants assayed different organs or tissues at 2-4 different stages.

[0312] Inhibiting under-expressed genes at either early or late stages can trigger faster development times. The overall development time also can be increased by this means to allow organs and tissue to grow to a larger size or to allow more organs or tissues to be produced. Alternatively, coding sequences of late stage genes that are under-expressed can be placed under the control of promoters of early stage genes to increase heighten development.

[0313] Inserting extra copies of the coding sequence early stage genes that are under-expressed can retard action of the late-stage genes and delay the desired development.

[0314] Fruit development of Arabidopsis is one example that can be studied. Siliques of varying sizes, which are representative of different stages, were assayed by microarray techniques. Specifically, mRNA was isolated from siliques between 0-5 mm, between 5-10 mm and >10 mm in length. The graph below shows expression pattern of a cell wall synthesis gene, cDNAID 1595707, during fruit development:

[image]

[0315] The developmental course shows that the gene encoding a cell wall synthesis protein is up-regulated when the fruit is 0-5 mm but returns to normal levels at 5-10 mm and >10 mm. Increase of cell wall synthesis can lead to larger cells and/or greater number of cells. This type of increase can boost fruit yield. The coding sequence of the cell wall synthesis protein under the control of a strong early stage promoter would increase fruit size or number.

[0316] A pectinesterase gene was also differentially expressed during fruit development, cDNA ID 1396123. Pectinesterase catalyzes the hydrolysis of pectin into pectate and methanol. This biochemical activity plays an important role in cell wall metabolism during fruit ripening. To shorten the time for fruit ripening, extra copies of this gene with its endogenous promoter can be inserted into a desired plant. With its native promoter, the extra copies of the gene will be expressed at the normal time, to promote extra pectinesterase at the optimal stage of fruit development thereby shortening ripening time.

II.A.1.b.3. Proteins that are Common in a Number of Similar Responses can be Identified by Transcriptional Analyses Over a Number of Experiments

[0317] The differential expression experiments also reveal the genes, and therefore the coding sequence, that are common to a number of cellular responses. By identifying the genes that are differentially expressed in a number of similar responses, the genes at the nexus of a range of responses are discovered. For example, genes that are differentially expressed in all the stress responses are at the hub of many of the stress response pathways.

[0318] These types of nexus genes, proteins, and pathways are differentially expressed in many or majority of the responses or developmental conditions of interest. Typically, a nexus gene, protein, or pathway is differentially expressed in generally the same direction in many or majority of all the desired experiments. By doing so, the nexus gene can be responsible for triggering the same or similar set of pathways or networks for various cellular responses. This type of gene is useful in modulating pleiotropic effects or triggering or inhibiting a general class of responses.

[0319] When nexus genes are differentially expressed in a set of responses, but in different directions, these data indicate that a nexus gene is responsible for creating the specificity in a response by triggering the same pathway but to a different degree. Placing such nexus genes under a constitutive promoter to express the proteins at a more constant level can remove the fluctuations. For example, a plant that is better drought adapted, but not cold adapted can be modified to be tolerant to both conditions by placing under the control of a constitutive promoter a nexus gene that is up-regulated in drought but down regulated in cold.

[0320] Applicants' experiments can be grouped together to identify such nexus genes. Examples of these groups are as follows:

[0321] Herbicide Response
[0322] Trimec, Finale, Glean, Round-up

[0323] Stress Response
[0324] Drought, Cold, Heat, Osmotic, PEG, Trimec, Finale, Glean, Round-up
[0325] Wounding, SA, MeJA, Reactive Oxygen, NO

[0326] Hormone Responses
[0327] NAA, BA, BR, GA,
[0328] NAA, Trimec
   II.A.1.b.4. Proteins that are Common to Disparate Responses can be Identified by Transcriptional Analyses Over a Number of Experiments

[0329] Phenotypes and traits result from complex interactions between cellular pathways and networks. Which pathways are linked by expression of common genes to specify particular traits can be discerned by identifying the genes that show differential expression of seemingly disparate responses or developmental stages. For example, hormone fluxes in a plant can direct cell patterning and organ development. Genes that are differentially expressed both in the hormone experiments and organ development experiments would be of particular interest to control plant development.

[0330] Examples Of Such Pathway Interactions Include:
[0331] (i) The Interaction Between Stress Tolerance Pathways And Metabolism Pathways;
[0332] (ii) Interaction Between Hormone Responses And Developmental Changes In The Plant;
[0333] (iii) Interactions Between Nutrient Uptake And Developmental Changes;
[0334] (iv) Mediation Of Stress Response By Hormone Responses; And
[0335] (v) Interactions Between Stress Response And Development.
   Applicant's experiments can be grouped together to identify proteins that participate in interacting pathways or networks. Specific groups of experiments include, for example:

[0336] (i) Stress & Metabolism
[0337] Germinating Seeds

[0338] (ii) Hormones & Development
[0339] NAA, BA & Root Tips, Roots And/Or Root Tips, Leaf, ABA & Siliques (Of Any Size), GA, Imbibed & Germinating Seeds, Tissue Specific Expression

[0340] (iii) Nutrient Uptake And Development
[0341] Any Or All Nitrogen Experiments With Siliques (Of Any Size), Roots Or Root Tips

[0342] (iv) Stress & Hormones
[0343] ABA, Drought, Cold, Heat, & Wounding, Tissue Specific Expression

[0344] (v) Stress & Hormones Stress & Hormones
[0345] Nitrogen High transition to Low, Tissue Specific Expression
   II.A.1.c. Observations of Phenotypic Changes show what Physiological Consequences Applicants' Proteins can Produce

[0346] Another direct means of determining the physiological consequences of a protein is to make aberrant decreases or increases of its expression level in a cell. To this end, Applicants have produced plants where specific genes have been disrupted, or produced plants that include an extra expressed copy of the gene. The plants were then planted under various conditions to determine if any visible physiological changes are caused. These changes then are attributed to the changes in protein levels.

[0347] II.A.2. Differential Expression Results Explain which External of Internal Stimuli Trigger the Regulatory Sequences

[0348] Transcriptional studies can reveal the time and place that genes are expressed. Typically, regulatory sequences, such as promoters, introns, UTRs, etc., control when and in which cells transcription occurs. Differential studies can explain the temporal- and location-specific regulatory sequences that control transcription.

[0349] Using the experiments that are provided herein, one skilled in the art can choose a promoter or any other regulatory sequence that is capable of facilitating the desired pattern of transcription. For example, if a promoter is needed to give rise to increased levels of transcription in response to Auxin, but little expression in response to cytokinin, then the promoters of cDNAs that were up-regulated in the Auxin experiments, but down-regulated the cytokinin experiments would be of interest.

[0350] Time Course Experiments—Time Sensitive

[0351] Evaluation of time-course data as described above is also useful to identify time-specific promoters. Promoters or regulatory sequences, like the coding sequences, can be classified as early or late responding according to the microarray data. Promoters that facilitate expression of early or late genes are useful to direct expression of heterologous coding sequences to modulate the cellular response. In the drought data, promoters from “early” responding genes can be selected to activate expression of any desired coding sequence. Thus, a coding sequence for a salt-tolerance protein that is not typically expressed early in response to drought could be linked to an “early” responding promoter to increase salt tolerance within one hour after exposure to drought conditions.

[0352] Developmental Experiments—Time Sensitive

[0353] Another class of time-sensitive promoters and other regulatory sequence can be identified from the experiments examining different developmental stages. These regulatory sequences can drive transcription of heterologous sequence at particular times during development. For example, expression of stress-responsive genes during fruit development can protect any gain in fruit yield.

[0354] Common to Many Pathways—Cause General Effects

[0355] Promoters and other regulatory sequence associated with cDNAs that are differentially expressed in a number of similar responses can be used to cause general effects. These types of regulatory sequences can be used to inhibit or increase expression of a desired coding sequence in a number circumstances. For example, protein that is capable of acting as an insecticide can be placed under the control a general “stress” promoter to increase expression, not only when the plant is wounded, but under other stress attack.

[0356] II.B. Experimental Results also Reveal the Functions of Gene

[0357] II.B.1. Linking Signature Sequences to Conservation of Biochemical Activities and Molecular Interactions

[0358] Proteins that possess the same defined domains or motifs are likely to carry out the same biochemical activity or interact with a similar class of target molecule, e.g., DNA, RNA, proteins, etc. Thus, the pFAM domains listed in the Reference Tables are routinely used as predictors of these properties. Substrates and products for the specific reactions can vary from protein to protein. Where the substrates, ligands, or other molecules bound are identical the affinities may differ between the proteins. Typically, the affinities exhibited by different functional equivalents varies no more than 50%; more typically, no more than 25%; even more typically, no more than 10%; or even less.

[0359] Proteins with very similar biochemical activities or molecular interactions will share similar structural properties, such as substrate grooves, as well as sequence similarity in more than one motif. Usually, the proteins will share at least two motifs of the signature sequence; more usually, three motifs; even more usually four motifs or greater. Typically, the proteins exhibit 70% sequence identity in the shared motifs; more typically, 80% sequence identity; even more typically, 90% sequence identity or greater. These proteins also often share sequence similarity in the variable regions between the constant motif regions. Further, the shared motifs will be in the same order from amino- to carboxyl-termini. The length of the variable regions between the motifs in these proteins, generally, is similar. Specifically, the number of residues between the shared motifs in these proteins varies by less than 25%; more usually, does not vary by less than 20%; even more usually, less than 15%; even more usually less than 10% or even less.

[0360] II.B.2. Linking Signature Sequences to Conservation of Cellular Responses or Activities

[0361] Proteins that exhibit similar cellular response or activities will possess the structural and conserved domain/motifs as described in the Biochemical Activities and Molecular Interactions above.

[0362] Proteins can play a larger role in cellular response than just their biochemical activities or molecular interactions suggest. A protein can initiate gene transcription, which is specific to the drought response of a cell. Other cellular responses and activities include: stress responses, hormonal responses, growth and differential of a cell, cell to cell interactions, etc.

[0363] The cellular role or activities of protein can be deduced by transcriptional analyses or phenotypic analyses as well as by determining the biochemical activities and molecular interactions of the protein. For example, transcriptional analyses can indicate that transcription of gene A is greatly increased during flower development. Such data would implicate protein A encoded by gene A, in the process of flower development. Proteins that shared sequence similarity in more than one motif would also act as functional equivalents for protein A during flower development.

### III. DESCRIPTION OF THE GENES, GENE COMPONENTS AND PRODUCTS, TOGETHER WITH THEIR USE AND APPLICATION

[0364] As described herein, the results of Applicant's experiments provide an understanding of the function and phenotypic implications of the genes, gene components and products of the present invention. Bioinformatic analysis provides such information. The sections of the present application containing the bioinformatic analysis, together with the Sequence and Reference Tables, teach those skilled in the art how to use the genes, gene components and products of the present invention to provide plants with novel characteristics. Similarly, differential expression analysis provides additional such information and the sections of the present application on that analysis; together with the MA_Diff Tables and MA_Cluster Tables, describe the functions of the genes, gene components and products of the present invention which are understood from the results of the differential expression experiments. The same is true with respect to the phenotype data, wherein the results of the Knock-in and Knock-out experiments and the sections of the present application on those experiments provide the skilled artisan with further description of the functions of the genes, gene components and products of the present invention.

[0365] As a result, one reading each of these sections of the present application as an independent report will understand the function of the genes, gene components and products of the present invention. But those sections and descriptions can also be read in combination, in an integrated manner, to gain further insight into the functions and uses for the genes, gene components and products of the present invention. Such an integrated analysis does not require extending beyond the teachings of the present application, but rather combining and integrating the teachings depending upon the particular purpose of the reader.

[0366] Some sections of the present application describe the function of genes, gene components and products of the present invention with reference to the type of plant tissue (e.g. root genes, leaf genes, etc.), while other sections describe the function of the genes, gene components and products with respect to responses under certain conditions (e.g. Auxin-responsive genes, heat-responsive genes, etc.). Thus, if one desires to utilize a gene understood from the application to be a particular tissue-type of gene, then the condition-specific responsiveness of that gene can be understood from the differential expression tables, and very specific characteristics of actions of that gene in a transformed plant will be understood by recognizing the overlap or intersection of the gene functions as understood from the two different types of information. Thus, for example, if one desires to transform a plant with a root gene for enhancing root growth and performance, one can know the useful root genes from the results reported in the knock-in and knock-out tables. A review of the differential expression data may then show that a specific root gene is also over-expressed in response to heat and osmotic stress. The function of that gene is then described in (1) the section of the present application that discusses root genes, (2) the section of the present application that discusses heat-responsive genes, and (3) the section of the application that discusses osmotic stress-responsive genes. The function(s) which are commonly described in those three sections will then be particularly characteristic of a plant transformed with that gene. This type of integrated analysis of data can be viewed from the following schematic that summarizes, for one particular gene, the function of that gene as understood from the phenotype and differential expression experiments.
[0367] Gene function known Gene function known Gene function known
[0368] from phenotype from first differential from second differential
[0369] experiments expression experiment expression experiment
[0370] Function A Function A Function A
[0371] Function B
   [0372] Function C Function C
   [0373] Function D
      [0374] Function E
[0375] Function F Function F Function F
[0376] Function G Function G
   [0377] Function H
[0378] Function I Function I
   [0379] Function J

[0380] In the above example, one skilled in the art will understand that a plant transformed with this particular gene will particularly exhibit functions A and F because those are the functions which are understood in common from the three different experiments.

[0381] Similar analyses can be conducted on various genes of the present invention, by which one skilled in the art can effectively modulate plant functions depending upon the particular use or conditions envisioned for the plant.

[0382] III.A. Organ-Affecting Genes, Gene Components, Products (Including Differentiation and Function)

[0383] III.A.1. Root Genes, Gene Components and Products

[0384] The economic values of roots arise not only from harvested adventitious roots or tubers, but also from the ability of roots to funnel nutrients to support growth of all plants and increase their vegetative material, seeds, fruits, etc. Roots have four main functions. First, they anchor the plant in the soil. Second, they facilitate and regulate the molecular signals and molecular traffic between the plant, soil, and soil fauna. Third, the root provides a plant with nutrients gained from the soil or growth medium. Fourth, they condition local soil chemical and physical properties.

### Use of Promoters of Root Genes

[0385] Promoters of root genes, as described in the Reference tables, for example, can be used to modulate transcription that is induced by root development or any of the root biological processes or activities above. For example, when a selected polynucleotide sequence is operably linked to a promoter of a root gene, then the selected sequence is transcribed in the same or similar temporal, development or environmentally-specific patterns as the root gene from which the promoter was taken. The root promoters can also be used to activate antisense copies of any coding sequence to achieve down regulation of its protein product in roots. They can also be used to activate sense copies of mRNAs by RNA interference or sense suppression in roots.

[0386] III.A.2. Root Hair Genes, Gene Components and Products

[0387] Root hairs are specialized outgrowths of single epidermal cells termed trichoblasts. In many and perhaps all species of plants, the trichoblasts are regularly arranged around the perimeter of the root. In Arabidopsis, for example, trichoblasts tend to alternate with non-hair cells or atrichoblasts. This spatial patterning of the root epidermis is under genetic control, and a variety of mutants have been isolated in which this spacing is altered or in which root hairs are completely absent.

### Use of Promoters of Root Hair Genes

[0388] Promoters of root hair development genes, as described in the Reference tables, for example, are useful to modulate transcription that is induced by root hair development or any of the following phenotypes or biological activities above. For example, any desired sequence can be transcribed in similar temporal, tissue, or environmentally-specific patterns as the root hair genes when the desired sequence is operably linked to a promoter of a root hair responsive gene.

[0389] III.A.3. Leaf Genes, Gene Components and Products

[0390] Leaves are responsible for producing most of the fixed carbon in a plant and are critical to plant productivity and survival. Great variability in leaf shapes and sizes is observed in nature. Leaves also exhibit varying degrees of complexity, ranging from simple to multi-compound. Leaf genes as defined here, not only modulate morphology, but also influence the shoot apical meristem, thereby affecting leaf arrangement on the shoot, internodes, nodes, axillary buds, photosynthetic capacity, carbon fixation, photorespiration and starch synthesis. Leaf genes elucidated here can be used to modify a number of traits of economic interest from leaf shape to plant yield, including stress tolerance, and to modify the efficiency of synthesis and accumulation of specific metabolites and macromolecules.

### Use of Leaf Gene Promoters

[0391] Promoters of leaf genes are useful for transcription of desired polynucleotides, both plant and non-plant. If the leaf gene is expressed only in leaves, or specifically in certain kinds of leaf cells, the promoter is used to drive the synthesis of proteins specifically in those cells. For example, extra copies of carbohydrate transporter cDNAs operably linked to a leaf gene promoter and inserted into a plant increase the “sink” strength of leaves. Similarly, leaf promoters are used to drive transcription of metabolic enzymes that alter the oil, starch, protein, or fiber contents of a leaf. Alternatively, leaf promoters direct expression of non-plant genes that can, for instance, confer insect resistance specifically to a leaf. Additionally the promoters are used to synthesize an antisense mRNA copy of a gene to inactivate the normal gene expression into protein. The promoters are used to drive synthesis of sense RNAs to inactivate protein production via RNA interference.

[0392] III.A.4. Trichome Genes and Gene Components

[0393] Trichomes, defined as hair-like structures that extend from the epidermis of aerial tissues, are present on the surface of most terrestrial plants. Plant trichomes display a diverse set of structures, and many plants contain several types of trichomes on a single leaf. The presence of trichomes can increase the boundary layer thickness between the epidermal tissue and the environment, and can reduce heat and water loss. In many species, trichomes are thought to protect the plant against insect or pathogen attack, either by secreting chemical components or by physically limiting insect access to or mobility on vegetative tissues. The stellate trichomes of Arabidopsis do not have a secretory anatomy, but at a functional level, they might limit herbivore access to the leaf in the field. In addition, trichomes are known to secrete economically valuable substances, such as menthol in mint plants.

### Use of Promoters of Trichome Genes

[0394] Promoters of trichome genes are useful for facilitating transcription of desired polynucleotides, both plant and non-plant in trichomes. For example, extra copies of existing terpenoid synthesis coding sequences can be operably linked to a trichome gene promoter and inserted into a plant to increase the terpenoids in the trichome. Alternatively, trichome promoters can direct expression of non-plant genes or genes from another plant species that can, for instance, lead to new terpenoids being made. The promoters can also be operably linked to antisense copies of coding sequences to achieve down regulation of these gene products in cells.

[0395] III.A5. Choloroplast Genes, Gene Components and Products

[0396] The chloroplast is a complex and specialized organelle in plant cells. Its complexity comes from the fact that it has at least six suborganellar compartments subdivided by double-membrane envelope and internal thylakoid membranes. It is specialized to carry out different biologically important processes including photosynthesis and amino acid and fatty acid biosynthesis. The biogenesis and development of chloroplast from its progenitor (the proplasptid) and the conversion of one form of plastid to another (e.g., from chloroplast to amyloplast) depends on several factors that include the developmental and physiological states of the cells.

[0397] One of the contributing problems that complicate the biogenesis of chloroplast is the fact that some, if not most, of its components must come from the outside of the organelle itself. The import mechanisms must take into account to what part within the different sub-compartments the proteins are being targeted; hence the proteins being imported from the cytoplasm must be able to cross the different internal membrane barriers before they can reach their destinations. The import mechanism must also take into account how to tightly coordinate the interaction between the plastid and the nucleus such that both nuclear and plastidic components are expressed in a synchronous and orchestrated manner. Changes in the developmental and physiological conditions within or surrounding plant cells can consequently change this tight coordination and therefore change how import mechanisms are regulated as well. Manipulation of these conditions and modulation of expression of the import components and their function can have critical and global consequences to the development of the plant and to several biochemical pathways occurring outside the chloroplast.

### Use of Promoters of Chloroplast Genes

[0398] Promoters of Chloroplast genes are useful for transcription of any desired polynucleotide or plant or non-plant origin. Further, any desired sequence can be transcribed in a similar temporal, tissue, or environmentally specific patterns as the Chloroplast genes where the desired sequence is operably linked to a promoter of a Chloroplast gene. The protein product of such a polynucleotide is usually synthesized in the same cells, in response to the same stimuli as the protein product of the gene from which the promoter was derived. Such promoter are also useful to produce antisense mRNAs to down-regulate the product of proteins, or to produce sense mRNAs to down-regulate mRNAs via sense suppression

[0399] III.A.6. Reproduction Genes, Gene Components and Products

[0400] Reproduction genes are defined as genes or components of genes capable of modulating any aspect of sexual reproduction from flowering time and inflorescence development to fertilization and finally seed and fruit development. These genes are of great economic interest as well as biological importance. The fruit and vegeTable industry grosses over $1 billion USD a year. The seed market, valued at approximately $15 billion USD annually, is even more lucrative.

### Use of Promoters and Reproduction Genes

[0401] Promoter of reproduction genes are useful for transcription of desired polynucleotides, both plant and non-plant. For example, extra copies of carbohydrate transporter genes can be operably linked to a reproduction gene promoter and inserted into a plant to increase the “sink” strength of flowers or siliques. Similarly, reproduction gene promoters can be used to drive transcription of metabolic enzymes capable of altering the oil, starch, protein or fiber of a flower or silique. Alternatively, reproduction gene promoters can direct expression of non-plant genes that can, for instance confer insect resistance specifically to a flower.

[0402] III.A.7. Ovule Genes, Gene Components and Products

[0403] The ovule is the primary female sexual reproductive organ of flowering plants. It contains the egg cell and, after fertilization occurs, contains the developing seed. Consequently, the ovule is at times comprised of haploid, diploid and triploid tissue. As such, ovule development requires the orchestrated transcription of numerous polynucleotides, some of which are ubiquitous, others that are ovule-specific and still others that are expressed only in the haploid, diploid or triploid cells of the ovule.

[0404] Although the morphology of the ovule is well known, little is known of these polynucleotides and polynucleotide products. Mutants allow identification of genes that participate in ovule development. As an example, the pistillata (PI) mutant replaces stamens with carpels, thereby increasing the number of ovules present in the flower.

### Use of Promoters of Ovule Genes

[0405] Promoters of Ovule genes are useful for transcription of any desired polynucleotide or plant or non-plant origin. Further, any desired sequence can be transcribed in a similar temporal, tissue, or environmentally specific patterns as the Ovule genes where the desired sequence is operably linked to a promoter of a Ovule gene. The protein product of such a polynucleotide is usually synthesized in the same cells, in response to the same stimuli as the protein product of the gene from which the promoter was derived. Such promoter are also useful to produce antisense mRNAs to down-regulate the product of proteins, or to produce sense mRNAs to down-regulate mRNAs via sense suppression.

[0406] III.A.8. Seed and Fruit Development Genes, Gene Components and Products

[0407] The ovule is the primary female sexual reproductive organ of flowering plants. At maturity it contains the egg cell and one large central cell containing two polar nuclei encased by two integuments that, after fertilization, develops into the embryo, endosperm, and seed coat of the mature seed, respectively. As the ovule develops into the seed, the ovary matures into the fruit or silique. As such, seed and fruit development requires the orchestrated transcription of numerous polynucleotides, some of which are ubiquitous, others that are embryo-specific and still others that are expressed only in the endosperm, seed coat, or fruit. Such genes are termed fruit development responsive genes.

### Use of Promoters of Seed and Fruit Development Genes

[0408] Promoters of seed and fruit development genes are useful for transcription of any desired polynucleotide or plant or non-plant origin. Further, any desired sequence can be transcribed in a similar temporal, tissue, or environmentally specific patterns as the seed and fruit development genes where the desired sequence is operably linked to a promoter of a seed and fruit development gene. The protein product of such a polynucleotide is usually synthesized in the same cells, in response to the same stimuli as the protein product of the gene from which the promoter was derived. Such a promoter is also useful to produce antisense mRNAs to down-regulate the product of proteins, or to produce sense mRNAs to down-regulate mRNAs via sense suppression.

[0409] III.B. Development Genes, Gene Components and Products

[0410] III.B.1. Imbibition and Germination Responsive Genes, Gene Components and Products

[0411] Seeds are a vital component of the world's diet. Cereal grains alone, which comprise ˜90% of all cultivated seeds, contribute up to half of the global per capita energy intake. The primary organ system for seed production in flowering plants is the ovule. At maturity, the ovule consists of a haploid female gametophyte or embryo sac surrounded by several layers of maternal tissue including the nucleus and the integuments. The embryo sac typically contains seven cells including the egg cell, two synergids, a large central cell containing two polar nuclei, and three antipodal cells. That pollination results in the fertilization of both egg and central cell. The fertilized egg develops into the embryo. The fertilized central cell develops into the endosperm. And the integuments mature into the seed coat. As the ovule develops into the seed, the ovary matures into the fruit or silique. Late in development, the developing seed ends a period of extensive biosynthetic and cellular activity and begins to desiccate to complete its development and enter a dormant, metabolically quiescent state. Seed dormancy is generally an undesirable characteristic in agricultural crops, where rapid germination and growth are required. However, some degree of dormancy is advantageous, at least during seed development. This is particularly true for cereal crops because it prevents germination of grains while still on the ear of the parent plant (preharvest sprouting), a phenomenon that results in major losses to the agricultural industry. Extensive domestication and breeding of crop species have ostensibly reduced the level of dormancy mechanisms present in the seeds of their wild ancestors, although under some adverse environmental conditions, dormancy may reappear. By contrast, weed seeds frequently mature with inherent dormancy mechanisms that allow some seeds to persist in the soil for many years before completing germination.

[0412] Germination commences with imbibition, the uptake of water by the dry seed, and the activation of the quiescent embryo and endosperm. The result is a burst of intense metabolic activity. At the cellular level, the genome is transformed from an inactive state to one of intense transcriptional activity. Stored lipids, carbohydrates and proteins are catabolized fueling seedling growth and development. DNA and organelles are repaired, replicated and begin functioning. Cell expansion and cell division are triggered. The shoot and root apical meristem are activated and begin growth and organogenesis. Schematic 4 summarizes some of the metabolic and cellular processes that occur during imbibition. Germination is complete when a part of the embryo, the radicle, extends to penetrate the structures that surround it. In Arabidopsis, seed germination takes place within twenty-four (24) hours after imbibition. As such, germination requires the rapid and orchestrated transcription of numerous polynucleotides. Germination is followed by expansion of the hypocotyl and opening of the cotyledons. Meristem development continues to promote root growth and shoot growth, which is followed by early leaf formation.

### Use of Promoters of Imbibition and Germination Genes

[0413] These promoters can be used to control expression of any polynucleotide, plant or non-plant, in a plant host. Selected promoters when operably linked to a coding sequence can direct synthesis of the protein in specific cell types or to loss of a protein product, for example when the coding sequence is in the antisense configuration. They are thus useful in controlling changes in imbibition and germination phenotypes or enabling novel proteins to be made in germinating seeds.

[0414] III.B.2. Early Seedling-Phase Specific Responsive Genes, Gene Components and Products

[0415] One of the more active stages of the plant life cycle is a few days after germination is complete, also referred to as the early seedling phase. During this period the plant begins development and growth of the first leaves, roots, and other organs not found in the embryo. Generally this stage begins when germination ends. The first sign that germination has been completed is usually that there is an increase in length and fresh weight of the radicle.

### Use of Promoters of Early Seedling-Phase Genes

[0416] Promoters of early seedling phase genes are useful for transcription of desired polynucleotides, both plant and non-plant. If the gene is expressed only in the post-germination seedling, or in certain kinds of leaf cells, the promoter is used to drive the synthesis of proteins specifically in those cells. For example, extra copies of carbohydrate transporter cDNAs operably linked to a early seedling phase gene promoter and inserted into a plant increase the “sink” strength of leaves. Similarly, early seedling phase promoters are used to drive transcription of metabolic enzymes that alter the oil, starch, protein, or fiber contents of the seedling. Alternatively, the promoters direct expression of non-plant genes that can, for instance, confer resistance to specific pathogen. Additionally the promoters are used to synthesize an antisense mRNA copy of a gene to inactivate the normal gene expression into protein. The promoters are used to drive synthesis of sense RNAs to inactivate protein production via RNA interference.

[0417] III.B.3. Size and Stature Genes, Gene Components and Products

[0418] Great agronomic value can result from modulating the size of a plant as a whole or of any of its organs. For example, the green revolution came about as a result of creating dwarf wheat plants, which produced a higher seed yield than taller plants because they could withstand higher levels and inputs of fertilizer and water. Size and stature genes elucidated here are capable of modifying the growth of either an organism as a whole or of localized organs or cells. Manipulation of such genes, gene components and products can enhance many traits of economic interest from increased seed and fruit size to increased lodging resistance. Many kinds of genes control the height attained by a plant and the size of the organs. For genes additional to the ones in this section other sections of the Application should be consulted.

### Use of Promoters of “Size and Stature” Genes

[0419] Promoters of “size and stature” genes are useful for controlling the transcription of any desired polynucleotides, both plant and non-plant. They can be discovered from the “size and stature” genes in the Reference Tables, and their patterns of activity from the MA Tables. When operably linked to any polynucleotide encoding a protein, and inserted into a plant, the protein will be synthesized in those cells in which the promoter is active. Many “size and stature” genes will function in meristems, so the promoters will be useful for expressing proteins in meristems. The promoters can be used to cause loss of, as well as synthesis of, specific proteins via antisense and sense suppression approaches.

[0420] III.B.4. Shoot-Apical Meristem Genes, Gene Components and Products

[0421] New organs, stems, leaves, branches and inflorescences develop from the stem apical meristem (SAM). The growth structure and architecture of the plant therefore depends on the behavior of SAMs. Shoot apical meristems (SAMs) are comprised of a number of morphologically undifferentiated, dividing cells located at the tips of shoots. SAM genes elucidated here are capable of modifying the activity of SAMs and thereby many traits of economic interest from ornamental leaf shape to organ number to responses to plant density.

### Use of SAM Gene Promoters to Modify SAMs

[0422] Promoters of SAM genes, as described in the Reference tables, for example, can be used to modulate transcription of coding sequences in SAM cells to influence growth, differentiation or patterning of development or any of the phenotypes or biological activities above. For example, any desired sequence can be transcribed in similar temporal, tissue, or environmentally specific patterns as a SAM gene when the desired sequence is operably linked to the promoter of the SAM gene.

[0423] A specific instance is linking of a SAM gene promoter normally active in floral meristem primordia, to a phytotoxic protein coding sequence to inhibit apical meristem switching into an inflorescence and/or floral meristem, thereby preventing flowering.

[0424] SAM gene promoters can also be used to induce transcription of antisense RNA copies of a gene or an RNA variant to achieve reduced synthesis of a specific protein in specific SAM cells. This provides an alternative way to the example above, to prevent flowering.

[0425] III.B.5. Vegetative-Phase Specific Responsive Genes, Gene Components and Products

[0426] Often growth and yield are limited by the ability of a plant to tolerate stress conditions, including water loss. To combat such conditions, plant cells deploy a battery of responses that are controlled by a phase shift, from so called juvenile to adult. These changes at distinct times involve, for example, cotyledons and leaves, guard cells in stomata, and biochemical activities involved with sugar and nitrogen metabolism. These responses depend on the functioning of an internal clock, that becomes entrained to plant development, and a series of downstream signaling events leading to transcription-independent and transcription-dependent stress responses. These responses involve changes in gene expression.

### Use of Promoter of Phase Responsive Genes

[0427] Promoters of phase responsive genes are useful for transcription of any desired polynucleotide or plant or non-plant origin. Further, any desired sequence can be transcribed in a similar temporal, tissue, or environmentally specific patterns as the phase responsive genes where the desired sequence is operably linked to a promoter of a phase responsive gene. The protein product of such a polynucleotide is usually synthesized in the same cells, in response to the same stimuli as the protein product of the gene from which the promoter was derived. Such promoter are also useful to produce antisense mRNAs to down-regulate the product of proteins, or to produce sense mRNAs to down-regulate mRNAs via sense suppression.

[0428] III.C. Hormone Responsive Genes, Gene Components and Products

[0429] III.C.1. Abscissic Acid Responsive Genes, Gene Components and Products

[0430] Plant hormones are naturally occurring substances, effective in very small amounts, which act as signals to stimulate or inhibit growth or regulate developmental processes in plants. Abscisic acid (ABA) is a ubiquitous hormone in vascular plants that has been detected in every major organ or living tissue from the root to the apical bud. The major physiological responses affected by ABA are dormancy, stress stomatal closure, water uptake, abscission and senescence. In contrast to Auxins, cytokinins and gibberellins, which are principally growth promoters, ABA primarily acts as an inhibitor of growth and metabolic processes.

### Use of Promoters of ABA Responsive Genes

[0431] Promoters of ABA responsive genes are useful for transcription of any desired polynucleotide or plant or non-plant origin. Further, any desired sequence can be transcribed in a similar temporal, tissue, or environmentally specific patterns as the ABA responsive genes where the desired sequence is operably linked to a promoter of a ABA responsive gene. The protein product of such a polynucleotide is usually synthesized in the same cells, in response to the same stimuli as the protein product of the gene from which the promoter was derived. Such promoter are also useful to produce antisense mRNAs to down-regulate the product of proteins, or to produce sense mRNAs to down-regulate mRNAs via sense suppression.

[0432] III.C.2. Auxin Responsive Genes, Gene Components and Products

[0433] Plant hormones are naturally occurring substances, effective in very small amounts that stimulate or inhibit growth or regulate developmental processes in plants. One of the plant hormones is indole-3-acetic acid (IAA), often referred to as Auxin.

### Use of Promoters of NAA Responsive Genes

[0434] Promoters of NAA responsive genes are useful for transcription of any desired polynucleotide or plant or non-plant origin. Further, any desired sequence can be transcribed in a similar temporal, tissue, or environmentally specific patterns as the NAA responsive genes where the desired sequence is operably linked to a promoter of a NAA responsive gene. The protein product of such a polynucleotide is usually synthesized in the same cells, in response to the same stimuli as the protein product of the gene from which the promoter was derived. Such promoter are also useful to produce antisense mRNAs to down-regulate the product of proteins, or to produce sense mRNAs to down-regulate mRNAs via sense suppression.

[0435] III.C.3. Brassinosteroid Responsive Genes, Gene Components and Products

[0436] Plant hormones are naturally occuring substances, effective in very small amounts, which act as signals to stimulate or inhibit growth or regulate developmental processes in plants. Brassinosteroids (BRs) are the most recently discovered, and least studied, class of plant hormones. The major physiological response affected by BRs is the longitudinal growth of young tissue via cell elongation and possibly cell division. Consequently, disruptions in BR metabolism, perception and activity frequently result in a dwarf phenotype. In addition, because BRs are derived from the sterol metabolic pathway, any perturbations to the sterol pathway can affect the BR pathway. In the same way, perturbations in the BR pathway can have effects on the later part of the sterol pathway and thus the sterol composition of membranes.

### Use of Promoters of BR Responsive Genes

[0437] Promoters of BR responsive genes are useful for transcription of any desired polynucleotide or plant or non-plant origin. Further, any desired sequence can be transcribed in a similar temporal, tissue, or environmentally specific patterns as the BR responsive genes where the desired sequence is operably linked to a promoter of a BR responsive gene. The protein product of such a polynucleotide is usually synthesized in the same cells, in response to the same stimuli as the protein product of the gene from which the promoter was derived. Such promoter are also useful to produce antisense mRNAs to down-regulate the product of proteins, or to produce sense mRNAs to down-regulate mRNAs via sense suppression.

[0438] III.C.4. Cytokinin Responsive Genes, Gene Components and Products

[0439] Plant hormones are naturally occurring substances, effective in very small amounts, which act as signals to stimulate or inhibit growth or regulate developmental processes in plants. Cytokinins (BA) are a group of hormones that are best known for their stimulatory effect on cell division, although they also participate in many other processes and pathways. All naturally occurring BAs are aminopurine derivatives, while nearly all synthetic compounds with BA activity are 6-substituted aminopurine derivatives. One of the most common synthetic BAs used in agriculture is benzylaminopurine (BAP).

### Use of Promoters of BA Responsive Genes

[0440] Promoters of Ba responsive genes are useful for transcription of any desired polynucleotide or plant or non-plant origin. Further, any desired sequence can be transcribed in a similar temporal, tissue, or environmentally specific patterns as the BA responsive genes where the desired sequence is operably linked to a promoter of a BA responsive gene. The protein product of such a polynucleotide is usually synthesized in the same cells, in response to the same stimuli as the protein product of the gene from which the promoter was derived. Such promoter are also useful to produce antisense mRNAs to down-regulate the product of proteins, or to produce sense mRNAs to down-regulate mRNAs via sense suppression.

[0441] III.C.5. Gibberellic Acid Responsive Genes, Gene Components and Products

[0442] Plant hormones are naturally occuring substances, effective in very small amounts, which act as signals to stimulate or inhibit growth or regulate developmental processes in plants. Gibberellic acid (GA) is a hormone in vascular plants that is synthesized in proplastids (giving rise to chloroplasts or leucoplasts) and vascular tissues. The major physiological responses affected by GA are seed germination, stem elongation, flower induction, anther development and seed and pericarp growth. GA is similar to Auxins, cytokinins and gibberellins, in that they are principally growth promoters.

### Use of Promoter of GA Responsive Genes

[0443] Promoters of GA responsive genes are useful for transcription of any desired polynucleotide or plant or non-plant origin. Further, any desired sequence can be transcribed in a similar temporal, tissue, or environmentally specific patterns as the GA responsive genes where the desired sequence is operably linked to a promoter of a GA responsive gene. The protein product of such a polynucleotide is usually synthesized in the same cells, in response to the same stimuli as the protein product of the gene from which the promoter was derived. Such promoter are also useful to produce antisense mRNAs to down-regulate the product of proteins, or to produce sense mRNAs to down-regulate mRNAs via sense suppression.

[0444] III.D. Metabolism Affecting Genes, Gene Components and products

[0445] III.D.1. Nitrogen Responsive Genes, Gene Components and Products

[0446] Nitrogen is often the rate-limiting element in plant growth, and all field crops have a fundamental dependence on exogenous nitrogen sources. Nitrogenous fertilizer which is usually supplied as ammonium nitrate, potassium nitrate, or urea, typically accounts for 40% of the costs associated with crops, such as corn and wheat in intensive agriculture. Increased efficiency of nitrogen use by plants should enable the production of higher yields with existing fertilizer inputs and/or enable existing yields of crops to be obtained with lower fertilizer input, or better yields on soils of poorer quality. Also, higher amounts of proteins in the crops could also be produced more cost-effectively.

### Use of Promoters of GA Responsive Genes

[0447] Promoters of nitrogen responsive genes are useful for transcription of any desired polynucleotide or plant or non-plant origin. Further, any desired sequence can be transcribed in a similar temporal, tissue, or environmentally specific patterns as the nitrogen responsive genes where the desired sequence is operably linked to a promoter of a nitrogen responsive gene. The protein product of such a polynucleotide is usually synthesized in the same cells, in response to the same stimuli as the protein product of the gene from which the promoter was derived. Such promoter are also useful to produce antisense mRNAs to down-regulate the product of proteins, or to produce sense mRNAs to down-regulate mRNAs via sense suppression.

[0448] III.D.2. Circadian Rhythm (Clock) Responsive Genes, Gene Components and Products

[0449] Often growth and yield are limited by the ability of a plant to tolerate stress conditions, including water loss. To combat such conditions, plant cells deploy a battery of responses that are controlled by an internal circadian clock, including the timed movement of cotyledons and leaves, timed movements in guard cells in stomata, and timed biochemical activities involved with sugar and nitrogen metabolism. These responses depend on the functioning of an internal circadian clock, that becomes entrained to the ambient light/dark cycle, and a series of downstream signaling events leading to transcription independent and transcription dependent stress responses.

[0450] A functioning circadian clock can anticipate dark/light transitions and prepare the physiology and biochemistry of a plant accordingly. For example, expression of a chlorophyll a/b binding protein (CAB) is elevated before daybreak, so that photosynthesis can operate maximally as soon as there is light to drive it. Similar considerations apply to light/dark transitions and to many areas of plant physiology such as sugar metabolism, nitrogen metabolism, water uptake and water loss, flowering and flower opening, epinasty, germination, perception of season, and senescence.

### Use of Promoters of Clock Responsive Genes

[0451] Promoters of Clock responsive genes are useful for transcription of any desired polynucleotide or plant or non-plant origin. Further, any desired sequence can be transcribed in a similar temporal, tissue, or environmentally specific patterns as the Clock responsive genes where the desired sequence is operably linked to a promoter of a Clock responsive gene. The protein product of such a polynucleotide is usually synthesized in the same cells, in response to the same stimuli as the protein product of the gene from which the promoter was derived. Such promoter are also useful to produce antisense mRNAs to down-regulate the product of proteins, or to produce sense mRNAs to down-regulate mRNAs via sense suppression.

[0452] III.D.3. Blue Light (Phototropism) Responsive Genes, Gene Components and Products

[0453] Phototropism is the orientation or growth of a cell, an organism or part of an organism in relation to a source of light. Plants can sense red (R), far-red (FR) and blue light in their environment and respond differently to particular ratios of these. For example, a low R:FR ratio enhances cell elongation and favors flowering over leaf production, but blue light regulated cryptochromes also appear to be involved in determining hypocotyl growth and flowering time. Phototropism of Arabidopsis thaliana seedlings in response to a blue light source is initiated by nonphototropic hypocotyl 1 (NPH1), a blue light-activated serine-threonine protein kinase, but the downstream signaling events are not entirely known. Blue light treatment leads to changes in gene expression. These genes have been identified by comparing the levels of mRNAs of individual genes in dark-grown seedlings, compared with in dark grown seedlings treated with 1 hour of blue light. Auxin also affects blue light phototropism. The effect of Auxin on gene expression stimulated by blue light has been explored by studying mRNA levels in a mutant of Arabidopsis thaliana nph4-2, grown in the dark and, treated with blue light for 1 hour compared with wild type seedlings treated similarly. This mutant is disrupted for Auxin-related growth and Auxin-induced gene transcription.

### Use of Promoters of Blue Light Responsive Genes

[0454] Promoters of Blue Light responsive genes are useful for transcription of any desired polynucleotide or plant or non-plant origin. Further, any desired sequence can be transcribed in a similar temporal, tissue, or environmentally specific patterns as the Blue Light responsive genes where the desired sequence is operably linked to a promoter of a Blue Light responsive gene. The protein product of such a polynucleotide is usually synthesized in the same cells, in response to the same stimuli as the protein product of the gene from which the promoter was derived. Such promoter are also useful to produce antisense mRNAs to down-regulate the product of proteins, or to produce sense mRNAs to down-regulate mRNAs via sense suppression.

[0455] III.D.4 Responsive Genes, Gene Components and Products

[0456] There has been a recent and significant increase in the level of atmospheric carbon dioxide. This rise in level is projected to continue over the next 50 years. The effects of the increased level of carbon dioxide on vegetation are just now being examined, generally in large scale, whole plant (often trees) experiments. Some researchers have initiated physiological experiments in attempts to define the biochemical pathways that are either affected by and/or are activated to allow the plant to avert damage from the elevated carbon dioxide levels. A genomics approach to this issue, using a model plant system, allows identification of those pathways affected by and/or as having a role in averting damage due to the elevated carbon dioxide levels and affecting growth. Higher agronomic yields can be obtained for some crops grown in elevated CO₂.

### Use of Promoters of CO2 Responsive Genes

[0457] Promoters of CO2 responsive genes are useful for transcription of any desired polynucleotide or plant or non-plant origin. Further, any desired sequence can be transcribed in a similar temporal, tissue, or environmentally specific patterns as the CO2 responsive genes where the desired sequence is operably linked to a promoter of a CO2 responsive gene. The protein product of such a polynucleotide is usually synthesized in the same cells, in response to the same stimuli as the protein product of the gene from which the promoter was derived. Such promoter are also useful to produce antisense mRNAs to down-regulate the product of proteins, or to produce sense mRNAs to down-regulate mRNAs via sense suppression.

[0458] III.D.5. Mitochondria Electron Transport (Respiration) Genes, Gene Components and Products

[0459] One means to alter flux through metabolic pathways is to alter the levels of proteins in the pathways. Plant mitochondria contain many proteins involved in various metabolic processes, including the TCA cycle, respiration, and photorespiration and particularly the electron transport chain (mtETC). Most mtETC complexes consist of nuclearly-encoded mitochondrial proteins (NEMPs) and mitochondrially-encoded mitochondrial proteins (MEMPs). NEMPs are produced in coordination with MEMPs of the same complex and pathway and with other proteins in multi-organelle pathways. Enzymes involved in photorespiration, for example, are located in chloroplasts, mitochondria, and peroxisomes and many of the proteins are nuclearly-encoded. Manipulation of the coordination of protein levels within and between organelles can have critical and global consequences to the growth and yield of a plant.

### Use of Promoters of Respiration Genes

[0460] Promoters of Respiration genes are useful for transcription of any desired polynucleotide or plant or non-plant origin. Further, any desired sequence can be transcribed in a similar temporal, tissue, or environmentally specific patterns as the Respiration genes where the desired sequence is operably linked to a promoter of a Respiration gene. The protein product of such a polynucleotide is usually synthesized in the same cells, in response to the same stimuli as the protein product of the gene from which the promoter was derived. Such promoter are also useful to produce antisense mRNAs to down-regulate the product of proteins, or to produce sense mRNAs to down-regulate mRNAs via sense suppression.

[0461] III.D.6. Protein Degradation Genes, Gene Components and Products

[0462] One of the components of molecular mechanisms that operate to support plant development is the “removal” of a gene product from a particular developmental circuit once the substrate protein is not functionally relevant anymore in temporal and/or spatial contexts. The “removal” mechanisms can be accomplished either by protein inactivation (e.g., phosphorylation or protein-protein interaction) or protein degradation most notably via ubiquitination-proteasome pathway. The ubiquitination-proteasome pathway is responsible for the degradation of a plethora of proteins involved in cell cycle, cell division, transcription, and signal transduction, all of which are required for normal cellular functions. Ubiquitination occurs through the activity of ubiquitin-activating enzymes (E1), ubiquitin-conjugating enzymes (E2), and ubiquitin-protein ligases (E3), which act sequentially to catalyze the attachment of ubiquitin (or other modifying molecules that are related to ubiquitin) to substrate proteins (Hochstrasser 2000, Science 289: 563). Ubiquitinated proteins are then routed to proteasomes for degradation processing [2000, Biochemistry and Molecular Biology of Plants, Buchanan, Gruissem, and Russel (eds), Amer. Soc. of Plant Physiologists, Rockville, Md.]. The degradation mechanism can be selective and specific to the concerned target protein (Joazeiro and Hunter 2001, Science 289: 2061; Sakamoto et al., 2001, PNAS Online 141230798). This selectivity and specificity may be one of the ways that the activity of gene products is modulated.

### Use of Promoters and “Protein Degration Genes, Gene Components and Products”

[0463] Promoters of “protein degradation” genes, as described in the Reference tables, for example, can be used to modulate transcription of any polynucleotide, plant or non plant to achieve synthesis of a protein in association with production of the ubiquitination—proteasome pathway or the various cellular systems associated with it. Additionally such promoters can be used to synthesize antisense RNA copies of any gene to reduce the amount of protein product produced, or to synthesize RNA copies that reduce protein formation by RNA interference. Such modifications can make phenotypic changes and produce altered plants as described above.

[0464] III.D.7. Carotenogenesis Responsive Genes, Gene Components and Products

[0465] Carotenoids serve important biochemical functions in both plants and animals. In plants, carotenoids function as accessory light harvesting pigments for photosynthesis and to protect chloroplasts and photosystem II from heat and oxidative damage by dissipating energy and scavenging oxygen radicals produced by high light intensities and other oxidative stresses. Decreases in yield frequently occur as a result of light stress and oxidative stress in the normal growth ranges of crop species. In addition light stress limits the geographic range of many crop species. Modest increases in oxidative stress tolerance would greatly improve the performance and growth range of many crop species. The development of genotypes with increased tolerance to light and oxidative stress would provide a more reliable means to minimize crop losses and diminish the use of energy-costly practices to modify the soil environment.

[0466] In animals carotenoids such as beta-carotene are essential provitamins required for proper visual development and function. In addition, their antioxidative properties are also thought to provide valuable protection from diseases such as cancer. Modest increases in carotenoid levels in crop species could produce a dramatic effect on plant nutritional quality. The development of genotypes with increased carotenoid content would provide a more reliable and effective nutritional source of Vitamin A and other carotenoid derived antioxidants than through the use of costly nutritional supplements.

### Use of Promoters of Carotenogenesis Responsive Genes

[0467] Promoters of Carotenogenesis responsive genes are useful for transcription of any desired polynucleotide or plant or non-plant origin. Further, any desired sequence can be transcribed in a similar temporal, tissue, or environmentally specific patterns as the Carotenogenesis responsive genes where the desired sequence is operably linked to a promoter of a Carotenogenesis responsive gene. The protein product of such a polynucleotide is usually synthesized in the same cells, in response to the same stimuli as the protein product of the gene from which the promoter was derived. Such promoter are also useful to produce antisense mRNAs to down-regulate the product of proteins, or to produce sense mRNAs to down-regulate mRNAs via sense suppression.

[0468] III.D.8. Viability Genes, Gene Components and Products

[0469] Plants contain many proteins and pathways that when blocked or induced lead to cell, organ or whole plant death. Gene variants that influence these pathways can have profound effects on plant survival, vigor and performance. The critical pathways include those concerned with metabolism and development or protection against stresses, diseases and pests. They also include those involved in apoptosis and necrosis. The applicants have elucidated many such genes and pathways by discovering genes that when inactivated lead to cell or plant death.

[0470] Herbicides are, by definition, chemicals that cause death of tissues, organs and whole plants. The genes and pathways that are activated or inactivated by herbicides include those that cause cell death as well as those that function to provide protection. The applicants have elucidated these genes.

[0471] The genes defined in this section have many uses including manipulating which cells, tissues and organs are selectively killed, which are protected, making plants resistant to herbicides, discovering new herbicides and making plants resistant to various stresses.

### Use of Promoters of Viability Genes, Gene Components and Products

[0472] Promoters of viability genes can include those that are induced by (1) destructive chemicals, e.g. herbicides, (2) stress, or (3) death. These promoters can be linked operably to achieve expression of any polynucleotide from any organism. Specific promoters from viability genes can be selected to ensure transcription in the desired tissue or organ. Proteins expressed under the control of such promoters can include those that can induce or accelerate death or those that can protect plant cells organ death. For example, stress tolerance can be increased by using promoters of viability genes to drive transcription of cold tolerance proteins, for example. Alternatively, promoters induced by apoptosis can be utilized to drive transcription of antisense constructs that inhibit cell death.

[0473] III.D.9. Histone Deacetylase (Axel) Responsive Genes, Gene Components and Products

[0474] The deacetylation of histones is known to play an important role in regulating gene expression at the chromatin level in eukaryotic cells. Histone deacetylation is catalyzed by proteins known as histone deacetylases (HDAcs). HDAcs are found in multisubunit complexes that are recruited to specific sites on nuclear DNA thereby affecting chromatin architecture and target gene transcription. Mutations in plant HDAc genes cause alterations in vegetative and reproductive growth that result from changes in the expression and activities of HDAc target genes or genes whose expression is governed by HDAc target genes. For example, transcription factor proteins control whole pathways or segments of pathways and proteins also control the activity of signal transduction pathways. Therefore, manipulation of these types of protein levels is especially useful for altering phenotypes and biochemical activities.

### Use of Promoters of Histone Deacetylase Responsive Genes

[0475] Promoters of Histone Deacetylase responsive genes are useful for transcription of any desired polynucleotide or plant or non-plant origin. Further, any desired sequence can be transcribed in a similar temporal, tissue, or environmentally specific patterns as the Histone Deacetylase responsive genes where the desired sequence is operably linked to a promoter of a Histone Deacetylase responsive gene. The protein product of such a polynucleotide is usually synthesized in the same cells, in response to the same stimuli as the protein product of the gene from which the promoter was derived. Such promoter are also useful to produce antisense mRNAs to down-regulate the product of proteins, or to produce sense mRNAs to down-regulate mRNAs via sense suppression.

[0476] III.E. Stress Responsive Genes, Gene Components and Products

[0477] III.E.1. Cold Responsive Genes, Gene Components and Products

[0478] The ability to endure low temperatures and freezing is a major determinant of the geographical distribution and productivity of agricultural crops. Even in areas considered suitable for the cultivation of a given species or cultivar, can give rise to yield decreases and crop failures as a result of aberrant, freezing temperatures. Even modest increases (1-2° C.) in the freezing tolerance of certain crop species would have a dramatic impact on agricultural productivity in some areas. The development of genotypes with increased freezing tolerance would provide a more reliable means to minimize crop losses and diminish the use of energy-costly practices to modify the microclimate.

### Use of Promoters of Cold Responsive Genes

[0479] Promoters of cold responsive genes are useful for transcription of any desired polynucleotide or plant or non-plant origin. Further, any desired sequence can be transcribed in a similar temporal, tissue, or environmentally specific patterns as the cold responsive genes where the desired sequence is operably linked to a promoter of a cold responsive gene. The protein product of such a polynucleotide is usually synthesized in the same cells, in response to the same stimuli as the protein product of the gene from which the promoter was derived. Such promoter are also useful to produce antisense mRNAs to down-regulate the product of proteins, or to produce sense mRNAs to down-regulate mRNAs via sense suppression.

[0480] III.E.2. Heat Responsive Genes, Gene Components and Products

[0481] The ability to endure high temperatures is a major determinant of the geographical distribution and productivity of agricultural crops. Decreases in yield and crop failure frequently occur as a result of aberrant, hot conditions even in areas considered suiTable for the cultivation of a given species or cultivar. Only modest increases in the heat tolerance of crop species would have a dramatic impact on agricultural productivity. The development of genotypes with increased heat tolerance would provide a more reliable means to minimize crop losses and diminish the use of energy-costly practices to modify the microclimate.

### Use of Promoters of heat Responsive Genes

[0482] Promoters of heat responsive genes are useful for transcription of any desired polynucleotide or plant or non-plant origin. Further, any desired sequence can be transcribed in a similar temporal, tissue, or environmentally specific patterns as the heat responsive genes where the desired sequence is operably linked to a promoter of a heat responsive gene. The protein product of such a polynucleotide is usually synthesized in the same cells, in response to the same stimuli as the protein product of the gene from which the promoter was derived. Such promoter are also useful to produce antisense mRNAs to down-regulate the product of proteins, or to produce sense mRNAs to down-regulate mRNAs via sense suppression.

[0483] III.E.3. Drought Responsive Genes, Gene Components and Products

[0484] The ability to endure drought conditions is a major determinant of the geographical distribution and productivity of agricultural crops. Decreases in yield and crop failure frequently occur as a result of aberrant, drought conditions even in areas considered suiTable for the cultivation of a given species or cultivar. Only modest increases in the drought tolerance of crop species would have a dramatic impact on agricultural productivity. The development of genotypes with increased drought tolerance would provide a more reliable means to minimize crop losses and diminish the use of energy-costly practices to modify the microclimate.

### Use of Promoters of Drought Responsive Genes

[0485] Promoters of Drought responsive genes are useful for transcription of any desired polynucleotide or plant or non-plant origin. Further, any desired sequence can be transcribed in a similar temporal, tissue, or environmentally specific patterns as the Drought responsive genes where the desired sequence is operably linked to a promoter of a Drought responsive gene. The protein product of such a polynucleotide is usually synthesized in the same cells, in response to the same stimuli as the protein product of the gene from which the promoter was derived. Such promoter are also useful to produce antisense mRNAs to down-regulate the product of proteins, or to produce sense mRNAs to down-regulate mRNAs via sense suppression.

[0486] III.E.4. Wounding Responsive Genes, Gene Components and Products

[0487] Plants are continuously subjected to various forms of wounding from physical attacks including the damage created by pathogens and pests, wind, and contact with other objects. Therefore, survival and agricultural yields depend on constraining the damage created by the wounding process and inducing defense mechanisms against future damage.

[0488] Plants have evolved complex systems to minimize and/or repair local damage and to minimize subsequent attacks by pathogens or pests or their effects. These involve stimulation of cell division and cell elongation to repair tissues, induction of programmed cell death to isolate the damage caused mechanically and by invading pests and pathogens, and induction of long-range signaling systems to induce protecting molecules, in case of future attack. The genetic and biochemical systems associated with responses to wounding are connected with those associated with other stresses such as pathogen attack and drought.

### Use of Promoters of Wounding Responsive Genes

[0489] Promoters of Wounding responsive genes are useful for transcription of any desired polynucleotide or plant or non-plant origin. Further, any desired sequence can be transcribed in a similar temporal, tissue, or environmentally specific patterns as the Wounding responsive genes where the desired sequence is operably linked to a promoter of a Wounding responsive gene. The protein product of such a polynucleotide is usually synthesized in the same cells, in response to the same stimuli as the protein product of the gene from which the promoter was derived. Such promoter are also useful to produce antisense mRNAs to down-regulate the product of proteins, or to produce sense mRNAs to down-regulate mRNAs via sense suppression.

[0490] III.E.5. Methyl Jasmonate (Jasmonate) Responsive Genes, Gene Components and Products

[0491] Jasmonic acid and its derivatives, collectively referred to as jasmonates, are naturally occurring derivatives of plant lipids. These substances are synthesized from linolenic acid in a lipoxygenase-dependent biosynthetic pathway. Jasmonates are signalling molecules which have been shown to be growth regulators as well as regulators of defense and stress responses. As such, jasmonates represent a separate class of plant hormones.

### Use of Promoters of Jasmonate Responsive Genes

[0492] Promoters of Jasmonate responsive genes are useful for transcription of any desired polynucleotide or plant or non-plant origin. Further, any desired sequence can be transcribed in a similar temporal, tissue, or environmentally specific patterns as the Jasmonate responsive genes where the desired sequence is operably linked to a promoter of a Jasmonate responsive gene. The protein product of such a polynucleotide is usually synthesized in the same cells, in response to the same stimuli as the protein product of the gene from which the promoter was derived. Such promoter are also useful to produce antisense mRNAs to down-regulate the product of proteins, or to produce sense mRNAs to down-regulate mRNAs via sense suppression.

[0493] III.E.6. Reactive Oxygen Responsive Genes, Gene Components and H2O2 Products

[0494] Often growth and yield are limited by the ability of a plant to tolerate stress conditions, including pathogen attack, wounding, extreme temperatures, and various other factors. To combat such conditions, plant cells deploy a battery of inducible defense responses, including triggering an oxidative burst. The burst of reactive oxygen intermediates occurs in time, place and strength to suggest it plays a key role in either pathogen elimination and/or subsequent signaling of downstream defense functions. For example, H₂O₂ can play a key role in the pathogen resistance response, including initiating the hypersensitive response (HR). HR is correlated with the onset of systemic acquired resistance (SAR) to secondary infection in distal tissues and organs.

### Use of Promoters of Reactive Oxygen Responsive Genes

[0495] Promoters of Reactive Oxygen responsive genes are useful for transcription of any desired polynucleotide or plant or non-plant origin. Further, any desired sequence can be transcribed in a similar temporal, tissue, or environmentally specific patterns as the Reactive Oxygen responsive genes where the desired sequence is operably linked to a promoter of a Reactive Oxygen responsive gene. The protein product of such a polynucleotide is usually synthesized in the same cells, in response to the same stimuli as the protein product of the gene from which the promoter was derived. Such promoter are also useful to produce antisense mRNAs to down-regulate the product of proteins, or to produce sense mRNAs to down-regulate mRNAs via sense suppression.

[0496] III.E.7. Salicylic Acid Responsive Genes, Gene Components and Products

[0497] Plant defense responses can be divided into two groups: constitutive and induced. Salicylic acid (SA) is a signaling molecule necessary for activation of the plant induced defense system known as systemic acquired resistance or SAR. This response, which is triggered by prior exposure to avirulent pathogens, is long lasting and provides protection against a broad spectrum of pathogens. Another induced defense system is the hypersensitive response (HR). HR is far more rapid, occurs at the sites of pathogen (avirulent pathogens) entry and precedes SAR. SA is also the key signaling molecule for this defense pathway.

### Use of Promoters of Salicylic Acid Responsive Genes

[0498] Promoters of Salicylic Acid responsive genes are useful for transcription of any desired polynucleotide or plant or non-plant origin. Further, any desired sequence can be transcribed in a similar temporal, tissue, or environmentally specific patterns as the Salicylic Acid responsive genes where the desired sequence is operably linked to a promoter of a Salicylic Acid responsive gene. The protein product of such a polynucleotide is usually synthesized in the same cells, in response to the same stimuli as the protein product of the gene from which the promoter was derived. Such promoter are also useful to produce antisense mRNAs to down-regulate the product of proteins, or to produce sense mRNAs to down-regulate mRNAs via sense suppression.

[0499] III.E.8. Nitric Oxide Responsive Genes, Gene Components and Products

[0500] The rate-limiting element in plant growth and yield is often its ability to tolerate suboptimal or stress conditions, including pathogen attack conditions, wounding and the presence of various other factors. To combat such conditions, plant cells deploy a battery of inducible defense responses, including synergistic interactions between nitric oxide (NO), reactive oxygen intermediates (ROS), and salicylic acid (SA). NO has been shown to play a critical role in the activation of innate immune and inflammatory responses in animals. At least part of this mammalian signaling pathway is present in plants, where NO is known to potentiate the hypersensitive response (HR). In addition, NO is a stimulator molecule in plant photomorphogenesis.

### Use of Promoters of NO Responsive Genes

[0501] Promoters of NO responsive genes are useful for transcription of any desired polynucleotide or plant or non-plant origin. Further, any desired sequence can be transcribed in a similar temporal, tissue, or environmentally specific patterns as the NO responsive genes where the desired sequence is operably linked to a promoter of a NO responsive gene. The protein product of such a polynucleotide is usually synthesized in the same cells, in response to the same stimuli as the protein product of the gene from which the promoter was derived. Such promoter are also useful to produce antisense mRNAs to down-regulate the product of proteins, or to produce sense mRNAs to down-regulate mRNAs via sense suppression.

[0502] III.9. Osmotic Stress Responsive Genes, Gene Components and Products

[0503] The ability to endure and recover from osmotic and salt related stress is a major determinant of the geographical distribution and productivity of agricultural crops. Osmotic stress is a major component of stress imposed by saline soil and water deficit. Decreases in yield and crop failure frequently occur as a result of aberrant or transient environmental stress conditions even in areas considered suitable for the cultivation of a given species or cultivar. Only modest increases in the osmotic and salt tolerance of a crop species would have a dramatic impact on agricultural productivity. The development of genotypes with increased osmotic tolerance would provide a more reliable means to minimize crop losses and diminish the use of energy-costly practices to modify the soil environment.

### Use of Promotmers of Osmotic Stress Responsive Genes

[0504] Promoters of Osmotic Stress responsive genes are useful for transcription of any desired polynucleotide or plant or non-plant origin. Further, any desired sequence can be transcribed in a similar temporal, tissue, or environmentally specific patterns as the Osmotic Stress responsive genes where the desired sequence is operably linked to a promoter of a Osmotic Stress responsive gene. The protein product of such a polynucleotide is usually synthesized in the same cells, in response to the same stimuli as the protein product of the gene from which the promoter was derived. Such promoter are also useful to produce antisense mRNAs to down-regulate the product of proteins, or to produce sense mRNAs to down-regulate mRNAs via sense suppression.

[0505] III.E.10. Aluminum Responsive Genes, Gene Components and Products

[0506] Aluminum is toxic to plants in soluble form (Al³⁺). Plants grown under aluminum stress have inhibited root growth and function due to reduced cell elongation, inhibited cell division and metabolic interference. As an example, protein inactivation frequently results from displacement of the Mg2+ cofactor with aluminum. These types of consequences result in poor nutrient and water uptake. In addition, because stress perception and response occur in the root apex, aluminum exposure leads to the release of organic acids, such as citrate, from the root as the plant attempts to prevent aluminum uptake.

[0507] The ability to endure soluble aluminum is a major determinant of the geographical distribution and productivity of agricultural crops. Decreases in yield and crop failure frequently occur as a result of aberrant, hot conditions even in areas considered suiTable for the cultivation of a given species or cultivar. Only modest increases in the aluminum tolerance of crop species would have a dramatic impact on agricultural productivity. The development of genotypes with increased aluminum tolerance would provide a more reliable means to minimize crop losses and diminish the use of costly practices to modify the environment.

### Use of Promoters of Aluminum Responsive Genes

[0508] Promoters of Aluminum responsive genes are useful for transcription of any desired polynucleotide or plant or non-plant origin. Further, any desired sequence can be transcribed in a similar temporal, tissue, or environmentally specific patterns as the Aluminum responsive genes where the desired sequence is operably linked to a promoter of a Aluminum responsive gene. The protein product of such a polynucleotide is usually synthesized in the same cells, in response to the same stimuli as the protein product of the gene from which the promoter was derived. Such promoter are also useful to produce antisense mRNAs to down-regulate the product of proteins, or to produce sense mRNAs to down-regulate mRNAs via sense suppression.

[0509] III.E.11. Cadmium Responsive Genes, Gene Components and Products

[0510] Cadmium (Cd) has both toxic and non-toxic effects on plants. Plants exposed to non-toxic concentrations of cadmium are blocked for viral disease due to the inhibition of systemic movement of the virus. Surprisingly, higher, toxic levels of Cd do not inhibit viral systemic movement, suggesting that cellular factors that interfere with the viral movement are triggered by non-toxic Cd concentrations but repressed in high Cd concentrations. Furthermore, exposure to non-toxic Cd levels appears to reverse posttranslational gene silencing, an inherent plant defense mechanism. Consequently, exploring the effects of Cd exposure has potential for advances in plant disease control in addition to soil bio-remediation and the improvement of plant performance in agriculture.

### Use of Promoters of Cadmium Responsive Genes

[0511] Promoters of Cadmium responsive genes are useful for transcription of any desired polynucleotide or plant or non-plant origin. Further, any desired sequence can be transcribed in a similar temporal, tissue, or environmentally specific patterns as the Cadmium responsive genes where the desired sequence is operably linked to a promoter of a Cadmium responsive gene. The protein product of such a polynucleotide is usually synthesized in the same cells, in response to the same stimuli as the protein product of the gene from which the promoter was derived. Such promoter are also useful to produce antisense mRNAs to down-regulate the product of proteins, or to produce sense mRNAs to down-regulate mRNAs via sense suppression.

[0512] III.12. Disease Responsive Genes, Gene Components and Products

[0513] Often growth and yield are limited by the ability of a plant to tolerate stress conditions, including pathogen attack. To combat such conditions, plant cells deploy a battery of inducible defense responses, including the triggering of an oxidative burst and the transcription of pathogenesis-related protein (PR protein) genes. These responses depend on the recognition of a microbial avirulence gene product (avr) by a plant resistance gene product (R), and a series of downstream signaling events leading to transcription-independent and transcription-dependent disease resistance responses. Reactive oxygen species (ROS) such as H₂O₂ and NO from the oxidative burst plays a signaling role, including initiation of the hypersensitive response (HR) and induction of systemic acquired resistance (SAR) to secondary infection by unrelated pathogens. PR proteins are able to degrade the cell walls of invading microorganisms, and phytoalexins are directly microbicidal.

### Use of Promoters of Promoters of Disease Responsive Genes

[0514] Promoters of Disease responsive genes are useful for transcription of any desired polynucleotide or plant or non-plant origin. Further, any desired sequence can be transcribed in a similar temporal, tissue, or environmentally specific patterns as the Disease responsive genes where the desired sequence is operably linked to a promoter of a Disease responsive gene. The protein product of such a polynucleotide is usually synthesized in the same cells, in response to the same stimuli as the protein product of the gene from which the promoter was derived. Such promoter are also useful to produce antisense mRNAs to down-regulate the product of proteins, or to produce sense mRNAs to down-regulate mRNAs via sense suppression.

[0515] II.E.13. Defense (LOL2) Responsive Genes, Gene Components and Products

[0516] Often growth and yield are limited by the ability of a plant to tolerate stress conditions, including pathogen attack. To combat such conditions, plant cells deploy a battery of inducible defense responses, including the triggering of an oxidative burst and the transcription of pathogenesis-related protein (PR protein) genes. Reactive oxygen species (ROS) such as H₂O₂ and NO from the oxidative burst play a signaling role, including initiation of the hypersensitive response (HR) and induction of systemic acquired resistance (SAR) to secondary infection by unrelated pathogens. Some PR proteins are able to degrade the cell walls of invading microorganisms, and phytoalexins are directly microbicidal. Other defense related pathways are regulated by salicylic acid (SA) or methyl jasmonate (MeJ).

[0517] These responses depend on the recognition of a microbial avirulence gene product (avr) by a plant resistance gene product (R), and a series of downstream signaling events leading to transcription-independent and transcription-dependent disease resistance responses. Current models suggest that R-gene-encoded receptors specifically interact with pathogen-encoded ligands to trigger a signal transduction cascade. Several components include ndr1 and eds1 loci. NDR1, EDS1, PR1, as well as PDF1.2, a MeJ regulated gene and Nim1, a SA regulated gene, are differentially regulated in plants with mutations in the LOL2 gene.

[0518] LOL2 shares a novel zinc finger motif with LSD1, a negative regulator of cell death and defense response. Due to an alternative splice site the LOL2 gene encodes two different proteins, one of which contains an additional, putative DNA binding motif. Northern analysis demonstrated that LOL2 transcripts containing the additional DNA binding motif are predominantly upregulated after treatment with both virulent and avirulent Pseudomonas syringae pv maculicola strains. Modulation in this gene can also confer enhanced resistance to virulent and avirulent Peronospora parasitica isolates.

### Use of Promoters of Defense Responsive Genes

[0519] Promoters of Defense responsive genes are useful for transcription of any desired polynucleotide or plant or non-plant origin. Further, any desired sequence can be transcribed in a similar temporal, tissue, or environmentally specific patterns as the Defense responsive genes where the desired sequence is operably linked to a promoter of a Defense responsive gene. The protein product of such a polynucleotide is usually synthesized in the same cells, in response to the same stimuli as the protein product of the gene from which the promoter was derived. Such promoter are also useful to produce antisense mRNAs to down-regulate the product of proteins, or to produce sense mRNAs to down-regulate mRNAs via sense suppression.

[0520] III.E.14. Iron Responsive Genes, Gene Components and Products

[0521] Iron (Fe) deficiency in humans is the most prevalent nutritional problem worldwide today. Increasing iron availability via diet is a sustainable malnutrition solution for many of the world's nations. One-third of the world's soils, however, are iron deficient. Consequently, to form a food-based solution to iron malnutrition, we need a better understanding of iron uptake, storage and utilization by plants. Furthermore, exposure to non-toxic Fe levels appears to affect inherent plant defense mechanisms. Consequently, exploring the effects of Fe exposure has potential for advances in plant disease resistance in addition to human nutrition.

### Use of Promoters of Iron Responsive Genes

[0522] Promoters of Iron responsive genes are useful for transcription of any desired polynucleotide or plant or non-plant origin. Further, any desired sequence can be transcribed in a similar temporal, tissue, or environmentally specific patterns as the Iron responsive genes where the desired sequence is operably linked to a promoter of a Iron responsive gene. The protein product of such a polynucleotide is usually synthesized in the same cells, in response to the same stimuli as the protein product of the gene from which the promoter was derived. Such promoter are also useful to produce antisense mRNAs to down-regulate the product of proteins, or to produce sense mRNAs to down-regulate mRNAs via sense suppression.

[0523] III.E.15. Shade Responsive Genes, Gene Components and Products

[0524] Plants sense the ratio of Red (R): Far Red (FR) light in their environment and respond differently to particular ratios. A low R:FR ratio, for example, enhances cell elongation and favors flowering over leaf production. The changes in R:FR ratios mimic and cause the shading response effects in plants. The response of a plant to shade in the canopy structures of agricultural crop fields influences crop yields significantly. Therefore manipulation of genes regulating the shade avoidance responses can improve crop yields. While phytochromes mediate the shade avoidance response, the down-stream factors participating in this pathway are largely unknown. One potential downstream participant, ATHB-2, is a member of the HD-Zip class of transcription factors and shows a strong and rapid response to changes in the R:FR ratio. ATHB-2 overexpressors have a thinner root mass, smaller and fewer leaves and longer hypocotyls and petioles. This elongation arises from longer epidermal and cortical cells, and a decrease in secondary vascular tissues, paralleling the changes observed in wild-type seedlings grown under conditions simulating canopy shade. On the other hand, plants with reduced ATHB-2 expression have a thick root mass and many larger leaves and shorter hypocotyls and petioles. Here, the changes in the hypocotyl result from shorter epidermal and cortical cells and increased proliferation of vascular tissue. Interestingly, application of Auxin is able to reverse the root phenotypic consequences of high ATHB-2 levels, restoring the wild-type phenotype. Consequently, given that ATHB-2 is tightly regulated by phytochrome, these data suggest that ATHB-2 may link the Auxin and phytochrome pathways in the shade avoidance response pathway.

### Use of Promoters of Shade Avoidance Genes

[0525] Promoters of Shade Avoidance genes are useful for transcription of any desired polynucleotide or plant or non-plant origin. Further, any desired sequence can be transcribed in a similar temporal, tissue, or environmentally specific patterns as the Shade Avoidance genes where the desired sequence is operably linked to a promoter of a Shade Avoidance gene. The protein product of such a polynucleotide is usually synthesized in the same cells, in response to the same stimuli as the protein product of the gene from which the promoter was derived. Such promoter are also useful to produce antisense mRNAs to down-regulate the product of proteins, or to produce sense mRNAs to down-regulate mRNAs via sense suppression.

[0526] III.E.16. Sulfur Responsive Genes, Gene Components and Products

[0527] Sulfur is one of the important macronutrients required by plants. It is taken up from the soil solution by roots as in the form of sulfate anion which higher plants are dependent on to fulfill their nutritional sulfur requirement. After uptake from the soil, sulfate is either accumulated and stored in vacuole or it is assimilated into various organic compounds, e.g. cysteine, glutathione, methionine, etc. Thus, plants also serve as nutritional sulfur sources for animals. Sulfur can be assimilated in one of two ways: it is either incorporated as sulfate in a reaction called sulfation, or it is first reduced to sulfide, the substrate for cysteine synthesis. In plants, majority of sulfur is assimilated in reduced form.

[0528] Sulfur comprises a small by vital fraction of the atoms in many protein molecules. As disulfide bridges, the sulfur atoms aid in stabilizing the folded proteins, such cysteine residues. Cys is the first sulfur-containing amino acids, which in proteins form disulfide bonds that may affect the tertiary structures and enzyme activities. This redox balance is mediated by the disulfide/thiol interchange of thioredoxin or glutaredoxin using NADPH as an electron donor. Sulfur can also become sulfhydryl (SH) groups participating in the active sites of some enzymes and some enzymes require the aid of small molecules that contain sulfur. In addition, the machinery of photosynthesis includes some sulfur-containing compounds, such as ferrodoxin. Thus, sulfate assimilation plays important roles not only in the sulfur nutrition but also in the ubiquitous process that may regulate the biochemical reactions of various metabolic pathways.

[0529] Deficiency of sulfur leads to a marked chlorosis in younger leaves, which may become white in color. Other symptoms of sulfur deficiency also include weak stems and reduced growth. Adding sulfur fertilizer to plants can increase root development and a deeper green color of the leaves in sulfur-deficient plants. However, Sulfur is generally sufficient in soils for two reasons: it is a contaminant in potassium and other fertilizers and a product of industrial combustion. Sulfur limitation in plants is thus likely due to the limitation of the uptake and distribution of sulfate in plants. Seven cell type specific sulfate transporter genes have been isolated from Arabidopsis. In sulfate-starved plants, expression of the high-affinity transporter, AtST1-1, is induced in root epidermis and cortex for acquisition of sulfur. The low affinity transporter, AtST2-1 (AST68), accumulates in the root vascular tissue by sulfate starvation for root-to-shoot transport of sulfate. These studies have shown that the whole-plant process of sulfate transport is coordinately regulated by the expression of these 2 sulfate transporter genes under sulfur limited conditions. Recent studies have proposed that feeding of O-acetylserine, GSH and selenate may regulate the expression of AtST1-1 and AtST2-1 (AST68) in roots either positively or negatively. However, regulatory proteins that may directly control the expression of these genes have not been identified yet.

[0530] It has been established that there are regulatory interactions between assimilatory sulfate and nitrate reduction in plants. The two assimilatory pathways are very similar and well coordinated; deficiency for one element was shown to repress the other pathway. The coordination between them should be taken into consideration when one tries to alter one of pathways.

### Use of Promoters of Sulfur Responsive Genes

[0531] Promoters of Sulfur responsive genes are useful for transcription of any desired polynucleotide or plant or non-plant origin. Further, any desired sequence can be transcribed in a similar temporal, tissue, or environmentally specific patterns as the Sulfur responsive genes where the desired sequence is operably linked to a promoter of a Sulfur responsive gene. The protein product of such a polynucleotide is usually synthesized in the same cells, in response to the same stimuli as the protein product of the gene from which the promoter was derived. Such promoter are also useful to produce antisense mRNAs to down-regulate the product of proteins, or to produce sense mRNAs to down-regulate mRNAs via sense suppression.

[0532] III.E.17. Zinc Responsive Genes, Gene Components and Products

[0533] Phytoremediation of soils contaminated with toxic levels of heavy metals requires the understanding of plant metal transport and tolerance. The numerous Arabidopsis thaliana studies have given scientists the potential for dissection and elucidation of plant micronutrient/heavy metal uptake and accumulation pathways. It has been shown altered regulation of ZNT1, a Zn/Cd transporter, contributes to high Zn uptake. Isolation and characterization of Zn/Cd hyperaccumulation genes may allow expression in higher biomass plant species for efficient contaminated soil clean up. Identification of additional Zn transport, tolerance and nutrition-related genes involved in heavy metal accumulation will enable manipulation of increased uptake (for phytoremediation) as well as limitation of uptake or leak pathways that contribute to toxicity in crop plants. Additionally, Zn-binding ligands involved in Zn homeostasis or tolerance may be identified, as well as factors affecting the activity or expression of Zn binding transcription factors. Gene products acting in concert to effect Zn uptake, which would not have been identified in complementation experiments, including multimeric transporter proteins, could also be identified.

### Use of Promoters of Zinc Responsive Genes

[0534] Promoters of Zinc responsive genes are useful for transcription of any desired polynucleotide or plant or non-plant origin. Further, any desired sequence can be transcribed in a similar temporal, tissue, or environmentally specific patterns as the Zinc responsive genes where the desired sequence is operably linked to a promoter of a Zinc responsive gene. The protein product of such a polynucleotide is usually synthesized in the same cells, in response to the same stimuli as the protein product of the gene from which the promoter was derived. Such promoter are also useful to produce antisense mRNAs to down-regulate the product of proteins, or to produce sense mRNAs to down-regulate mRNAs via sense suppression.

### IV. UTILITIES OF PARTICULAR INTEREST

[0535] Genes capable of modulating the phenotypes in the following table are useful produce the associated utilities in the table. Such genes can be identified by their cDNA ID number in the Knock-in and Knock-out Tables. That is, those genes noted in those Tables to have a phenotype as listed in the following column entitled “Phenotype Modulated by a Gene” are useful for the purpose identified in the corresponding position in the column entitled “Utilities”.
[0536] Phenotype Utilities
[0537] Modulated by a
[0538] Gene
[0539] Leaf shape Cordate decrease wind opacity,
   [0540] Cup-shaped decrease lodging (plant fall over),
   [0541] Curled increase biomass by making larger or
[0542] Phenotype Utilities
[0543] Modulated by a
[0544] Gene
   [0545] different shaped leaves,
   [0546] Laceolate improve the efficiency of mechanical harvesting,
   [0547] Lobed decrease transpiration for better drought tolerance,
   [0548] Oval changing leaf shape to collect and absorb water,
   [0549] Ovate modulation of canopy structure and shading for altered irradiance close to the ground,
   [0550] Serrate enhanced uptake of pesticides (herbicides, fungicides, etc),
   [0551] Trident creation of ornamental leaf shapes,
   [0552] Undulate increase resistance to pathogens by decreasing amount of water that collects on leaves,
   [0553] Vertically Oblong change proporation of cell types in the leaves for enhanced photosynthesis, decreased transpiration, and enhanced
   [0554] Other Shapes accumulation of desirable compounds including secondary metabolites in specialized cells, decrease insect feeding,
   [0555] Long petioles decrease wind opacity,
   [0556] Short petioles decrease lodging (plant fall over), increase biomass by better positioning of the leaf blade, decrease insect feeding, decrease transpiration for better drought tolerance, position leaves most effectively for photosynthetic efficiency
   [0557] Fused ornamental applications to make distinctive plants,
[0558] Reduced fertility
   [0559] Short siliques increase or decrease the number of seeds in a fruit, increasing fruit size, modulating fruit shape to better fit harvesting or packaging requirements,
[0560] Phenotype Utilities
[0561] Modulated by a
[0562] Gene
   [0563] useful for controlling dehisence and seed scatter
   [0564] Reduced fertility useful in hybrid breeding programs,
   [0565] Sterility increasing fruit size, production of seedless fruit, useful as targets for gametocides, modulating fruit shape to better fit harvesting or packaging requirements, useful for controlling dehisence and seed scatter
   [0566] Flower size useful for edible flowers useful for flower derived products such as fragrances
      [0567] useful for modulating seed size and number in combination with seed-specific genes value in the ornamental industry
[0568] Stature Large increasing or decreasing plant biomass,
   [0569] Small optimizing plant stature to increase yield under various diverse environmental conditions, e.g., when water or nutrients are limiting,
   [0570] Dwarfs decreasing lodging, increasing fruit number and size, controlling shading and canopy effects
[0571] Meristems Change plant architecture, increase or decrease number of leaves as well as change the types of leaves to increase biomass, improve photosynthetic efficiency, create new varieties of ornamental plants with enhanced leaf design, preventing flowering to opimize vegetative growth, control of apical dominace, increase or decrease flowering time to fit season, water or fertilizer schedules,
[0572] Phenotype Utilities
[0573] Modulated by a
[0574] Gene
   [0575] change arrangement of leaves on the stem (phyllotaxy) to optimize plant density, decrease insect feeding, or decrease pathogen infection, increase number of trichome/glandular trichome producing leaves targets for herbicides, generate ectopic meristems and ectopic growth of vegetative and floral tissues and seeds and fruits
[0576] Stem Strong modify lignin content/composition for creation of harder woods or reduce difficulty/costs in pulping for
   [0577] Weak paper production or increase digestibility of forage crops, decrease lodging, modify cell wall polysaccharides in stems and fruits for improved texture and nutrition. increase biomass
[0578] Late/Early Bolting Break the need for long vernalization of vernalization-dependent crops, e.g., winter wheat, thereby increasing yield decrease or increase generaton time increase biomass
[0579] Lethals Embryo-lethal produce seedless fruit, use as herbicide targets
   [0580] Embryo-defective produce seedless fruit, use as herbicide targets
   [0581] Seedling use as herbicide targets, useful for metabolic engineering,
   [0582] Pigment-lethals use as herbicide targets, increase photosynthetic efficiency
[0583] Phenotype Utilities
[0584] Modulated by a
[0585] Gene
[0586] Pigment Dark Green Increase nutritional value, enhanced photosynthesis and carbon dioxide combustion and therefore increase plant vigor and biomass, enhanced photosynthetic efficiency and therefore increase plant vigor and biomass, prolong vegetative development, enhanced protection against pathogens,
   [0587] YGV1 Useful as targets for herbicides, increase photosynthetic efficiency and therefore increase plant vigor and biomass,
   [0588] YGV2 Useful as targets for herbicides, control of change from embryonic to adult organs, increase metabolic efficiency, increase photosynthetic efficiency and therefore increased plant vigor and biomass,
   [0589] YGV3 Useful as targets for herbicides, nitrogen sensing/uptake/usage, increase metabolic efficiency and therefore increased plant vigor and biomass,
   [0590] Interveinal chlorosis to increase photosynthetic efficiency and therefore increase plant vigor and biomass to increase or decrease nitrogen transport and therefore increase plant vigor and biomass use as herbicide targets increase metabolic efficiency,
[0591] Roots Short (primary root) to access water from rainfall, to access rhizobia spray application, for anaerobic soils, useful to facilitate harvest of root crops,
   [0592] Thick (primary root) useful for increasing biomass of root crops, for preventing plants dislodging during
[0593] Phenotype Utilities
[0594] Modulated by a
[0595] Gene
   [0596] picking and harvesting, as root grafts, for animal feeds
   [0597] Branching (primary root) modulation allows betters access to water, minerals, fertilizers, rhizobia prevent soil erosion,s increasing root biomass decrease root lodging,
   [0598] Long (lateral roots) modulation allows improved access to water, nutrients, fertilizer, rhizobia, prevent soil erosion increase root biomass decrease root lodging modulation allows control on the depth of root growth in soil to access water and nutriennts modulation allows hormonal control of root growth and development (size)
   [0599] Agravitropic modulation allows control on the depth of root growth in soil
   [0600] Curling (primary root) modulation allows hormonal control of root growth and development (size) useful in anaerobic soils in allowing roots to stay close to surface harvesting of root crops
   [0601] Poor germination
[0602] Trichome Reduced Number Genes useful for decreasing transpiration,
   [0603] Glabrous increased production of glandular trichomes for oil or other secreted chemicals of value,
   [0604] Increased Number use as deterrent for insect herbivory and ovipostion modulation will increase resistance to UV light,
[0605] Wax mutants decrease insect herbivory and oviposition, compostion changes for the cosmetics industry,
[0606] Phenotype Utilities
[0607] Modulated by a
[0608] Gene
   [0609] decrease transpiration, provide pathogen resistance, UV protection, modulation of leaf runoff properties and improved access for herbicides and fertilizers
[0610] Cotyledons modulation of seeds structure in legumes, increase nutritional value, improve seedling competion under field conditions,
[0611] Seeds Transparent testa genes useful for metabolic engineering anthocyanin and flavonoid pathways
   [0612] Light improved nutritional content
   [0613] Dark
      [0614] decrease petal abscission
[0615] Flowers Other decrease pod shattering
[0616] Hypocotysl Long to improve germination rates to improve plant survivability
   [0617] Short to improve germination rates to improve plant survivability

### V. ENHANCED FOODS

[0618] Animals require external supplies of amino acids that they cannot synthesize themselves. Also, some amino acids are required in larger quantities. The nutritional values of plants for animals and humans can thus be modified by regulating the amounts of the constituent amino acids that occur as free amino acids or in proteins. For instance, higher levels of lysine and/or methionine would enhance the nutritional value of corn seed. Applicants herein provide several methods for modulating the amino acid content:
[0619] (1) expressing a naturally occurring protein that has a high percentage of the desired amino acid(s);
[0620] (2) expressing a modified or synthetic coding sequence that has an enhanced percentage of the desired amino acids; or
[0621] (3) expressing the protein(s) that are capable of synthesizing more of the desired amino acids.
   A specific example is expressing proteins with enhanced, for example, methionine content, preferentially in a corn or cereal seed used for animal nutrition or in the parts of plants used for nutritional purposes.

[0622] A protein is considered to have a high percentage of an amino acid if the amount of the desired amino acid is at least 1% of the total number of residues in a protein; more preferably 2% or greater. Amino acids of particular interest are tryptophan, lysine, methionine, phenylalanine, threonine leucine, valine, and isoleucine. Examples of naturally occurring proteins with a high percentage of any one of the amino acid of particular interest are listed in the Enhanced Amino Acid Table.

[0623] The sequence(s) encoding the selected protein(s) are operably linked to a promoter and other regulatory sequences and transformed into a plant as described below. The promoter is chosen optimally for promoting the desired level of expression of the protein in the selected organ e.g. a promoter highly functional in seeds. Modifications may be made to the sequence encoding the protein to ensure protein transport into, for example, organelles or storage bodies or its accumulation in the organ. Such modifications may include addition of signal sequences at or near the N terminus and amino acid residues to modify protein stability or appropriate glycosylation. Other modifications may be made to the transcribed nucleic acid sequence to enhance the stability or translatability of the mRNA, in order to ensure accumulation of more of the desired protein. Suitable versions of the gene construct and transgenic plants are selected on the basis of, for example, the improved amino acid content and nutritional value measured by standard biochemical tests and animal feeding trials.

### VI. USE OF NOVEL GENES TO FACILITATE EXPLOITATION OF PLANTS AS FACTORIES FOR THE SYNTHESIS OF VALUBLE MOLECULES

[0624] Plants and their constituent cells, tissues, and organs are factories that manufacture small organic molecules such as sugars, amino acids, fatty acids, vitamins, etc., as well as macromolecules such as proteins, nucleic acids, oils/fats and carbohydrates. Plants have long been a source of pharmaceutically beneficial chemicals; particularly, the secondary metabolites and hormone-related molecules synthesized by plants. Plants can also be used as factories to produce carbohydrates or lipids that comprises a carbon backbone useful as precursors of plastics, fiber, fuel, paper, pulp, rubber, solvents, lubricants, construction materials, detergents, and other cleaning materials. Plants can also generate other compounds that are of economic value, such as dyes, flavors, and fragrances. Both the intermediates as well as the end-products of plant bio-synthetic pathways have been found useful.

[0625] With the polynucleotides and polypeptides of the instant invention, modification of both in-vitro and in-vivo synthesis of such products is possible. One method of increasing the amount of either the intermediates or the end-products synthesized in a cell is to increase the expression of one or more proteins in the synthesis pathway as discussed below. Another method of increasing production of an intermediate is to inhibit expression of protein(s) that synthesize the end-product from the intermediate. Levels of end-products and intermediates can also be modified by changing the levels of enzymes that specifically change or degrade them. The kinds of molecules made can be also be modified by changing the genes encoding specific enzymes performing reactions at specific steps of the biosynthetic pathway. These genes can be from the same or a different organism. The molecular structures in the biosynthetic pathways can thus be modified or diverted into different branches of a pathway to make novel end-products.

[0626] The modifications are made by designing one or more novel genes per application comprising promoters, to ensure production of the enzyme(s) in the relevant cells, in the right amount, and polynucleotides encoding the relevant enzyme. The promoters and polynucleotides are the subject of this application. The novel genes are transformed into the relevant species using standard procedures. Their effects are measured by standard assays for the specific chemicalibiochemical products.

[0627] These polynucleotides and proteins of the invention that participate in the relevant pathways and are useful for changing production of the above chemicals and biochemicals are identified in the Reference tables by their enzyme function. More specifically, proteins of the invention that have the enzymatic activity of one of the entries in the following table entitled “Emzymes Effecting Modulation of Biological Pathways” are of interest to modulate the corresponding pathways to produce precursors or final products noted above that are of industrial use. Biological activities of particular interest are listed below.

[0628] Other polynucleotides and proteins that regulate where, when and to what extent a pathway is active in a plant are extremely useful for modulating the synthesis and accumulation of valuable chemicals. These elements including transcription factors, proteins involved in signal transduction and other proteins in the control of gene expression are described elsewhere in this application.

| Pathway | | |
|---|---|---|
| Name | Enzyme Description | Comments |
| Alkaloid | Morphine 6- | Also acts on other alkaloids, including codeine, |
| biosynthesis I | dehydrogenase | normorphine and ethylmorphine, but only very |
| | | slowly on 7,8-saturated derivatives such as |
| | | dihydromorphine and dihydrocodeine In the |
| | | reverse direction, also reduces naloxone to the |
| | | 6-alpha-hydroxy analog Activated by 2- |
| | | mercaptoethanol |
| | Codeinone reductase | Stereospecifically catalyses the reversible |
| | (NADPH) | reduction of codeinone to codeine, which is a |
| | | direct precursor of morphine in the opium |
| | | poppy plant, Papaver somniferum |
| | Salutaridine reductase | Stereospecifically catalyses the reversible |
| | (NADPH) | reduction of salutaridine to salutaridinol, which |
| | | is a direct precursor of morphinan alkaloids in |
| | | the poppy plant, Papaver somniferum |
| | (S)-stylopine synthase | Catalyses an oxidative reaction that does not |
| | | incorporate oxygen into the product Forms the |
| | | second methylenedioxy bridge of the |
| | | protoberberine alkaloid stylopine from |
| | | oxidative ring closure of adjacent phenolic and |
| | | methoxy groups of cheilanthifoline |
| | (S)-cheilanthifoline | Catalyses an oxidative reaction that does not |
| | synthase | incorporate oxygen into the product Forms the |
| | | methylenedioxy bridge of the protoberberine |
| | | alkaloid cheilanthifoline from oxidative ring |
| | | closure of adjacent phenolic and methoxy |
| | | groups of scoulerine |
| | Salutaridine synthase | Forms the morphinan alkaloid salutaridine by |
| | | intramolecular phenol oxidation of reticuline |
| | | without the incorporation of oxygen into the |
| | | product |
| | (S)-canadine synthase | Catalyses an oxidative reaction that does not |
| | | incorporate oxygen into the product Oxidation |
| | | of the methoxyphenol group of the alkaloid |
| | | tetrahydrocolumbamine results in the |
| | | formation of the methylenedioxy bridge of |
| | | canadine |
| | Protopine 6- | Involved in benzophenanthridine alkaloid |
| | monooxygenase | synthesis in higher plants |
| | Dihydrosanguinarine | Involved in benzophenanthridine alkaloid |
| | 10-monooxygenase | synthesis in higher plants |
| | Monophenol | A group of copper proteins that also catalyse |
| | monooxygenase | the reaction of EC 1.10.3.1, if only 1,2- |
| | | benzenediols are available as substrate |
| | L-amino acid oxidase | |
| | 1,2-dehydroreticulinium | Stereospecifically reduces the 1,2- |
| | reductase (NADPH) | dehydroreticulinium ion to (R)-reticuline, |
| | | which is a direct precursor of morphinan |
| | | alkaloids in the poppy plant, papaver |
| | | somniferum The enzyme does not catalyse the |
| | | reverse reaction to any significant extent under |
| | | physiological conditions |
| | Dihydrobenzo- | Also catalyzes: dihydrochelirubine + O(2) = |
| | phenanthridine oxidase | chelirubine + H(2)O(2) Also catalyzes: |
| | | dihydromacarpine + O(2) = macarpine + |
| | | H(2)O(2) Found in higher plants Produces |
| | | oxidized forms of the benzophenanthridine |
| | | alkaloids |
| | Reticuline oxidase | The product of the reaction, (S)-scoulerine, is a |
| | | precursor of protopine, protoberberine and |
| | | benzophenanthridine alkaloid biosynthesis in |
| | | plants Acts on (S)-reticuline and related |
| | | compounds, converting the N-methyl group |
| | | into the methylene bridge (‘berberine |
| | | bridge[PRIME]) of (S)- |
| | | tetrahydroprotoberberines |
| | 3[PRIME]-hydroxy-N- | Involved in isoquinoline alkaloid metabolism |
| | methyl-(S)-coclaurine | in plants Has also been shown to catalyse the |
| | 4[PRIME]-O- | methylation of (R,S)-laudanosoline, (S)- |
| | methyltransferase | 3[PRIME]-hydroxycoclaurine and (R,S)-7-O- |
| | | methylnoraudanosoline |
| | (S)-scoulerine 9-O- | The product of this reaction is a precursor for |
| | methyltransferase | protoberberine alkaloids in plants |
| | Columbamine O- | The product of this reaction is a protoberberine |
| | methyltransferase | alkaloid that is widely distributed in the plant |
| | | kingdom Distinct in specificity from EC |
| | | 2.1.1.88 |
| | 10-hydroxydihydro- | Part of the pathway for synthesis of |
| | sanguinarine 10-O- | benzophenanthridine alkaloids in plants |
| | methyltransferase | |
| | 12-hydroxydi- | Part of the pathway for synthesis of |
| | hydrochelirubine 12-O- | benzophenanthridine alkaloid macarpine in |
| | methyltransferase | plants |
| | (R,S)-norcoclaurine 6- | Norcoclaurine is 6,7-dihydroxy-1-[(4- |
| | O-methyltransferase | hydroxyphenyl)methyl]-1,2,3,4- |
| | | tetrahydroisoquinoline The enzyme will also |
| | | catalyse the 6-O-methylation of (R,S)- |
| | | norlaudanosoline to form 6-O-methyl- |
| | | norlaudanosoline, but this alkaloid has not |
| | | been found to occur in plants |
| | Salutaridinol 7-O- | At higher pH values the product, 7-O- |
| | acetyltransferase | acetylsalutaridinol, spontaneously closes the 4- |
| | | >5 oxide bridge by allylic elimination to form |
| | | the morphine precursor thebaine From the |
| | | opium poppy plant, Papaver somniferum |
| | Aspartate | Also acts on L-tyrosine, L-phenylalanine and |
| | aminotransferase | L-tryptophan. This activity can be formed from |
| | | EC 2.6.1.57 by controlled proteolysis |
| | Tyrosine | L-phenylalanine can act instead of L-tyrosine |
| | aminotransferase | The mitochondrial enzyme may be identical |
| | | with EC 2.6.1.1 The three isoenzymic forms |
| | | are interconverted by EC 3.4.22.4 |
| | Aromatic amino acid | L-methionine can also act as donor, more |
| | transferase | slowly Oxaloacetate can act as acceptor |
| | | Controlled proteolysis converts the enzyme to |
| | | EC 2.6.1.1 |
| | Tyrosine decarboxylase | The bacterial enzyme also acts on 3- |
| | | hydroxytyrosine and, more slowly, on 3- |
| | | hydroxyphenylalanine |
| | Aromatic-L-amino-acid | Also acts on L-tryptophan, 5-hydroxy-L- |
| | decarboxylase | tryptophan and dihydroxy-L-phenylalanine |
| | | (DOPA) |
| Alkaloid | Tropine dehydrogenase | Oxidizes other tropan-3-alpha-ols, but not the |
| biosynthesis | | corresponding beta-derivatives |
| II | | |
| | Tropinone reductase | |
| | Hyoscyamine (6S)- | |
| | dioxygenase | |
| | 6-beta- | |
| | hydroxyhyoscyamine | |
| | epoxidase | |
| | Amine oxidase (copper- | A group of enzymes including those oxidizing |
| | containing) | primary amines, diamines and histamine One |
| | | form of EC 1.3.1.15 from rat kidney also |
| | | catalyses this reaction |
| | Putrescine N- | |
| | methyltransferase | |
| | Ornithine | |
| | decarboxylase | |
| | Oxalyl-CoA | |
| | decarboxylase | |
| | Phenylalanine | May also act on L-tyrosine |
| | ammonia-lyase | |
| Androgen and | 3-beta-hydroxy- | Acts on 3-beta-hydroxyandrost-5-en-17-one to |
| estrogen | delta(5)-steroid | form androst-4-ene-3,17-dione and on 3-beta- |
| metabolism | dehydrogenase | hydroxypregn-5-en-20-one to form |
| | | progesterone |
| | 11-beta-hydroxysteroid | |
| | dehydrogenase | |
| | Estradiol 17-alpha- | |
| | dehydrogenase | |
| | 3-alpha-hydroxy-5- | |
| | beta-androstane-17-one | |
| | 3-alpha-dehydrogenase | |
| | 3-alpha (17-beta)- | Also acts on other 17-beta-hydroxysteroids, on |
| | hydroxysteroid | the 3-alpha-hydroxy group of pregnanes and |
| | dehydrogenase (NAD+) | bile acids, and on benzene dihydrodiol |
| | | Different from EC 1.1.1.50 or EC 1.1.1.213 |
| | 3-alpha-hydroxysteroid | Acts on other 3-alpha-hydroxysteroids and on |
| | dehydrogenase (B- | 9-,11- and 15-hydroxyprostaglandin B- |
| | specific) | specific with respect to NAD(+) or NADP(+) |
| | | (cf. EC 1.1.1.213) |
| | 3(or 17)beta- | Also acts on other 3-beta- or 17-beta- |
| | hydroxysteroid | hydroxysteroids (cf EC 1.1.1.209) |
| | dehydrogenase | |
| | Estradiol 17 beta- | Also acts on (S)-20-hydroxypregn-4-en-3-one |
| | dehydrogenase | and related compounds, oxidizing the (S)-20- |
| | | group B-specific with respect to NAD(P)(+) |
| | Testosterone 17-beta- | |
| | dehydrogenase | |
| | Testosterone 17-beta- | Also oxidizes 3-hydroxyhexobarbital to 3- |
| | dehydrogenase | oxohexobarbital |
| | (NADP+) | |
| | Steroid 11-beta- | Also hydroxylates steroids at the 18-position, |
| | monooxygenase | and converts 18-hydroxycorticosterone into |
| | | aldosterone |
| | Estradiol 6-beta- | |
| | monooxygenase | |
| | Androst-4-ene-3,17- | Has a wide specificity A single enzyme from |
| | dione monooxygenase | Cylindrocarpon radicicola (EC 1.14.13.54) |
| | | catalyses both this reaction and that catalysed |
| | | by EC 1.14.99.4 |
| | 3-oxo-5-alpha-steroid | |
| | 4-dehydrogenase | |
| | 3-oxo-5-beta-steroid 4- | |
| | dehydrogenase | |
| | UDP- | Family of enzymes accepting a wide range of |
| | glucuronosyltransferase | substrates, including phenols, alcohols, amines |
| | | and fatty acids Some of the activities catalysed |
| | | were previously listed separately as EC |
| | | 2.4.1.42, EC 2.4.1.59, EC 2.4.1.61, EC |
| | | 2.4.1.76, EC 2.4.1.77, EC 2.4.1.84, EC |
| | | 2.4.1.107 and EC 2.4.1.108 A temporary |
| | | nomenclature for the various forms whose |
| | | delineation is in a state of flux |
| | Steroid sulfotransferase | Broad specificity resembling EC 2.8.2.2, but |
| | | also acts on estrone |
| | Alcohol | Primary and secondary alcohols, including |
| | sulfotransferase | aliphatic alcohols, ascorbate, chloramphenicol, |
| | | ephedrine and hydroxysteroids, but not |
| | | phenolic steroids, can act as acceptors (cf. EC |
| | | 2.8.2.15) |
| | Estrone sulfotransferase | |
| | Arylsulfatase | A group of enzymes with rather similar |
| | | specificities |
| | Steryl-sulfatase | Also acts on some related steryl sulfates |
| | 17-alpha- | |
| | hydroxyprogesterone | |
| | aldolase | |
| | Steroid delta-isomerase | |
| C21-Steroid | 3-beta-hydroxy- | Acts on 3-beta-hydroxyandrost-5-en-17-one to |
| hormone | delta(5)-steroid | form androst-4-ene-3,17-dione and on 3-beta- |
| metabolism | dehydrogenase | hydroxypregn-5-en-20-one to form |
| | | progesterone |
| | 11-beta-hydroxysteroid | |
| | dehydrogenase | |
| | 20-alpha- | A-specific with respect to NAD(P)(+) |
| | hydroxysteroid | |
| | dehydrogenase | |
| | 3-alpha-hydroxysteroid | Acts on other 3-alpha-hydroxysteroids and on |
| | dehydrogenase (B- | 9-,11- and 15-hydroxyprostaglandin B- |
| | specific) | specific with respect to NAD(+) or NADP(+) |
| | | (cf. EC 1.1.1.213) |
| | 3-alpha(or 20-beta)- | The 3-alpha-hydroxyl group or 20-beta- |
| | hydroxysteroid | hydroxyl group of pregnane and androstane |
| | dehydrogenase | steroids can act as donors |
| | Steroid 11-beta- | Also hydroxylates steroids at the 18-position, |
| | monooxygenase | and converts 18-hydroxycorticosterone into |
| | | aldosterone |
| | Corticosterone 18- | |
| | monooxygenase | |
| | Cholesterol | The reaction proceeds in three stages, with |
| | monooxygenase (side- | hydroxylation at C-20 and C-22 preceding |
| | chain cleaving) | scission of the side-chain at C-20 |
| | Steroid 21- | |
| | monooxygenase | |
| | Progesterone 11-alpha- | |
| | monooxygenase | |
| | Steroid 17-alpha- | |
| | monooxygenase | |
| | Cholestenone 5-beta- | |
| | reductase | |
| | Cortisone beta- | |
| | reductase | |
| | Progesterone 5-alpha- | Testosterone and 20-alpha-hydroxy-4-pregnen- |
| | reductase | 3-one can act in place of progesterone |
| | 3-oxo-5-beta-steroid 4- | |
| | dehydrogenase | |
| | Steroid delta-isomerase | |
| Flavonoids, | Coniferyl-alcohol | Specific coniferyl alcohol; does not act on |
| stilbene and | dehydrogenase | cinnamyl alcohol, 4-coumaryl alcohol or |
| lignin | | sinapyl alcohol |
| | Cinnamyl-alcohol | Acts on coniferyl alcohol, sinapyl alcohol, 4- |
| | dehydrogenase | coumaryl alcohol and cinnamyl alcohol (cf. EC |
| | | 1.1.1.194) |
| | Dihydrokaempferol 4- | Also acts, in the reverse direction, on (+)- |
| | reductase | dihydroquercetin and (+)-dihydromyricetin |
| | | Each dihydroflavonol is reduced to the |
| | | corresponding cis-flavon-3,4-diol NAD(+) can |
| | | act instead of NADP(+), more slowly Involved |
| | | in the biosynthesis of anthocyanidins in plants |
| | Flavonone 4-reductase | Involved in the biosynthesis of 3- |
| | | deoxyanthocyanidins from flavonones such as |
| | | naringenin or eriodictyol |
| | Peroxidase | |
| | Caffeate 3,4- | |
| | dioxygenase | |
| | Naringenin 3- | |
| | dioxygenase | |
| | Trans-cinnamate 4- | Also acts on NADH, more slowly |
| | monooxygenase | |
| | Trans-cinnamate 2- | |
| | monooxygenase | |
| | Flavonoid 3[PRIME]- | Acts on a number of flavonoids, including |
| | monooxygenase | naringenin and dihydrokaempferol Does not |
| | | act on 4-coumarate or 4-coumaroyl-CoA |
| | Monophenol | A group of copper proteins that also catalyse |
| | monooxygenase | the reaction of EC 1.10.3.1, if only 1,2- |
| | | benzenediols are available as substrate |
| | Cinnamoyl-CoA | Also acts on a number of substituted |
| | reductase | cinnamoyl esters of coenzyme A |
| | Caffeoyl-CoA O- | |
| | methyltransferase | |
| | Luteolin O- | Also acts on luteolin-7-O-beta-D-glucoside |
| | methyltransferase | |
| | Caffeate O- | 3,4-dihydroxybenzaldehyde and catechol can |
| | methyltransferase | act as acceptor, more slowly |
| | Apigenin 4[PRIME]-O- | Converts apigenin into acacetin Naringenin |
| | methyltransferase | (5,7,4[PRIME]-trihydroxyflavonone) can also |
| | | act as acceptor, more slowly |
| | Quercetin 3-O- | Specific for quercetin. Related enzymes bring |
| | methyltransferase | about the 3-O-methylation of other flavonols, |
| | | such as galangin and kaempferol |
| | Isoflavone-7-O-beta- | The 6-position of the glucose residue of |
| | glucoside | formononetin can also act as acceptor Some |
| | 6[PRIME][PRIME]-O- | other 7-O-glucosides of isoflavones, flavones |
| | malonyltransferase | and flavonols can also act, more slowly |
| | Pinosylvin synthase | Not identical with EC 2.3.1.74 or EC 2.3.1.95 |
| | Naringenin-chalcone | In the presence of NADH and a reductase, |
| | synthase | 6[PRIME]-deoxychalcone is produced |
| | Trihydroxystilbene | Not identical with EC 2.3.1.74 or EC 2.3.1.146 |
| | synthase | |
| | Quinate O- | Caffeoyl-CoA and 4-coumaroyl-CoA can also |
| | hydroxycinnamoyltrans | act as donors, more slowly Involved in the |
| | ferase | biosynthesis of chlorogenic acid in sweet |
| | | potato and, with EC 2.3.1.98 in the formation |
| | | of caffeoyl-CoA in tomato |
| | Coniferyl-alcohol | Sinapyl alcohol can also act as acceptor |
| | glucosyltransferase | |
| | 2-coumarate O-beta- | Coumarinate (cis-2-hydroxycinnamate) does |
| | glucosyltransferase | not act as acceptor |
| | Scopoletin | |
| | glucosyltransferase | |
| | Flavonol-3-O-glucoside | Converts flavonol 3-O-glucosides to 3-O- |
| | L-rhamnosyltransferase | rutinosides Also acts, more slowly, on rutin, |
| | | quercetin 3-O-galactoside and flavonol O3- |
| | | rhamnosides |
| | Flavone 7-O-beta- | A number of flavones, flavonones and |
| | glucosyltransferase | flavonols can function as acceptors Different |
| | | from EC 2.4.1.91 |
| | Flavonol 3-O- | Acts on a variety of flavonols, including |
| | glucosyltransferase | quercetin and quercetin 7-O-glucoside |
| | | Different from EC 2.4.1.81 |
| | Flavone | 7-O-beta-D-glucosides of a number of |
| | apiosyltransferase | flavonoids and of 4-substituted phenols can act |
| | | as acceptors |
| | Coniferin beta- | Also hydrolyzes syringin, 4-cinnamyl alcohol |
| | glucosidase | beta-glucoside, and, more slowly, some other |
| | | aryl beta-glycosides A plant cell-wall enzyme |
| | | involved in the biosynthesis of lignin |
| | Beta-glucosidase | Wide specificity for beta-D-glucosides.Some |
| | | examples also hydrolyse one or more of the |
| | | following: beta-D-galactosides, alpha-L- |
| | | arabinosides, beta-D-xylosides, and beta-D- |
| | | fucosides |
| | Chalcone isomerase | |
| | 4-coumarate--CoA | |
| | ligase | |

[0629]

| Pathway Name | Enzyme Description | Enzyme Comments |
|---|---|---|
| Ascorbate and aldarate | D-threo-aldose 1- | Acts on L-fucose, D-arabinose and L- |
| metabolism | dehydrogenase | xylose The animal enzyme was also |
| | | shown to act on L-arabinose, and the |
| | | enzyme from Pseudomonas caryophylli |
| | | on L-glucose |
| | L-threonate 3- | |
| | dehydrogenase | |
| | Glucuronate reductase | Also reduces D-galacturonate May be |
| | | identical with EC 1.1.1.2 |
| | Glucuronolactone | |
| | reductase | |
| | L-arabinose 1- | |
| | dehydrogenase | |
| | L-galactonolactone | Acts on the 1,4-lactones of L-galactonic, |
| | oxidase | D-altronic, L-fuconic, D-arabinic and D- |
| | | threonic acids Not identical with EC |
| | | 1.1.3.8 (cf. EC 1.3.2.3) |
| | L-gulonolactone | The product spontaneously isomerizes to |
| | oxidase | L-ascorbate |
| | L-ascorbate oxidase | |
| | L-ascorbate peroxidase | |
| | Ascorbate 2,3- | |
| | dioxygenase | |
| | 2,5-dioxovalerate | |
| | dehydrogenase | |
| | Aldehyde | Wide specificity, including oxidation of |
| | dehydrogenase (NAD+) | D-glucuronolactone to D-glucarate |
| | Galactonolactone | Cf. EC 1.1.3.24 |
| | dehydrogenase | |
| | Monodehydroascorbate | |
| | reductase (NADH) | |
| | Glutathione | |
| | dehydrogenase | |
| | (ascorbate) | |
| | L-arabinonolactonase | |
| | Gluconolactonase | Acts on a wide range of hexono-1,5- |
| | | lactones |
| | Uronolactonase | |
| | 1,4-lactonase | Specific for 1,4-lactones with 4-8 carbon |
| | | atoms Does not hydrolyse simple |
| | | aliphatic esters, acetylcholine, sugar |
| | | lactones or substituted aliphatic lactones, |
| | | e.g. 3-hydroxy-4-butyrolactone |
| | 2-dehydro-3- | |
| | deoxyglucarate aldolase | |
| | L-arabinonate | |
| | dehydratase | |
| | Glucarate dehydratase | |
| | 5-dehydro-4- | |
| | deoxyglucarate | |
| | dehydratase | |
| | Galactarate dehydratase | |
| | 2-dehydro-3-deoxy-L- | |
| | arabinonate | |
| | dehydratase | |
| Carbon fixation | Malate dehydrogenase | Also oxidizes some other 2- |
| | | hydroxydicarboxylic acids |
| | Malate dehydrogenase | Does not decarboxylates added |
| | (decarboxylating) | oxaloacetate |
| | Malate dehydrogenase | Also decarboxylates added oxaloacetate |
| | (oxaloacetate | |
| | decarboxylating) | |
| | (NADP+) | |
| | Malate dehydrogenase | Activated by light |
| | (NADP+) | |
| | Glyceraldehyde-3- | |
| | phosphate | |
| | dehydrogenase | |
| | (NADP+) | |
| | (phosphorylating) | |
| | Transketolase | Wide specificity for both reactants, e.g. |
| | | converts hydroxypyruvate and R—CHO |
| | | into CO(2) and R—CHOH—CO—CH(2)OH |
| | | Transketolase from Alcaligenes faecalis |
| | | shows high activity with D-erythrose as |
| | | acceptor |
| | Aspartate | Also acts on L-tyrosine, L-phenylalanine |
| | aminotransferase | and L-tryptophan. This activity can be |
| | | formed from EC 2.6.1.57 by controlled |
| | | proteolysis |
| | Alanine | 2-aminobutanoate acts slowly instead of |
| | aminotransferase | alanine |
| | Sedoheptulokinase | |
| | Phosphoribulokinase | |
| | Pyruvate kinase | UTP, GTP, CTP, ITP, and dATP can also |
| | | act as donors Also phosphorylates |
| | | hydroxylamine and fluoride in the |
| | | presence of CO(2) |
| | Phosphoglycerate | |
| | kinase | |
| | Pyruvate,phosphate | |
| | dikinase | |
| | Fructose- | The animal enzyme also acts on |
| | bisphosphatase | sedoheptulose 1,7-bisphosphate |
| | Sedoheptulose- | |
| | bisphosphatase | |
| | Phosphoenolpyruvate | |
| | carboxylase | |
| | Ribulose-bisphosphate | Will utilize O(2) instead of CO(2), |
| | carboxylase | forming 3-phospho-D-glycerate and 2- |
| | | phosphoglycolate |
| | Phosphoenolpyruvate | |
| | carboxykinase (ATP) | |
| | Fructose-bisphosphate | Also acts on (3S,4R)-ketose 1-phosphates |
| | aldolase | The yeast and bacterial enzymes are zinc |
| | | proteins The enzymes increase electron- |
| | | attraction by the carbonyl group, some |
| | | (Class I) forming a protonated imine with |
| | | it, others (Class II), mainly of microbial |
| | | origin, polarizing it with a metal ion, e.g |
| | | zinc |
| | Phosphoketolase | |
| | Ribulose-phosphate 3- | Also converts D-erythrose 4-phosphate |
| | epimerase | into D-erythrulose 4-phosphate and D- |
| | | threose 4-phosphate |
| | Triosephosphate | |
| | isomerase | |
| | Ribose 5-phosphate | Also acts on D-ribose 5-diphosphate and |
| | epimerase | D-ribose 5-triphosphate |
| Phenylalanine | (R)-4- | Also acts, more slowly, on (R)-3- |
| metabolism | hydroxyphenyllactate | phenyllactate, (R)-3-(indole-3-yl)lactate |
| | dehydrogenase | and (R)-lactate |
| | Hydroxyphenyl- | Also acts on 3-(3,4- |
| | pyruvate reductase | dihydroxyphenyl)lactate Involved with |
| | | EC 2.3.1.140 in the biosynthesis of |
| | | rosmarinic acid |
| | Aryl-alcohol | A group of enzymes with broad |
| | dehydrogenase | specificity towards primary alcohols with |
| | | an aromatic or cyclohex-1-ene ring, but |
| | | with low or no activity towards short- |
| | | chain aliphatic alchols |
| | Peroxidase | |
| | Catechol 1,2- | Involved in the metabolism of nitro- |
| | dioxygenase | aromatic compounds by a strain of |
| | | Pseudomonas putida |
| | 2,3-dihydroxybenzoate | |
| | 3,4-dioxygenase | |
| | 3-carboxyethylcatechol | |
| | 2,3-dioxygenase | |
| | Catechol 2,3- | The enzyme from Alcaligines sp. strain |
| | dioxygenase | O-1 has also been shown to catalyse the |
| | | reaction: 3-Sulfocatechol + O(2) + H(2)O = |
| | | 2-hydroxymuconate + bisulfite. It has |
| | | been referred to as 3-sulfocatechol 2,3- |
| | | dioxygenase. Further work will be |
| | | necessary to show whether or not this is a |
| | | distinct enzyme |
| | 4- | |
| | hydroxyphenylpyruvate | |
| | dioxygenase | |
| | Protocatechuate 3,4- | |
| | dioxygenase | |
| | Hydroxyquinol 1,2- | The product isomerizes to 2- |
| | dioxygenase | maleylacetate (cis-hex-2-enedioate) |
| | | Highly specific; catechol and pyrogallol |
| | | are acted on at less than 1% of the rate at |
| | | which benzene-1,2,4-triol is oxidized |
| | Protocatechuate 4,5- | |
| | dioxygenase | |
| | Phenylalanine 2- | Also catalyses a reaction similar to that |
| | monooxygenase | of EC 1.4.3.2, forming 3-phenylpyruvate, |
| | | NH(3) and H(2)O(2), but more slowly |
| | Anthranilate 1,2- | |
| | dioxygenase | |
| | (deaminating, | |
| | decarboxylating) | |
| | Benzoate 1,2- | A system, containing a reductase which |
| | dioxygenase | is an iron-sulfur flavoprotein (FAD), and |
| | | an iron-sulfur oxygenase |
| | Toluene dioxygenase | A system, containing a reductase which |
| | | is an iron-sulfur flavoprotein (FAD), an |
| | | iron-sulfur oxygenase, and a ferredoxin |
| | | Some other aromatic compounds, |
| | | including ethylbenzene, 4-xylene and |
| | | some halogenated toluenes, are converted |
| | | into the corresponding cis-dihydrodiols |
| | Naphthalene 1,2- | A system, containing a reductase which |
| | dioxygenase | is an iron-sulfur flavoprotein (FAD), an |
| | | iron-sulfur oxygenase, and ferredoxin |
| | Benzene 1,2- | A system, containing a reductase which |
| | dioxygenase | is an iron-sulfur flavoprotein, an iron- |
| | | sulfur oxygenase and ferredoxin |
| | Salicylate 1- | |
| | monooxygenase | |
| | Trans-cinnamate 4- | Also acts on NADH, more slowly |
| | monooxygenase | |
| | Benzoate 4- | |
| | monooxygenase | |
| | 4-hydroxybenzoate 3- | Most enzymes from Pseudomonas are |
| | monooxygenase | highly specific for NAD(P)H (cf EC |
| | | 1.14.13.33) |
| | 3-hydroxybenzoate 4- | Also acts on a number of analogs of 3- |
| | monooxygenase | hydroxybenzoate substituted in the 2, 4, 5 |
| | | and 6 positions |
| | 3-hydroxybenzoate 6- | Also acts on a number of analogs of 3- |
| | monooxygenase | hydroxybenzoate substituted in the 2, 4, 5 |
| | | and 6 positions NADPH can act instead |
| | | of NADH, more slowly |
| | 4-hydroxybenzoate 3- | The enzyme from Corynebacterium |
| | monooxygenase | cyclohexanicum is highly specific for 4- |
| | (NAD(P)H) | hydroxybenzoate, but uses NADH and |
| | | NADPH at approximately equal rates (cf. |
| | | EC 1.14.13.2). It is less specific for |
| | | NADPH than EC 1.14.13.2 |
| | Anthranilate 3- | The enzyme from Aspergillus niger is an |
| | monooxygenase | iron protein; that from the yeast |
| | (deaminating) | Trichosporon cutaneum is a flavoprotein |
| | | (FAD) |
| | Melilotate 3- | |
| | monooxygenase | |
| | Phenol 2- | Also active with resorcinol and O-cresol |
| | monooxygenase | |
| | Mandelate 4- | |
| | monooxygenase | |
| | 3-hydroxybenzoate 2- | |
| | monooxygenase | |
| | 4-cresol dehydrogenase | Phenazine methosulfate can act as |
| | (hydroxylating) | acceptor A quinone methide is probably |
| | | formed as intermediate The product is |
| | | oxidized further to 4-hydroxybenzoate |
| | Benzaldehyde | |
| | dehydrogenase (NAD+) | |
| | Aminomuconate- | Also acts on 2-hydroxymuconate |
| | semialdehyde | semialdehyde |
| | dehydrogenase | |
| | Phenylacetaldehyde | |
| | dehydrogenase | |
| | 4-carboxy-2- | Does not act on unsubstituted aliphatic or |
| | hydroxymuconate-6- | aromatic aldehydes or glucose NAD(+) |
| | semialdehyde | can replace NADP(+), but with lower |
| | dehydrogenase | affinity |
| | Aldehyde | |
| | dehydrogenase | |
| | (NAD(P)+) | |
| | Benzaldehyde | |
| | dehydrogenase | |
| | (NADP+) | |
| | Coumarate reductase | |
| | Cis-1,2- | |
| | dihydrobenzene-1,2- | |
| | diol dehydrogenase | |
| | Cis-1,2-dihydro-1,2- | Also acts, at half the rate, on cis- |
| | dihydroxynaphthalene | anthracene dihydrodiol and cis- |
| | dehydrogenase | phenanthrene dihydrodiol |
| | 2-enoate reductase | Acts, in the reverse direction, on a wide |
| | | range of alkyl and aryl alpha, beta- |
| | | unsaturated carboxylate ions 2-butenoate |
| | | was the best substrate tested |
| | Maleylacetate reductase | |
| | Phenylalanine | The enzyme from Bacillus badius and |
| | dehydrogenase | Sporosarcina ureae are highly specific for |
| | | L-phenylalanine, that from Bacillus |
| | | sphaericus also acts on L-tyrosine |
| | L-amino acid oxidase | |
| | Amine oxidase (flavin- | Acts on primary amines, and usually also |
| | containing) | on secondary and tertiary amines |
| | Amine oxidase (copper- | A group of enzymes including those |
| | containing) | oxidizing primary amines, diamines and |
| | | histamine One form of EC 1.3.1.15 from |
| | | rat kidney also catalyses this reaction |
| | D-amino-acid | Acts to some extent on all D-amino acids |
| | dehydrogenase | except D-aspartate and D-glutamate |
| | Aralkylamine | Phenazine methosulfate can act as |
| | dehydrogenase | acceptor Acts on aromatic amines and, |
| | | more slowly, on some long-chain |
| | | aliphatic amines, but not on methylamine |
| | | or ethylamine (cf EC 1.4.99.3) |
| | Glutamine N- | |
| | phenylacetyltrans- | |
| | ferase | |
| | Acetyl-CoA C- | |
| | acyltransferase | |
| | D-amino-acid N- | |
| | acetyltransferase | |
| | Phenylalanine N- | Also acts, more slowly, on L-histidine |
| | acetyltransferase | and L-alanine |
| | Glycine N- | Not identical with EC 2.3.1.13 or EC |
| | benzoyltransferase | 2.3.1.68 |
| | Aspartate | Also acts on L-tyrosine, L-phenylalanine |
| | aminotransferase | and L-tryptophan. This activity can be |
| | | formed from EC 2.6.1.57 by controlled |
| | | proteolysis |
| | D-alanine | Acts on the D-isomers of leucine, |
| | aminotransferase | aspartate, glutamate, aminobutyrate, |
| | | norvaline and asparagine |
| | Tyrosine | L-phenylalanine can act instead of L- |
| | aminotransferase | tyrosine The mitochondrial enzyme may |
| | | be identical with EC 2.6.1.1 The three |
| | | isoenzymic forms are interconverted by |
| | | EC 3.4.22.4 |
| | Aromatic amino acid | L-methionine can also act as donor, more |
| | transferase | slowly Oxaloacetate can act as acceptor |
| | | Controlled proteolysis converts the |
| | | enzyme to EC 2.6.1.1 |
| | Histidinol-phosphate | |
| | aminotransferase | |
| | 3-oxoadipate CoA- | |
| | transferase | |
| | 3-oxoadipate enol- | Acts on the products of EC 4.1.1.44 |
| | lactonase | |
| | Carboxymethylene- | |
| | butenolidase | |
| | 2-pyrone-4,6- | The product isomerizes to 4- |
| | dicarboxylate lactonase | oxalmesaconate |
| | Hippurate hydrolase | Acts on various N-benzoylamino acids |
| | Amidase | |
| | Acylphosphatase | |
| | 2-hydroxymuconate- | |
| | semialdehyde hydrolase | |
| | Aromatic-L-amino-acid | Also acts on L-tryptophan,5-hydroxy-L- |
| | decarboxylase | tryptophan and dihydroxy-L- |
| | | phenylalanine (DOPA) |
| | Phenylpyruvate | Also acts on indole-3-pyruvate |
| | decarboxylase | |
| | 4-carboxymucono- | |
| | lactone decarboxylase | |
| | O-pyrocatechuate | |
| | decarboxylase | |
| | Phenylalanine | Also acts on tyrosine and other aromatic |
| | decarboxylase | amino acids |
| | 4-hydroxybenzoate | |
| | decarboxylase | |
| | Protocatechuate | |
| | decarboxylase | |
| | Benzoylformate | |
| | decarboxylase | |
| | 4-oxalocrotonate | Involved in the meta-cleavage pathway |
| | decarboxylase | for the degradation of phenols, cresols |
| | | and catechols |
| | 4-hydroxy-4-methyl-2- | Also acts on 4-hydroxy-4-methyl-2- |
| | oxoglutarate aldolase | oxoadipate and 4-carboxy-4-hydroxy-2- |
| | | oxohexadioate |
| | 2-oxopent-4-enoate | Also acts, more slowly, on cis-2-oxohex- |
| | hydratase | 4-enoate, but not on the trans-isomer |
| | Phenylalanine | May also act on L-tyrosine |
| | ammonia-lyase | |
| | Phenylalanine racemase | |
| | (ATP-hydrolysing) | |
| | Mandelate racemase | |
| | Phenylpyruvate | Also acts on other arylpyruvates |
| | tautomerase | |
| | 5-carboxymethyl-2- | |
| | hydroxymuconate | |
| | delta-isomerase | |
| | Muconolactone delta- | |
| | isomerase | |
| | Muconate | Also acts, in the reverse reaction, on 3- |
| | cycloisomerase | methyl-cis-cis-hexa-dienedioate and, |
| | | very slowly, on cis-trans-hexadienedioate |
| | | Not identical with EC 5.5.1.7 or EC |
| | | 5.5.1.11 |
| | 3-carboxy-cis,cis- | |
| | muconate | |
| | cycloisomerase | |
| | Carboxy-cis,cis- | |
| | muconate cyclase | |
| | Chloromuconate | Spontaneous elimination of HCl produces |
| | cycloisomerase | cis-4-carboxymethylenebut-2-en-4-olide |
| | | Also acts in reverse direction on 2- |
| | | chloro-cis,cis-muconate Not identical |
| | | with EC 5.5.1.1 or EC 5.5.1.11 |
| | Phenylacetate--CoA | Phenoxyacetate can replace phenylacetate |
| | ligase | |
| | Benzoate--CoA ligase | Also acts on 2-, 3- and 4-fluorobenzoate, |
| | | but only very slowly on the |
| | | corresponding chlorobenzoates |
| | 4-hydroxybenzoate-- | |
| | CoA ligase | |
| | Phenylacetate--CoA | Also acts, more slowly, on acetate, |
| | ligase | propanoate and butanoate, but not on |
| | | hydroxy derivatives of phenylacetate and |
| | | related compounds |
| Phenylalanine, tyrosine | Quinate 5- | |
| and tryptophan biosynthesis | dehydrogenase | |
| | Shikimate 5- | |
| | dehydrogenase | |
| | Quinate dehydrogenase | |
| | (pyrroloquinoline- | |
| | quinone) | |
| | Phenylalanine 4- | |
| | monooxygenase | |
| | Prephenate | This enzyme in the enteric bacteria also |
| | dehydrogenase | possesses chorismate mutase activity (EC |
| | | 5.4.99.5) and converts chorismate into |
| | | prephenate |
| | Prephenate | |
| | dehydrogenase | |
| | (NADP+) | |
| | Cyclohexadienyl | Also acts on prephenate and D- |
| | dehydrogenase | prephenyllactate (cf. EC 1.3.1.12) |
| | 2-methyl-branched- | From Ascaris suum The reaction |
| | chain-enoyl-CoA | proceeds only in the presence of another |
| | reductase | flavoprotein (ETF=[PRIME]Electron- |
| | | Transferring Flavoprotein[PRIME]) |
| | Phenylalanine | The enzyme from Bacillus badius and |
| | dehydrogenase | Sporosarcina ureae are highly specific for |
| | | L-phenylalanine, that from Bacillus |
| | | sphaericus also acts on L-tyrosine |
| | L-amino acid oxidase | |
| | Anthranilate | In some organisms, this enzyme is part of |
| | phosphoribosyl- | a multifunctional protein together with |
| | transferase | one or more components of the system |
| | | for biosynthesis of tryptophan (EC |
| | | 4.1.1.48, EC 4.1.3.27, EC 4.2.1.20, and |
| | | EC 5.3.1.24) |
| | 3-phosphoshikimate 1- | |
| | carboxyvinyl- | |
| | transferase | |
| | Aspartate | Also acts on L-tyrosine, L-phenylalanine |
| | aminotransferase | and L-tryptophan. This activity can be |
| | | formed from EC 2.6.1.57 by controlled |
| | | proteolysis |
| | Tyrosine | L-phenylalanine can act instead of L- |
| | aminotransferase | tyrosine The mitochondrial enzyme may |
| | | be identical with EC 2.6.1.1 The three |
| | | isoenzymic forms are interconverted by |
| | | EC 3.4.22.4 |
| | Aromatic amino acid | L-methionine can also act as donor, more |
| | transferase | slowly Oxaloacetate can act as acceptor |
| | | Controlled proteolysis converts the |
| | | enzyme to EC 2.6.1.1 |
| | Histidinol-phosphate | |
| | aminotransferase | |
| | Shikimate kinase | |
| | Indole-3-glycerol- | In some organisms, this enzyme is part of |
| | phosphate synthase | a multifunctional protein together with |
| | | one or more components of the system |
| | | for biosynthesis of tryptophan (EC |
| | | 2.4.2.18, EC 4.1.3.27, EC 4.2.1.20, and |
| | | EC 5.3.1.24) |
| | 2-dehydro-3- | |
| | deoxyphosphoheptonate | |
| | aldolase | |
| | Anthranilate synthase | In some organisms, this enzyme is part of |
| | | a multifunctional protein together with |
| | | one or more components of the system |
| | | for biosynthesis of tryptophan (EC |
| | | 2.4.2.18, EC 4.1.1.48, Ec 4.2.1.20, and |
| | | EC 5.3.1.24) The native enzyme in the |
| | | complex with uses either glutamine or |
| | | (less efficiently) NH(3). The enzyme |
| | | separated from the complex uses NH(3) |
| | | only |
| | 3-dehydroquinate | |
| | dehydratase | |
| | Phosphopyruvate | Also acts on 3-phospho-D-erythronate |
| | hydratase | |
| | Tryptophan synthase | Also catalyses the conversion of serine |
| | | and indole into tryptophan and water and |
| | | of indoleglycerol phosphate into indole |
| | | and glyceraldehyde phosphate In some |
| | | organisms, this enzyme is part of a |
| | | multifunctional protein together with one |
| | | or more components of the system for |
| | | biosynthesis of tryptophan (EC 2.4.2.18, |
| | | EC 4.1.1.48, EC 4.1.3.27, and EC |
| | | 5.3.1.24) |
| | Prephenate dehydratase | This enzyme in the enteric bacteria also |
| | | possesses chorismate mutase activity and |
| | | converts chorismate into prephenate |
| | Carboxycyclohexadien | Also acts on prephenate and D- |
| | yl dehydratase | prephenyllactate Cf. EC 4.2.1.51 |
| | 3-dehydroquinate | The hydrogen atoms on C-7 of the |
| | synthase | substrate are retained on C-2 of the |
| | | products |
| | Chorismate synthase | Shikimate is numbered so that the |
| | | double-bond is between C-1 and C-2, but |
| | | some earlier papers numbered in the |
| | | reverse direction |
| | Phosphoribosylanthrani | In some organisms, this enzyme is part of |
| | late isomerase | a multifunctional protein together with |
| | | one or more components of the system |
| | | for biosynthesis of tryptophan (EC |
| | | 2.4.2.18, EC 4.1.1.48, EC 4.1.3.27, and |
| | | EC 4.2.1.20) |
| | Chorismate mutase | |
| | Tyrosine--tRNA ligase | |
| | Phenylalanine--tRNA | |
| | ligase | |
| Starch and sucrose | UDP-glucose 6- | Also acts on UDP-2-deoxyglucose |
| metabolism | dehydrogenase | |
| | Glucoside 3- | The enzyme acts on D-glucose, D- |
| | dehydrogenase | galactose, D-glucosides and D- |
| | | galactosides, but D-glucosides react more |
| | | rapidly than D-galactosides |
| | CDP-4-dehydro-6- | Two proteins are involved but no partial |
| | deoxyglucose reductase | reaction has been observed in the |
| | | presence of either alone |
| | Phosphorylase | The recommended name should be |
| | | qualified in each instance by adding the |
| | | name of the natural substance, e.g. |
| | | maltodextrin phosphorylase, starch |
| | | phosphorylase, glycogen phosphorylase |
| | Levansucrase | Some other sugars can act as D-fructosyl |
| | | acceptors |
| | Glycogen (starch) | The recommended name varies according |
| | synthase | to the source of the enzyme and the |
| | | nature of its synthetic product Glycogen |
| | | synthase from animal tissues is a |
| | | complex of a catalytic subunit and the |
| | | protein glycogenin The enzyme requires |
| | | glucosylated glycogenin as a primer; this |
| | | is the reaction product of EC 2.4.1.186 A |
| | | similar enzyme utilizes ADP-glucose (Cf. |
| | | EC 2.4.1.21) |
| | Cellulose synthase | Involved in the synthesis of cellulose A |
| | (UDP-forming) | similar enzyme utilizes GDP-glucose (Cf. |
| | | EC 2.4.1.29) |
| | Sucrose synthase | |
| | Sucrose-phosphate | |
| | synthase | |
| | Alpha, alpha-trehalose- | See also EC 2.4.1.36 |
| | phosphate synthase | |
| | (UDP-forming) | |
| | UDP- | Family of enzymes accepting a wide |
| | glucuronosyltransferase | range of substrates, including phenols, |
| | | alcohols, amines and fatty acids Some of |
| | | the activities catalysed were previously |
| | | listed seperately as EC 2.4.1.42, EC |
| | | 2.4.1.59, EC 2.4.1.61, EC 2.4.1.76, EC |
| | | 2.4.1.77, EC 2.4.1.84, EC 2.4.1.107 and |
| | | EC 2.4.1.108 A temporary nomenclature |
| | | for the various forms whose delineation |
| | | is in a state of flux |
| | 1,4-alpha-glucan | Converts amylose into amylopectin The |
| | branching enzyme | recommended name requires a |
| | | qualification depending on the product, |
| | | glycogen or amylopectin, e.g. glycogen |
| | | branching enzyme, amylopectin |
| | | branching enzyme. The latter has |
| | | frequently been termed Q-enzyme |
| | Cellobiose | |
| | phosphorylase | |
| | Starch (bacterial | The recommended name various |
| | glycogen) synthase | according to the source of the enzyme |
| | | and the nature of its synthetic product, |
| | | e.g. starch synthase, bacterial glycogen |
| | | synthase A similar enzyme utilizes UDP- |
| | | glucose (Cf. EC 2.4.1.11) |
| | 4-alpha- | An enzymic activity of this nature forms |
| | glucanotransferase | part of the mammalian and Yeast |
| | | glycogen branching system (see EC |
| | | 3.2.1.33) |
| | Cellulose synthase | Involved in the synthesis of cellulose A |
| | (GDP-forming) | similar enzyme utilizes UDP-glucose (Cf. |
| | | EC 2.4.1.12) |
| | 1,3-beta-glucan | |
| | synthase | |
| | Phenol beta- | Acts on a wide range of phenols |
| | glucosyltransferase | |
| | Amylosucrase | |
| | Polygalacturonate 4- | |
| | alpha- | |
| | galacturonosyltransferase | |
| | Dextransucrase | |
| | Alpha,alpha-trehalose | |
| | phosphorylase | |
| | Sucrose phosphorylase | In the forward reaction, arsenate may |
| | | replace phosphate In the reverse reaction |
| | | various ketoses and L-arabinose may |
| | | replace D-fructose |
| | Maltose phosphorylase | |
| | 1,4-beta-D-xylan | |
| | synthase | |
| | Hexokinase | D-glucose, D-mannose, D-fructose, |
| | | sorbitol and D-glucosamine can act as |
| | | acceptors ITP and dATP can act as |
| | | donors The liver isoenzyme has |
| | | sometimes been called glucokinase |
| | Phosphoglucokinase | |
| | Glucose-1,6- | D-glucose 6-phosphate can act as |
| | biphosphate synthase | acceptor, forming D-glucose 1,6- |
| | | bisphosphate |
| | Glucokinase | A group of enzymes found in |
| | | invertebrates and microorganisms highly |
| | | specific for glucose |
| | Fructokinase | |
| | Glucose-1-phosphate | |
| | phosphodismutase | |
| | Protein-N(PI)- | Comprises a group of related enzymes |
| | phosphohistidine-sugar | The protein substrate is a phosphocarrier |
| | phosphotransferase | protein of low molecular mass (9.5 Kd) A |
| | | phosphoenzyme intermediate is formed |
| | | The enzyme translocates the sugar it |
| | | phosphorylates into bacteria Aldohexoses |
| | | and their glycosides and alditols are |
| | | phosphorylated on O-6; fructose and |
| | | sorbose on O-1 Glycerol and |
| | | disaccharides are also substrates |
| | Glucose-1-phosphate | |
| | adenylyltransferase | |
| | Glucose-1-phosphate | |
| | cytidylyltransferase | |
| | Glucose-1-phosphate | Also acts, more slowly, on D-mannose 1- |
| | guanylyltransferase | phosphate |
| | UTP--glucose-1- | |
| | phosphate | |
| | uridylyltransferase | |
| | Pectinesterase | |
| | Trehalose-phosphatase | |
| | Sucrose-phosphatase | |
| | Glucose-6-phosphatase | Wide distribution in animal tissues Also |
| | | catalyses potent transphosphorylations |
| | | from carbamoyl phosphate, hexose |
| | | phosphates, pyrophosphate, |
| | | phosphoenolpyruvate and nucleoside di- |
| | | and triphosphates, to D-glucose, D- |
| | | mannose, 3-methyl-D-glucose, or 2- |
| | | deoxy-D-glucose (cf. EC 2.7.1.62, EC |
| | | 2.7.1.79, and EC 3.9.1.1) |
| | Alpha-amylase | Acts on starch, glycogen and related |
| | | polysaccharides and oligosaccharides in a |
| | | random manner; reducing groups are |
| | | liberated in the alpha-configuration |
| | Oligo-1,6-glucosidase | Also hydrolyses palatinose The enzyme |
| | | from intestinal mucosa is a single |
| | | polypeptide chain also catalysing the |
| | | reaction of EC 3.2.1.48 |
| | Maltose-6[PRIME]- | Hydrolyses a variety of 6-phospho-D- |
| | phosphate glucosidase | glucosides, including maltose 6- |
| | | phosphate, alpha[PRIME]alpha-trehalose |
| | | 6-phosphate, sucrose 6-phosphate and p- |
| | | nitrophenyl-alpha-D-glucopyranoside 6- |
| | | phosphate (as a chromogenic substrate) |
| | | The enzyme is activated by Fe(II), |
| | | Mn(II), Co(II) and Ni(II). It is rapidly |
| | | inactivated in air |
| | Polygalacturonase | |
| | Beta-amylase | Acts on starch, glycogen and related |
| | | polysaccharides and oligosaccharides |
| | | producing beta-maltose by an inversion |
| | Alpha-glucosidase | Group of enzymes whose specificity is |
| | | directed mainly towards the |
| | | exohydrolysis of 1,4-alpha-glucosidic |
| | | linkages, and that hydrolyse |
| | | oligosaccharides rapidly, relative to |
| | | polysaccharides, which are hydrolysed |
| | | relatively slowly, or not at all The |
| | | intestinal enzyme also hydrolyses |
| | | polysaccharides, catalysing the reactions |
| | | of EC 3.2.1.3, and more slowly, |
| | | hydrolyses 1,6-alpha-D-glucose links |
| | Beta-glucosidase | Wide specificity for beta-D-glucosides. |
| | | Some examples also hydrolyse one or |
| | | more of the following: beta-D- |
| | | galactosides, alpha-L-arabinosides, beta- |
| | | D-xylosides, and beta-D-fucosides |
| | Beta-fructofuranosidase | Substrates include sucrose Also catalyses |
| | | fructotransferase reactions |
| | Alpha,alpha-trehalase | |
| | Glucan 1,4-alpha- | Most forms of the enzyme can rapidly |
| | glucosidase | hydrolyse 1,6-alpha-D-glucosidic bonds |
| | | when the next bond in sequence is 1,4, |
| | | and some preparations of this enzyme |
| | | hydrolyse 1,6-and 1,3-alpha-D- |
| | | glucosidic bonds in other polysaccharides |
| | | This entry covers all such enzymes acting |
| | | on polysaccharides more rapidly than on |
| | | oligosaccharides EC 3.2.1.20 from |
| | | mammalian intestine can catalyse similar |
| | | reactions |
| | Beta-glucuronidase | |
| | Amylo-1,6-glucosidase | In mammals and yeast this enzyme is |
| | | linked to a glycosyltransferase similar to |
| | | EC 2.4.1.25; together these two activities |
| | | constitute the glycogen debranching |
| | | system |
| | Xylan 1,4-beta- | Also hydrolyses xylobiose Some other |
| | xylosidase | exoglycosidase activities have been |
| | | found associated with this enzyme in |
| | | sheep liver |
| | Glucan endo-1,3-beta- | Very limited action on mixed-link (1,3- |
| | D-glucosidase | 1,4-)-beta-D-glucans Hydrolyses |
| | | laminarin, paramylon and pachyman |
| | | Different from EC 3.2.1.6 |
| | Cellulase | Will also hydrolyse 1,4-linkages in beta- |
| | | D-glucans also containing 1,3-linkages |
| | Sucrose alpha- | This enzyme is isolated from intestinal |
| | glucosidase | mucosa as a single polypeptide chain also |
| | | displaying activity towards isomaltose |
| | | (oligo-1,6-glucosidase, cf. EC 3.2.1.10) |
| | Cyclomaltodextrinase | Also hydrolyses linear maltodextrin |
| | Glucan 1,3-beta- | Acts on oligosaccharides but very slowly |
| | glucosidase | on laminaribiose |
| | Levanase | |
| | Galacturan 1,4-alpha- | |
| | galacturonidase | |
| | Glucan 1,4-beta- | Acts on 1,4-beta-D-glucans and related |
| | glucosidase | oligosaccharides Cellobiose is |
| | | hydrolysed, very slowly |
| | Cellulose 1,4-beta- | |
| | cellobiosidase | |
| | Alpha,alpha- | |
| | phosphotrehalase | |
| | ADP-sugar | Has a distinct specificity from the UDP- |
| | diphosphatase | sugar pyrophosphatase (EC 3.6.1.45) |
| | Nucleotide | Substrates include NAD(+), NADP(+), |
| | pyrophosphatase | FAD, CoA and also ATP and ADP |
| | UDP-glucuronate | |
| | decarboxylase | |
| | CDP-glucose 4,6- | |
| | dehydratase | |
| | CDP-abequose | |
| | epimerase | |
| | UDP-glucuronate 4- | |
| | epimerase | |
| | Glucose-6-phosphate | Also catalyses the anomerization of D- |
| | isomerase | glucose 6-phosphate |
| | Phosphoglucomutase | Maximum activity is only obtained in the |
| | | presence of alpha-D-glucose 1,6- |
| | | bisphosphate. This bisphosphate is an |
| | | intermediate in the reaction, being |
| | | formed by transfer of a phosphate residue |
| | | from the enzyme to the substrate, but the |
| | | dissociation of biphosphate from the |
| | | enzyme complex is much slower than the |
| | | overall isomerization Also, more slowly, |
| | | catalyses the interconversion of 1- |
| | | phosphate and 6-phosphate isomers of |
| | | many other alpha-D-hexoses, and the |
| | | interconversion of alpha-D-ribose 1- |
| | | phosphate and 5-phosphate |
| | Beta- | |
| | phosphoglucomutase | |
| | Maltose alpha-D- | |
| | glucosyltransferase | |
| Tryptophan metabolism | Indole-3-lactate | |
| | dehydrogenase | |
| | Indole-3-acetaldehyde | |
| | reductase (NADH) | |
| | Indole-3-acetaldehyde | |
| | reductase (NADPH) | |
| | 3-hydroxyacyl-CoA | Also oxidizes S-3-hydroxyacyl-N- |
| | dehydrogenase | acylthioethanolamine and S-3- |
| | | hydroxyacylhydrolipoate Some enzymes |
| | | act, more slowly, with NADP(+) Broad |
| | | specificity to acyl chain-length (c.f EC |
| | | 1.1.1.211) |
| | O-aminophenol oxidase | Isophenoxazine may be formed by a |
| | | secondary condensation from the initial |
| | | oxidation product |
| | Catalase | This enzyme can also act as a peroxidase |
| | | (EC 1.11.1.7) for which several organic |
| | | substances, especially ethanol, can act as |
| | | a hydrogen donor A manganese protein |
| | | containing Mn(III) in the resting state, |
| | | which also belongs here, is often called |
| | | pseudocatalase Enzymes from some |
| | | microorganisms, such as Penicillium |
| | | simplicissimum, which exhibit both |
| | | catalase and peroxidase activity, have |
| | | sometimes been referred to as catalase- |
| | | peroxidase |
| | 7,8- | |
| | dihydroxykynurenate | |
| | 8,8A-dioxygenase | |
| | Tryptophan 2,3- | Broad specificity towards tryptamine and |
| | dioxygenase | derivatives including D- and L- |
| | | tryptophan, 5-hydroxytryptophan and |
| | | serotonin |
| | Indole 2,3-dioxygenase | The enzyme from jasminum is a |
| | | flavoprotein containing copper, and |
| | | forms anthranilate as the final product |
| | | One enzyme from Tecoma stans is also a |
| | | flavoprotein containing copper and uses |
| | | three atoms of oxygen per molecule of |
| | | indole, to form anthranil (3,4- |
| | | benzisoxazole) A second enzyme from |
| | Glycogen (starch) | The recommended name varies according |
| | synthase | to the source of the enzyme and the |
| | | nature of its synthetic product Glycogen |
| | | synthase from animal tissues is a |
| | | complex of a catalytic subunit and the |
| | | protein glycogenin The enzyme requires |
| | | glucosylated glycogenin as a primer; this |
| | | is the reaction product of EC 2.4.1.186 A |
| | | similar enzyme utilizes ADP-glucose (Cf. |
| | | EC 2.4.1.21) |
| | Cellulose synthase | Involved in the synthesis of cellulose A |
| | (UDP-forming) | similar enzyme utilizes GDP-glucose (Cf. |
| | | EC 2.4.1.29) |
| | Sucrose synthase | |
| | Sucrose-phosphate | |
| | synthase | |
| | Alpha, alpha-trehalose- | See also EC 2.4.1.36 |
| | phosphate synthase | |
| | (UDP-forming) | |
| | UDP- | Family of enzymes accepting a wide |
| | glucuronosyltransferase | range of substrates, including phenols, |
| | | alcohols, amines and fatty acids Some of |
| | | the activities catalysed were previously |
| | | listed seperately as EC 2.4.1.42, EC |
| | | 2.4.1.59, EC 2.4.1.61, EC 2.4.1.76, EC |
| | | 2.4.1.77, EC 2.4.1.84, EC 2.4.1.107 and |
| | | EC 2.4.1.108 A temporary nomenclature |
| | | for the various forms whose delineation |
| | | is in a state of flux |
| | 1,4-alpha-glucan | Converts amylose into amylopectin The |
| | branching enzyme | recommended name requires a |
| | | qualification depending on the product, |
| | | glycogen or amylopectin, e.g. glycogen |
| | | branching enzyme, amylopectin |
| | | branching enzyme. The latter has |
| | | frequently been termed Q-enzyme |
| | Cellobiose | |
| | phosphorylase | |
| | Starch (bacterial | The recommended name various |
| | glycogen) synthase | according to the source of the enzyme |
| | | and the nature of its synthetic product, |
| | | e.g. starch synthase, bacterial glycogen |
| | | synthase A similar enzyme utilizes UDP- |
| | | glucose (Cf. EC 2.4.1.11) |
| | 4-alpha- | An enzymic activity of this nature forms |
| | glucanotransferase | part of the mammalian and Yeast |
| | | glycogen branching system (see EC |
| | | 3.2.1.33) |
| | Cellulose synthase | Involved in the synthesis of cellulose A |
| | (GDP-forming) | similar enzyme utilizes UDP-glucose (Cf. |
| | | EC 2.4.1.12) |
| | 1,3-beta-glucan | |
| | synthase | |
| | Phenol beta- | Acts on a wide range of phenols |
| | glucosyltransferase | |
| | Amylosucrase | |
| | Polygalacturonate 4- | |
| | alpha- | |
| | galacturonosyltransferase | |
| | Dextransucrase | |
| | Alpha,alpha-trehalose | |
| | phosphorylase | |
| | Sucrose phosphorylase | In the forward reaction, arsenate may |
| | | replace phosphate In the reverse reaction |
| | | various ketoses and L-arabinose may |
| | | replace D-fructose |
| | Maltose phosphorylase | |
| | 1,4-beta-D-xylan | |
| | synthase | |
| | Hexokinase | D-glucose, D-mannose, D-fructose, |
| | | sorbitol and D-glucosamine can act as |
| | | acceptors ITP and dATP can act as |
| | | donors The liver isoenzyme has |
| | | sometimes been called glucokinase |
| | Phosphoglucokinase | |
| | Glucose-1,6- | D-glucose 6-phosphate can act as |
| | biphosphate synthase | acceptor, forming D-glucose 1,6- |
| | | bisphosphate |
| | Glucokinase | A group of enzymes found in |
| | | invertebrates and microorganisms highly |
| | | specific for glucose |
| | Fructokinase | |
| | Glucose-1-phosphate | |
| | phosphodismutase | |
| | Protein-N(PI)- | Comprises a group of related enzymes |
| | phosphohistidine-sugar | The protein substrate is a phosphocarrier |
| | phosphotransferase | protein of low molecular mass (9.5 Kd) A |
| | | phosphoenzyme intermediate is formed |
| | | The enzyme translocates the sugar it |
| | | phosphorylates into bacteria Aldohexoses |
| | | and their glycosides and alditols are |
| | | phosphorylated on O-6; fructose and |
| | | sorbose on O-1 Glycerol and |
| | | disaccharides are also substrates |
| | Glucose-1-phosphate | |
| | adenylyltransferase | |
| | Glucose-1-phosphate | |
| | cytidylyltransferase | |
| | Glucose-1-phosphate | Also acts, more slowly, on D-mannose 1- |
| | guanylyltransferase | phosphate |
| | UTP--glucose-1- | |
| | phosphate | |
| | uridylyltransferase | |
| | Pectinesterase | |
| | Trehalose-phosphatase | |
| | Sucrose-phosphatase | |
| | Glucose-6-phosphatase | Wide distribution in animal tissues Also |
| | | catalyses potent transphosphorylations |
| | | from carbamoyl phosphate, hexose |
| | | phosphates, pyrophosphate, |
| | | phosphoenolpyruvate and nucleoside di- |
| | | and triphosphates, to D-glucose, D- |
| | | mannose, 3-methyl-D-glucose, or 2- |
| | | deoxy-D-glucose (cf. EC 2.7.1.62, EC |
| | | 2.7.1.79, and EC 3.9.1.1) |
| | Alpha-amylase | Acts on starch, glycogen and related |
| | | polysaccharides and oligosaccharides in a |
| | | random manner; reducing groups are |
| | | liberated in the alpha-configuration |
| | Oligo-1,6-glucosidase | Also hydrolyses palatinose The enzyme |
| | | from intestinal mucosa is a single |
| | | polypeptide chain also catalysing the |
| | | reaction of EC 3.2.1.48 |
| | Maltose-6[PRIME]- | Hydrolyses a variety of 6-phospho-D- |
| | phosphate glucosidase | glucosides, including maltose 6- |
| | | phosphate, alpha[PRIME]alpha-trehalose |
| | | 6-phosphate, sucrose 6-phosphate and p- |
| | | nitrophenyl-alpha-D-glucopyranoside 6- |
| | | phosphate (as a chromogenic substrate) |
| | | The enzyme is activated by Fe(II), |
| | | Mn(II), Co(II) and Ni(II). It is rapidly |
| | | inactivated in air |
| | Polygalacturonase | |
| | Beta-amylase | Acts on starch, glycogen and related |
| | | polysaccharides and oligosaccharides |
| | | producing beta-maltose by an inversion |
| | Alpha-glucosidase | Group of enzymes whose specificity is |
| | | directed mainly towards the |
| | | exohydrolysis of 1,4-alpha-glucosidic |
| | | linkages, and that hydrolyse |
| | | oligosaccharides rapidly, relative to |
| | | polysaccharides, which are hydrolysed |
| | | relatively slowly, or not at all The |
| | | intestinal enzyme also hydrolyses |
| | | polysaccharides, catalysing the reactions |
| | | of EC 3.2.1.3, and more slowly, |
| | | hydrolyses 1,6-alpha-D-glucose links |
| | Beta-glucosidase | Wide specificity for beta-D-glucosides. |
| | | Some examples also hydrolyse one or |
| | | more of the following: beta-D- |
| | | galactosides, alpha-L-arabinosides, beta- |
| | | D-xylosides, and beta-D-fucosides |
| | Beta-fructofuranosidase | Substrates include sucrose Also catalyses |
| | | fructotransferase reactions |
| | Alpha,alpha-trehalase | |
| | Glucan 1,4-alpha- | Most forms of the enzyme can rapidly |
| | glucosidase | hydrolyse 1,6-alpha-D-glucosidic bonds |
| | | when the next bond in sequence is 1,4, |
| | | and some preparations of this enzyme |
| | | hydrolyse 1,6-and 1,3-alpha-D- |
| | | glucosidic bonds in other polysaccharides |
| | | This entry covers all such enzymes acting |
| | | on polysaccharides more rapidly than on |
| | | oligosaccharides EC 3.2.1.20 from |
| | | mammalian intestine can catalyse similar |
| | | reactions |
| | Beta-glucuronidase | |
| | Amylo-1,6-glucosidase | In mammals and yeast this enzyme is |
| | | linked to a glycosyltransferase similar to |
| | | EC 2.4.1.25; together these two activities |
| | | constitute the glycogen debranching |
| | | system |
| | Xylan 1,4-beta- | Also hydrolyses xylobiose Some other |
| | xylosidase | exoglycosidase activities have been |
| | | found associated with this enzyme in |
| | | sheep liver |
| | Glucan endo-1,3-beta- | Very limited action on mixed-link (1,3- |
| | D-glucosidase | 1,4-)-beta-D-glucans Hydrolyses |
| | | laminarin, paramylon and pachyman |
| | | Different from EC 3.2.1.6 |
| | Cellulase | Will also hydrolyse 1,4-linkages in beta- |
| | | D-glucans also containing 1,3-linkages |
| | Sucrose alpha- | This enzyme is isolated from intestinal |
| | glucosidase | mucosa as a single polypeptide chain also |
| | | displaying activity towards isomaltose |
| | | (oligo-1,6-glucosidase, cf. EC 3.2.1.10) |
| | Cyclomaltodextrinase | Also hydrolyses linear maltodextrin |
| | Glucan 1,3-beta- | Acts on oligosaccharides but very slowly |
| | glucosidase | on laminaribiose |
| | Levanase | |
| | Galacturan 1,4-alpha- | |
| | galacturonidase | |
| | Glucan 1,4-beta- | Acts on 1,4-beta-D-glucans and related |
| | glucosidase | oligosaccharides Cellobiose is |
| | | hydrolysed, very slowly |
| | Cellulose 1,4-beta- | |
| | cellobiosidase | |
| | Alpha,alpha- | |
| | phosphotrehalase | |
| | ADP-sugar | Has a distinct specificity from the UDP- |
| | diphosphatase | sugar pyrophosphatase (EC 3.6.1.45) |
| | Nucleotide | Substrates include NAD(+), NADP(+), |
| | pyrophosphatase | FAD, CoA and also ATP and ADP |
| | UDP-glucuronate | |
| | decarboxylase | |
| | CDP-glucose 4,6- | |
| | dehydratase | |
| | CDP-abequose | |
| | epimerase | |
| | UDP-glucuronate 4- | |
| | epimerase | |
| | Glucose-6-phosphate | Also catalyses the anomerization of D- |
| | isomerase | glucose 6-phosphate |
| | Phosphoglucomutase | Maximum activity is only obtained in the |
| | | presence of alpha-D-glucose 1,6- |
| | | bisphosphate. This bisphosphate is an |
| | | intermediate in the reaction, being |
| | | formed by transfer of a phosphate residue |
| | | from the enzyme to the substrate, but the |
| | | dissociation of biphosphate from the |
| | | enzyme complex is much slower than the |
| | | overall isomerization Also, more slowly, |
| | | catalyses the interconversion of 1- |
| | | phosphate and 6-phosphate isomers of |
| | | many other alpha-D-hexoses, and the |
| | | interconversion of alpha-D-ribose 1- |
| | | phosphate and 5-phosphate |
| | Beta- | |
| | phosphoglucomutase | |
| | Maltose alpha-D- | |
| | glucosyltransferase | |
| Tryptophan metabolism | Indole-3-lactate | |
| | dehydrogenase | |
| | Indole-3-acetaldehyde | |
| | reductase (NADH) | |
| | Indole-3-acetaldehyde | |
| | reductase (NADPH) | |
| | 3-hydroxyacyl-CoA | Also oxidizes S-3-hydroxyacyl-N- |
| | dehydrogenase | acylthioethanolamine and S-3- |
| | | hydroxyacylhydrolipoate Some enzymes |
| | | act, more slowly, with NADP(+) Broad |
| | | specificity to acyl chain-length (c.f EC |
| | | 1.1.1.211) |
| | O-aminophenol oxidase | Isophenoxazine may be formed by a |
| | | secondary condensation from the initial |
| | | oxidation product |
| | Catalase | This enzyme can also act as a peroxidase |
| | | (EC 1.11.1.7) for which several organic |
| | | substances, especially ethanol, can act as |
| | | a hydrogen donor A manganese protein |
| | | containing Mn(III) in the resting state, |
| | | which also belongs here, is often called |
| | | pseudocatalase Enzymes from some |
| | | microorganisms, such as Penicillium |
| | | simplicissimum, which exhibit both |
| | | catalase and peroxidase activity, have |
| | | sometimes been referred to as catalase- |
| | | peroxidase |
| | 7,8- | |
| | dihydroxykynurenate | |
| | 8,8A-dioxygenase | |
| | Tryptophan 2,3- | Broad specificity towards tryptamine and |
| | dioxygenase | derivatives including D- and L- |
| | | tryptophan, 5-hydroxytryptophan and |
| | | serotonin |
| | Indole 2,3-dioxygenase | The enzyme from jasminum is a |
| | | flavoprotein containing copper, and |
| | | forms anthranilate as the final product |
| | | One enzyme from Tecoma stans is also a |
| | | flavoprotein containing copper and uses |
| | | three atoms of oxygen per molecule of |
| | | indole, to form anthranil (3,4- |
| | | benzisoxazole) A second enzyme from |
| | Glycogen (starch) | The recommended name varies according |
| | synthase | to the source of the enzyme and the |
| | | nature of its synthetic product Glycogen |
| | | synthase from animal tissues is a |
| | | complex of a catalytic subunit and the |
| | | protein glycogenin The enzyme requires |
| | | glucosylated glycogenin as a primer; this |
| | | is the reaction product of EC 2.4.1.186 A |
| | | similar enzyme utilizes ADP-glucose (Cf. |
| | | EC 2.4.1.21) |
| | Cellulose synthase | Involved in the synthesis of cellulose A |
| | (UDP-forming) | similar enzyme utilizes GDP-glucose (Cf. |
| | | EC 2.4.1.29) |
| | Sucrose synthase | |
| | Sucrose-phosphate | |
| | synthase | |
| | Alpha, alpha-trehalose- | See also EC 2.4.1.36 |
| | phosphate synthase | |
| | (UDP-forming) | |
| | UDP- | Family of enzymes accepting a wide |
| | glucuronosyltransferase | range of substrates, including phenols, |
| | | alcohols, amines and fatty acids Some of |
| | | the activities catalysed were previously |
| | | listed seperately as EC 2.4.1.42, EC |
| | | 2.4.1.59, EC 2.4.1.61, EC 2.4.1.76, EC |
| | | 2.4.1.77, EC 2.4.1.84, EC 2.4.1.107 and |
| | | EC 2.4.1.108 A temporary nomenclature |
| | | for the various forms whose delineation |
| | | is in a state of flux |
| | 1,4-alpha-glucan | Converts amylose into amylopectin The |
| | branching enzyme | recommended name requires a |
| | | qualification depending on the product, |
| | | glycogen or amylopectin, e.g. glycogen |
| | | branching enzyme, amylopectin |
| | | branching enzyme. The latter has |
| | | frequently been termed Q-enzyme |
| | Cellobiose | |
| | phosphorylase | |
| | Starch (bacterial | The recommended name various |
| | glycogen) synthase | according to the source of the enzyme |
| | | and the nature of its synthetic product, |
| | | e.g. starch synthase, bacterial glycogen |
| | | synthase A similar enzyme utilizes UDP- |
| | | glucose (Cf. EC 2.4.1.11) |
| | 4-alpha- | An enzymic activity of this nature forms |
| | glucanotransferase | part of the mammalian and Yeast |
| | | glycogen branching system (see EC |
| | | 3.2.1.33) |
| | Cellulose synthase | Involved in the synthesis of cellulose A |
| | (GDP-forming) | similar enzyme utilizes UDP-glucose (Cf. |
| | | EC 2.4.1.12) |
| | 1,3-beta-glucan | |
| | synthase | |
| | Phenol beta- | Acts on a wide range of phenols |
| | glucosyltransferase | |
| | Amylosucrase | |
| | Polygalacturonate 4- | |
| | alpha- | |
| | galacturonosyltransferase | |
| | Dextransucrase | |
| | Alpha,alpha-trehalose | |
| | phosphorylase | |
| | Sucrose phosphorylase | In the forward reaction, arsenate may |
| | | replace phosphate In the reverse reaction |
| | | various ketoses and L-arabinose may |
| | | replace D-fructose |
| | Maltose phosphorylase | |
| | 1,4-beta-D-xylan | |
| | synthase | |
| | Hexokinase | D-glucose, D-mannose, D-fructose, |
| | | sorbitol and D-glucosamine can act as |
| | | acceptors ITP and dATP can act as |
| | | donors The liver isoenzyme has |
| | | sometimes been called glucokinase |
| | Phosphoglucokinase | |
| | Glucose-1,6- | D-glucose 6-phosphate can act as |
| | biphosphate synthase | acceptor, forming D-glucose 1,6- |
| | | bisphosphate |
| | Glucokinase | A group of enzymes found in |
| | | invertebrates and microorganisms highly |
| | | specific for glucose |
| | Fructokinase | |
| | Glucose-1-phosphate | |
| | phosphodismutase | |
| | Protein-N(PI)- | Comprises a group of related enzymes |
| | phosphohistidine-sugar | The protein substrate is a phosphocarrier |
| | phosphotransferase | protein of low molecular mass (9.5 Kd) A |
| | | phosphoenzyme intermediate is formed |
| | | The enzyme translocates the sugar it |
| | | phosphorylates into bacteria Aldohexoses |
| | | and their glycosides and alditols are |
| | | phosphorylated on O-6; fructose and |
| | | sorbose on O-1 Glycerol and |
| | | disaccharides are also substrates |
| | Glucose-1-phosphate | |
| | adenylyltransferase | |
| | Glucose-1-phosphate | |
| | cytidylyltransferase | |
| | Glucose-1-phosphate | Also acts, more slowly, on D-mannose 1- |
| | guanylyltransferase | phosphate |
| | UTP--glucose-1- | |
| | phosphate | |
| | uridylyltransferase | |
| | Pectinesterase | |
| | Trehalose-phosphatase | |
| | Sucrose-phosphatase | |
| | Glucose-6-phosphatase | Wide distribution in animal tissues Also |
| | | catalyses potent transphosphorylations |
| | | from carbamoyl phosphate, hexose |
| | | phosphates, pyrophosphate, |
| | | phosphoenolpyruvate and nucleoside di- |
| | | and triphosphates, to D-glucose, D- |
| | | mannose, 3-methyl-D-glucose, or 2- |
| | | deoxy-D-glucose (cf. EC 2.7.1.62, EC |
| | | 2.7.1.79, and EC 3.9.1.1) |
| | Alpha-amylase | Acts on starch, glycogen and related |
| | | polysaccharides and oligosaccharides in a |
| | | random manner; reducing groups are |
| | | liberated in the alpha-configuration |
| | Oligo-1,6-glucosidase | Also hydrolyses palatinose The enzyme |
| | | from intestinal mucosa is a single |
| | | polypeptide chain also catalysing the |
| | | reaction of EC 3.2.1.48 |
| | Maltose-6[PRIME]- | Hydrolyses a variety of 6-phospho-D- |
| | phosphate glucosidase | glucosides, including maltose 6- |
| | | phosphate, alpha[PRIME]alpha-trehalose |
| | | 6-phosphate, sucrose 6-phosphate and p- |
| | | nitrophenyl-alpha-D-glucopyranoside 6- |
| | | phosphate (as a chromogenic substrate) |
| | | The enzyme is activated by Fe(II), |
| | | Mn(II), Co(II) and Ni(II). It is rapidly |
| | | inactivated in air |
| | Polygalacturonase | |
| | Beta-amylase | Acts on starch, glycogen and related |
| | | polysaccharides and oligosaccharides |
| | | producing beta-maltose by an inversion |
| | Alpha-glucosidase | Group of enzymes whose specificity is |
| | | directed mainly towards the |
| | | exohydrolysis of 1,4-alpha-glucosidic |
| | | linkages, and that hydrolyse |
| | | oligosaccharides rapidly, relative to |
| | | polysaccharides, which are hydrolysed |
| | | relatively slowly, or not at all The |
| | | intestinal enzyme also hydrolyses |
| | | polysaccharides, catalysing the reactions |
| | | of EC 3.2.1.3, and more slowly, |
| | | hydrolyses 1,6-alpha-D-glucose links |
| | Beta-glucosidase | Wide specificity for beta-D-glucosides. |
| | | Some examples also hydrolyse one or |
| | | more of the following: beta-D- |
| | | galactosides, alpha-L-arabinosides, beta- |
| | | D-xylosides, and beta-D-fucosides |
| | Beta-fructofuranosidase | Substrates include sucrose Also catalyses |
| | | fructotransferase reactions |
| | Alpha,alpha-trehalase | |
| | Glucan 1,4-alpha- | Most forms of the enzyme can rapidly |
| | glucosidase | hydrolyse 1,6-alpha-D-glucosidic bonds |
| | | when the next bond in sequence is 1,4, |
| | | and some preparations of this enzyme |
| | | hydrolyse 1,6-and 1,3-alpha-D- |
| | | glucosidic bonds in other polysaccharides |
| | | This entry covers all such enzymes acting |
| | | on polysaccharides more rapidly than on |
| | | oligosaccharides EC 3.2.1.20 from |
| | | mammalian intestine can catalyse similar |
| | | reactions |
| | Beta-glucuronidase | |
| | Amylo-1,6-glucosidase | In mammals and yeast this enzyme is |
| | | linked to a glycosyltransferase similar to |
| | | EC 2.4.1.25; together these two activities |
| | | constitute the glycogen debranching |
| | | system |
| | Xylan 1,4-beta- | Also hydrolyses xylobiose Some other |
| | xylosidase | exoglycosidase activities have been |
| | | found associated with this enzyme in |
| | | sheep liver |
| | Glucan endo-1,3-beta- | Very limited action on mixed-link (1,3- |
| | D-glucosidase | 1,4-)-beta-D-glucans Hydrolyses |
| | | laminarin, paramylon and pachyman |
| | | Different from EC 3.2.1.6 |
| | Cellulase | Will also hydrolyse 1,4-linkages in beta- |
| | | D-glucans also containing 1,3-linkages |
| | Sucrose alpha- | This enzyme is isolated from intestinal |
| | glucosidase | mucosa as a single polypeptide chain also |
| | | displaying activity towards isomaltose |
| | | (oligo-1,6-glucosidase, cf. EC 3.2.1.10) |
| | Cyclomaltodextrinase | Also hydrolyses linear maltodextrin |
| | Glucan 1,3-beta- | Acts on oligosaccharides but very slowly |
| | glucosidase | on laminaribiose |
| | Levanase | |
| | Galacturan 1,4-alpha- | |
| | galacturonidase | |
| | Glucan 1,4-beta- | Acts on 1,4-beta-D-glucans and related |
| | glucosidase | oligosaccharides Cellobiose is |
| | | hydrolysed, very slowly |
| | Cellulose 1,4-beta- | |
| | cellobiosidase | |
| | Alpha,alpha- | |
| | phosphotrehalase | |
| | ADP-sugar | Has a distinct specificity from the UDP- |
| | diphosphatase | sugar pyrophosphatase (EC 3.6.1.45) |
| | Nucleotide | Substrates include NAD(+), NADP(+), |
| | pyrophosphatase | FAD, CoA and also ATP and ADP |
| | UDP-glucuronate | |
| | decarboxylase | |
| | CDP-glucose 4,6- | |
| | dehydratase | |
| | CDP-abequose | |
| | epimerase | |
| | UDP-glucuronate 4- | |
| | epimerase | |
| | Glucose-6-phosphate | Also catalyses the anomerization of D- |
| | isomerase | glucose 6-phosphate |
| | Phosphoglucomutase | Maximum activity is only obtained in the |
| | | presence of alpha-D-glucose 1,6- |
| | | bisphosphate. This bisphosphate is an |
| | | intermediate in the reaction, being |
| | | formed by transfer of a phosphate residue |
| | | from the enzyme to the substrate, but the |
| | | dissociation of biphosphate from the |
| | | enzyme complex is much slower than the |
| | | overall isomerization Also, more slowly, |
| | | catalyses the interconversion of 1- |
| | | phosphate and 6-phosphate isomers of |
| | | many other alpha-D-hexoses, and the |
| | | interconversion of alpha-D-ribose 1- |
| | | phosphate and 5-phosphate |
| | Beta- | |
| | phosphoglucomutase | |
| | Maltose alpha-D- | |
| | glucosyltransferase | |
| Tryptophan metabolism | Indole-3-lactate | |
| | dehydrogenase | |
| | Indole-3-acetaldehyde | |
| | reductase (NADH) | |
| | Indole-3-acetaldehyde | |
| | reductase (NADPH) | |
| | 3-hydroxyacyl-CoA | Also oxidizes S-3-hydroxyacyl-N- |
| | dehydrogenase | acylthioethanolamine and S-3- |
| | | hydroxyacylhydrolipoate Some enzymes |
| | | act, more slowly, with NADP(+) Broad |
| | | specificity to acyl chain-length (c.f EC |
| | | 1.1.1.211) |
| | O-aminophenol oxidase | Isophenoxazine may be formed by a |
| | | secondary condensation from the initial |
| | | oxidation product |
| | Catalase | This enzyme can also act as a peroxidase |
| | | (EC 1.11.1.7) for which several organic |
| | | substances, especially ethanol, can act as |
| | | a hydrogen donor A manganese protein |
| | | containing Mn(III) in the resting state, |
| | | which also belongs here, is often called |
| | | pseudocatalase Enzymes from some |
| | | microorganisms, such as Penicillium |
| | | simplicissimum, which exhibit both |
| | | catalase and peroxidase activity, have |
| | | sometimes been referred to as catalase- |
| | | peroxidase |
| | 7,8- | |
| | dihydroxykynurenate | |
| | 8,8A-dioxygenase | |
| | Tryptophan 2,3- | Broad specificity towards tryptamine and |
| | dioxygenase | derivatives including D- and L- |
| | | tryptophan, 5-hydroxytryptophan and |
| | | serotonin |
| | Indole 2,3-dioxygenase | The enzyme from jasminum is a |
| | | flavoprotein containing copper, and |
| | | forms anthranilate as the final product |
| | | One enzyme from Tecoma stans is also a |
| | | flavoprotein containing copper and uses |
| | | three atoms of oxygen per molecule of |
| | | indole, to form anthranil (3,4- |
| | | benzisoxazole) A second enzyme from |
| | Glycogen (starch) | The recommended name varies according |
| | synthase | to the source of the enzyme and the |
| | | nature of its synthetic product Glycogen |
| | | synthase from animal tissues is a |
| | | complex of a catalytic subunit and the |
| | | protein glycogenin The enzyme requires |
| | | glucosylated glycogenin as a primer; this |
| | | is the reaction product of EC 2.4.1.186 A |
| | | similar enzyme utilizes ADP-glucose (Cf. |
| | | EC 2.4.1.21) |
| | Cellulose synthase | Involved in the synthesis of cellulose A |
| | (UDP-forming) | similar enzyme utilizes GDP-glucose (Cf. |
| | | EC 2.4.1.29) |
| | Sucrose synthase | |
| | Sucrose-phosphate | |
| | synthase | |
| | Alpha, alpha-trehalose- | See also EC 2.4.1.36 |
| | phosphate synthase | |
| | (UDP-forming) | |
| | UDP- | Family of enzymes accepting a wide |
| | glucuronosyltransferase | range of substrates, including phenols, |
| | | alcohols, amines and fatty acids Some of |
| | | the activities catalysed were previously |
| | | listed seperately as EC 2.4.1.42, EC |
| | | 2.4.1.59, EC 2.4.1.61, EC 2.4.1.76, EC |
| | | 2.4.1.77, EC 2.4.1.84, EC 2.4.1.107 and |
| | | EC 2.4.1.108 A temporary nomenclature |
| | | for the various forms whose delineation |
| | | is in a state of flux |
| | 1,4-alpha-glucan | Converts amylose into amylopectin The |
| | branching enzyme | recommended name requires a |
| | | qualification depending on the product, |
| | | glycogen or amylopectin, e.g. glycogen |
| | | branching enzyme, amylopectin |
| | | branching enzyme. The latter has |
| | | frequently been termed Q-enzyme |
| | Cellobiose | |
| | phosphorylase | |
| | Starch (bacterial | The recommended name various |
| | glycogen) synthase | according to the source of the enzyme |
| | | and the nature of its synthetic product, |
| | | e.g. starch synthase, bacterial glycogen |
| | | synthase A similar enzyme utilizes UDP- |
| | | glucose (Cf. EC 2.4.1.11) |
| | 4-alpha- | An enzymic activity of this nature forms |
| | glucanotransferase | part of the mammalian and Yeast |
| | | glycogen branching system (see EC |
| | | 3.2.1.33) |
| | Cellulose synthase | Involved in the synthesis of cellulose A |
| | (GDP-forming) | similar enzyme utilizes UDP-glucose (Cf. |
| | | EC 2.4.1.12) |
| | 1,3-beta-glucan | |
| | synthase | |
| | Phenol beta- | Acts on a wide range of phenols |
| | glucosyltransferase | |
| | Amylosucrase | |
| | Polygalacturonate 4- | |
| | alpha- | |
| | galacturonosyltransferase | |
| | Dextransucrase | |
| | Alpha,alpha-trehalose | |
| | phosphorylase | |
| | Sucrose phosphorylase | In the forward reaction, arsenate may |
| | | replace phosphate In the reverse reaction |
| | | various ketoses and L-arabinose may |
| | | replace D-fructose |
| | Maltose phosphorylase | |
| | 1,4-beta-D-xylan | |
| | synthase | |
| | Hexokinase | D-glucose, D-mannose, D-fructose, |
| | | sorbitol and D-glucosamine can act as |
| | | acceptors ITP and dATP can act as |
| | | donors The liver isoenzyme has |
| | | sometimes been called glucokinase |
| | Phosphoglucokinase | |
| | Glucose-1,6- | D-glucose 6-phosphate can act as |
| | biphosphate synthase | acceptor, forming D-glucose 1,6- |
| | | bisphosphate |
| | Glucokinase | A group of enzymes found in |
| | | invertebrates and microorganisms highly |
| | | specific for glucose |
| | Fructokinase | |
| | Glucose-1-phosphate | |
| | phosphodismutase | |
| | Protein-N(PI)- | Comprises a group of related enzymes |
| | phosphohistidine-sugar | The protein substrate is a phosphocarrier |
| | phosphotransferase | protein of low molecular mass (9.5 Kd) A |
| | | phosphoenzyme intermediate is formed |
| | | The enzyme translocates the sugar it |
| | | phosphorylates into bacteria Aldohexoses |
| | | and their glycosides and alditols are |
| | | phosphorylated on O-6; fructose and |
| | | sorbose on O-1 Glycerol and |
| | | disaccharides are also substrates |
| | Glucose-1-phosphate | |
| | adenylyltransferase | |
| | Glucose-1-phosphate | |
| | cytidylyltransferase | |
| | Glucose-1-phosphate | Also acts, more slowly, on D-mannose 1- |
| | guanylyltransferase | phosphate |
| | UTP--glucose-1- | |
| | phosphate | |
| | uridylyltransferase | |
| | Pectinesterase | |
| | Trehalose-phosphatase | |
| | Sucrose-phosphatase | |
| | Glucose-6-phosphatase | Wide distribution in animal tissues Also |
| | | catalyses potent transphosphorylations |
| | | from carbamoyl phosphate, hexose |
| | | phosphates, pyrophosphate, |
| | | phosphoenolpyruvate and nucleoside di- |
| | | and triphosphates, to D-glucose, D- |
| | | mannose, 3-methyl-D-glucose, or 2- |
| | | deoxy-D-glucose (cf. EC 2.7.1.62, EC |
| | | 2.7.1.79, and EC 3.9.1.1) |
| | Alpha-amylase | Acts on starch, glycogen and related |
| | | polysaccharides and oligosaccharides in a |
| | | random manner; reducing groups are |
| | | liberated in the alpha-configuration |
| | Oligo-1,6-glucosidase | Also hydrolyses palatinose The enzyme |
| | | from intestinal mucosa is a single |
| | | polypeptide chain also catalysing the |
| | | reaction of EC 3.2.1.48 |
| | Maltose-6[PRIME]- | Hydrolyses a variety of 6-phospho-D- |
| | phosphate glucosidase | glucosides, including maltose 6- |
| | | phosphate, alpha[PRIME]alpha-trehalose |
| | | 6-phosphate, sucrose 6-phosphate and p- |
| | | nitrophenyl-alpha-D-glucopyranoside 6- |
| | | phosphate (as a chromogenic substrate) |
| | | The enzyme is activated by Fe(II), |
| | | Mn(II), Co(II) and Ni(II). It is rapidly |
| | | inactivated in air |
| | Polygalacturonase | |
| | Beta-amylase | Acts on starch, glycogen and related |
| | | polysaccharides and oligosaccharides |
| | | producing beta-maltose by an inversion |
| | Alpha-glucosidase | Group of enzymes whose specificity is |
| | | directed mainly towards the |
| | | exohydrolysis of 1,4-alpha-glucosidic |
| | | linkages, and that hydrolyse |
| | | oligosaccharides rapidly, relative to |
| | | polysaccharides, which are hydrolysed |
| | | relatively slowly, or not at all The |
| | | intestinal enzyme also hydrolyses |
| | | polysaccharides, catalysing the reactions |
| | | of EC 3.2.1.3, and more slowly, |
| | | hydrolyses 1,6-alpha-D-glucose links |
| | Beta-glucosidase | Wide specificity for beta-D-glucosides. |
| | | Some examples also hydrolyse one or |
| | | more of the following: beta-D- |
| | | galactosides, alpha-L-arabinosides, beta- |
| | | D-xylosides, and beta-D-fucosides |
| | Beta-fructofuranosidase | Substrates include sucrose Also catalyses |
| | | fructotransferase reactions |
| | Alpha,alpha-trehalase | |
| | Glucan 1,4-alpha- | Most forms of the enzyme can rapidly |
| | glucosidase | hydrolyse 1,6-alpha-D-glucosidic bonds |
| | | when the next bond in sequence is 1,4, |
| | | and some preparations of this enzyme |
| | | hydrolyse 1,6-and 1,3-alpha-D- |
| | | glucosidic bonds in other polysaccharides |
| | | This entry covers all such enzymes acting |
| | | on polysaccharides more rapidly than on |
| | | oligosaccharides EC 3.2.1.20 from |
| | | mammalian intestine can catalyse similar |
| | | reactions |
| | Beta-glucuronidase | |
| | Amylo-1,6-glucosidase | In mammals and yeast this enzyme is |
| | | linked to a glycosyltransferase similar to |
| | | EC 2.4.1.25; together these two activities |
| | | constitute the glycogen debranching |
| | | system |
| | Xylan 1,4-beta- | Also hydrolyses xylobiose Some other |
| | xylosidase | exoglycosidase activities have been |
| | | found associated with this enzyme in |
| | | sheep liver |
| | Glucan endo-1,3-beta- | Very limited action on mixed-link (1,3- |
| | D-glucosidase | 1,4-)-beta-D-glucans Hydrolyses |
| | | laminarin, paramylon and pachyman |
| | | Different from EC 3.2.1.6 |
| | Cellulase | Will also hydrolyse 1,4-linkages in beta- |
| | | D-glucans also containing 1,3-linkages |
| | Sucrose alpha- | This enzyme is isolated from intestinal |
| | glucosidase | mucosa as a single polypeptide chain also |
| | | displaying activity towards isomaltose |
| | | (oligo-1,6-glucosidase, cf. EC 3.2.1.10) |
| | Cyclomaltodextrinase | Also hydrolyses linear maltodextrin |
| | Glucan 1,3-beta- | Acts on oligosaccharides but very slowly |
| | glucosidase | on laminaribiose |
| | Levanase | |
| | Galacturan 1,4-alpha- | |
| | galacturonidase | |
| | Glucan 1,4-beta- | Acts on 1,4-beta-D-glucans and related |
| | glucosidase | oligosaccharides Cellobiose is |
| | | hydrolysed, very slowly |
| | Cellulose 1,4-beta- | |
| | cellobiosidase | |
| | Alpha,alpha- | |
| | phosphotrehalase | |
| | ADP-sugar | Has a distinct specificity from the UDP- |
| | diphosphatase | sugar pyrophosphatase (EC 3.6.1.45) |
| | Nucleotide | Substrates include NAD(+), NADP(+), |
| | pyrophosphatase | FAD, CoA and also ATP and ADP |
| | UDP-glucuronate | |
| | decarboxylase | |
| | CDP-glucose 4,6- | |
| | dehydratase | |
| | CDP-abequose | |
| | epimerase | |
| | UDP-glucuronate 4- | |
| | epimerase | |
| | Glucose-6-phosphate | Also catalyses the anomerization of D- |
| | isomerase | glucose 6-phosphate |
| | Phosphoglucomutase | Maximum activity is only obtained in the |
| | | presence of alpha-D-glucose 1,6- |
| | | bisphosphate. This bisphosphate is an |
| | | intermediate in the reaction, being |
| | | formed by transfer of a phosphate residue |
| | | from the enzyme to the substrate, but the |
| | | dissociation of biphosphate from the |
| | | enzyme complex is much slower than the |
| | | overall isomerization Also, more slowly, |
| | | catalyses the interconversion of 1- |
| | | phosphate and 6-phosphate isomers of |
| | | many other alpha-D-hexoses, and the |
| | | interconversion of alpha-D-ribose 1- |
| | | phosphate and 5-phosphate |
| | Beta- | |
| | phosphoglucomutase | |
| | Maltose alpha-D- | |
| | glucosyltransferase | |
| Tryptophan metabolism | Indole-3-lactate | |
| | dehydrogenase | |
| | Indole-3-acetaldehyde | |
| | reductase (NADH) | |
| | Indole-3-acetaldehyde | |
| | reductase (NADPH) | |
| | 3-hydroxyacyl-CoA | Also oxidizes S-3-hydroxyacyl-N- |
| | dehydrogenase | acylthioethanolamine and S-3- |
| | | hydroxyacylhydrolipoate Some enzymes |
| | | act, more slowly, with NADP(+) Broad |
| | | specificity to acyl chain-length (c.f EC |
| | | 1.1.1.211) |
| | O-aminophenol oxidase | Isophenoxazine may be formed by a |
| | | secondary condensation from the initial |
| | | oxidation product |
| | Catalase | This enzyme can also act as a peroxidase |
| | | (EC 1.11.1.7) for which several organic |
| | | substances, especially ethanol, can act as |
| | | a hydrogen donor A manganese protein |
| | | containing Mn(III) in the resting state, |
| | | which also belongs here, is often called |
| | | pseudocatalase Enzymes from some |
| | | microorganisms, such as Penicillium |
| | | simplicissimum, which exhibit both |
| | | catalase and peroxidase activity, have |
| | | sometimes been referred to as catalase- |
| | | peroxidase |
| | 7,8- | |
| | dihydroxykynurenate | |
| | 8,8A-dioxygenase | |
| | Tryptophan 2,3- | Broad specificity towards tryptamine and |
| | dioxygenase | derivatives including D- and L- |
| | | tryptophan, 5-hydroxytryptophan and |
| | | serotonin |
| | Indole 2,3-dioxygenase | The enzyme from jasminum is a |
| | | flavoprotein containing copper, and |
| | | forms anthranilate as the final product |
| | | One enzyme from Tecoma stans is also a |
| | | flavoprotein containing copper and uses |
| | | three atoms of oxygen per molecule of |
| | | indole, to form anthranil (3,4- |
| | | benzisoxazole) A second enzyme from |
| | Glycogen (starch) | The recommended name varies according |
| | synthase | to the source of the enzyme and the |
| | | nature of its synthetic product Glycogen |
| | | synthase from animal tissues is a |
| | | complex of a catalytic subunit and the |
| | | protein glycogenin The enzyme requires |
| | | glucosylated glycogenin as a primer; this |
| | | is the reaction product of EC 2.4.1.186 A |
| | | similar enzyme utilizes ADP-glucose (Cf. |
| | | EC 2.4.1.21) |
| | Cellulose synthase | Involved in the synthesis of cellulose A |
| | (UDP-forming) | similar enzyme utilizes GDP-glucose (Cf. |
| | | EC 2.4.1.29) |
| | Sucrose synthase | |
| | Sucrose-phosphate | |
| | synthase | |
| | Alpha, alpha-trehalose- | See also EC 2.4.1.36 |
| | phosphate synthase | |
| | (UDP-forming) | |
| | UDP- | Family of enzymes accepting a wide |
| | glucuronosyltransferase | range of substrates, including phenols, |
| | | alcohols, amines and fatty acids Some of |
| | | the activities catalysed were previously |
| | | listed seperately as EC 2.4.1.42, EC |
| | | 2.4.1.59, EC 2.4.1.61, EC 2.4.1.76, EC |
| | | 2.4.1.77, EC 2.4.1.84, EC 2.4.1.107 and |
| | | EC 2.4.1.108 A temporary nomenclature |
| | | for the various forms whose delineation |
| | | is in a state of flux |
| | 1,4-alpha-glucan | Converts amylose into amylopectin The |
| | branching enzyme | recommended name requires a |
| | | qualification depending on the product, |
| | | glycogen or amylopectin, e.g. glycogen |
| | | branching enzyme, amylopectin |
| | | branching enzyme. The latter has |
| | | frequently been termed Q-enzyme |
| | Cellobiose | |
| | phosphorylase | |
| | Starch (bacterial | The recommended name various |
| | glycogen) synthase | according to the source of the enzyme |
| | | and the nature of its synthetic product, |
| | | e.g. starch synthase, bacterial glycogen |
| | | synthase A similar enzyme utilizes UDP- |
| | | glucose (Cf. EC 2.4.1.11) |
| | 4-alpha- | An enzymic activity of this nature forms |
| | glucanotransferase | part of the mammalian and Yeast |
| | | glycogen branching system (see EC |
| | | 3.2.1.33) |
| | Cellulose synthase | Involved in the synthesis of cellulose A |
| | (GDP-forming) | similar enzyme utilizes UDP-glucose (Cf. |
| | | EC 2.4.1.12) |
| | 1,3-beta-glucan | |
| | synthase | |
| | Phenol beta- | Acts on a wide range of phenols |
| | glucosyltransferase | |
| | Amylosucrase | |
| | Polygalacturonate 4- | |
| | alpha- | |
| | galacturonosyltransferase | |
| | Dextransucrase | |
| | Alpha,alpha-trehalose | |
| | phosphorylase | |
| | Sucrose phosphorylase | In the forward reaction, arsenate may |
| | | replace phosphate In the reverse reaction |
| | | various ketoses and L-arabinose may |
| | | replace D-fructose |
| | Maltose phosphorylase | |
| | 1,4-beta-D-xylan | |
| | synthase | |
| | Hexokinase | D-glucose, D-mannose, D-fructose, |
| | | sorbitol and D-glucosamine can act as |
| | | acceptors ITP and dATP can act as |
| | | donors The liver isoenzyme has |
| | | sometimes been called glucokinase |
| | Phosphoglucokinase | |
| | Glucose-1,6- | D-glucose 6-phosphate can act as |
| | biphosphate synthase | acceptor, forming D-glucose 1,6- |
| | | bisphosphate |
| | Glucokinase | A group of enzymes found in |
| | | invertebrates and microorganisms highly |
| | | specific for glucose |
| | Fructokinase | |
| | Glucose-1-phosphate | |
| | phosphodismutase | |
| | Protein-N(PI)- | Comprises a group of related enzymes |
| | phosphohistidine-sugar | The protein substrate is a phosphocarrier |
| | phosphotransferase | protein of low molecular mass (9.5 Kd) A |
| | | phosphoenzyme intermediate is formed |
| | | The enzyme translocates the sugar it |
| | | phosphorylates into bacteria Aldohexoses |
| | | and their glycosides and alditols are |
| | | phosphorylated on O-6; fructose and |
| | | sorbose on O-1 Glycerol and |
| | | disaccharides are also substrates |
| | Glucose-1-phosphate | |
| | adenylyltransferase | |
| | Glucose-1-phosphate | |
| | cytidylyltransferase | |
| | Glucose-1-phosphate | Also acts, more slowly, on D-mannose 1- |
| | guanylyltransferase | phosphate |
| | UTP--glucose-1- | |
| | phosphate | |
| | uridylyltransferase | |
| | Pectinesterase | |
| | Trehalose-phosphatase | |
| | Sucrose-phosphatase | |
| | Glucose-6-phosphatase | Wide distribution in animal tissues Also |
| | | catalyses potent transphosphorylations |
| | | from carbamoyl phosphate, hexose |
| | | phosphates, pyrophosphate, |
| | | phosphoenolpyruvate and nucleoside di- |
| | | and triphosphates, to D-glucose, D- |
| | | mannose, 3-methyl-D-glucose, or 2- |
| | | deoxy-D-glucose (cf. EC 2.7.1.62, EC |
| | | 2.7.1.79, and EC 3.9.1.1) |
| | Alpha-amylase | Acts on starch, glycogen and related |
| | | polysaccharides and oligosaccharides in a |
| | | random manner; reducing groups are |
| | | liberated in the alpha-configuration |
| | Oligo-1,6-glucosidase | Also hydrolyses palatinose The enzyme |
| | | from intestinal mucosa is a single |
| | | polypeptide chain also catalysing the |
| | | reaction of EC 3.2.1.48 |
| | Maltose-6[PRIME]- | Hydrolyses a variety of 6-phospho-D- |
| | phosphate glucosidase | glucosides, including maltose 6- |
| | | phosphate, alpha[PRIME]alpha-trehalose |
| | | 6-phosphate, sucrose 6-phosphate and p- |
| | | nitrophenyl-alpha-D-glucopyranoside 6- |
| | | phosphate (as a chromogenic substrate) |
| | | The enzyme is activated by Fe(II), |
| | | Mn(II), Co(II) and Ni(II). It is rapidly |
| | | inactivated in air |
| | Polygalacturonase | |
| | Beta-amylase | Acts on starch, glycogen and related |
| | | polysaccharides and oligosaccharides |
| | | producing beta-maltose by an inversion |
| | Alpha-glucosidase | Group of enzymes whose specificity is |
| | | directed mainly towards the |
| | | exohydrolysis of 1,4-alpha-glucosidic |
| | | linkages, and that hydrolyse |
| | | oligosaccharides rapidly, relative to |
| | | polysaccharides, which are hydrolysed |
| | | relatively slowly, or not at all The |
| | | intestinal enzyme also hydrolyses |
| | | polysaccharides, catalysing the reactions |
| | | of EC 3.2.1.3, and more slowly, |
| | | hydrolyses 1,6-alpha-D-glucose links |
| | Beta-glucosidase | Wide specificity for beta-D-glucosides. |
| | | Some examples also hydrolyse one or |
| | | more of the following: beta-D- |
| | | galactosides, alpha-L-arabinosides, beta- |
| | | D-xylosides, and beta-D-fucosides |
| | Beta-fructofuranosidase | Substrates include sucrose Also catalyses |
| | | fructotransferase reactions |
| | Alpha,alpha-trehalase | |
| | Glucan 1,4-alpha- | Most forms of the enzyme can rapidly |
| | glucosidase | hydrolyse 1,6-alpha-D-glucosidic bonds |
| | | when the next bond in sequence is 1,4, |
| | | and some preparations of this enzyme |
| | | hydrolyse 1,6-and 1,3-alpha-D- |
| | | glucosidic bonds in other polysaccharides |
| | | This entry covers all such enzymes acting |
| | | on polysaccharides more rapidly than on |
| | | oligosaccharides EC 3.2.1.20 from |
| | | mammalian intestine can catalyse similar |
| | | reactions |
| | Beta-glucuronidase | |
| | Amylo-1,6-glucosidase | In mammals and yeast this enzyme is |
| | | linked to a glycosyltransferase similar to |
| | | EC 2.4.1.25; together these two activities |
| | | constitute the glycogen debranching |
| | | system |
| | Xylan 1,4-beta- | Also hydrolyses xylobiose Some other |
| | xylosidase | exoglycosidase activities have been |
| | | found associated with this enzyme in |
| | | sheep liver |
| | Glucan endo-1,3-beta- | Very limited action on mixed-link (1,3- |
| | D-glucosidase | 1,4-)-beta-D-glucans Hydrolyses |
| | | laminarin, paramylon and pachyman |
| | | Different from EC 3.2.1.6 |
| | Cellulase | Will also hydrolyse 1,4-linkages in beta- |
| | | D-glucans also containing 1,3-linkages |
| | Sucrose alpha- | This enzyme is isolated from intestinal |
| | glucosidase | mucosa as a single polypeptide chain also |
| | | displaying activity towards isomaltose |
| | | (oligo-1,6-glucosidase, cf. EC 3.2.1.10) |
| | Cyclomaltodextrinase | Also hydrolyses linear maltodextrin |
| | Glucan 1,3-beta- | Acts on oligosaccharides but very slowly |
| | glucosidase | on laminaribiose |
| | Levanase | |
| | Galacturan 1,4-alpha- | |
| | galacturonidase | |
| | Glucan 1,4-beta- | Acts on 1,4-beta-D-glucans and related |
| | glucosidase | oligosaccharides Cellobiose is |
| | | hydrolysed, very slowly |
| | Cellulose 1,4-beta- | |
| | cellobiosidase | |
| | Alpha,alpha- | |
| | phosphotrehalase | |
| | ADP-sugar | Has a distinct specificity from the UDP- |
| | diphosphatase | sugar pyrophosphatase (EC 3.6.1.45) |
| | Nucleotide | Substrates include NAD(+), NADP(+), |
| | pyrophosphatase | FAD, CoA and also ATP and ADP |
| | UDP-glucuronate | |
| | decarboxylase | |
| | CDP-glucose 4,6- | |
| | dehydratase | |
| | CDP-abequose | |
| | epimerase | |
| | UDP-glucuronate 4- | |
| | epimerase | |
| | Glucose-6-phosphate | Also catalyses the anomerization of D- |
| | isomerase | glucose 6-phosphate |
| | Phosphoglucomutase | Maximum activity is only obtained in the |
| | | presence of alpha-D-glucose 1,6- |
| | | bisphosphate. This bisphosphate is an |
| | | intermediate in the reaction, being |
| | | formed by transfer of a phosphate residue |
| | | from the enzyme to the substrate, but the |
| | | dissociation of biphosphate from the |
| | | enzyme complex is much slower than the |
| | | overall isomerization Also, more slowly, |
| | | catalyses the interconversion of 1- |
| | | phosphate and 6-phosphate isomers of |
| | | many other alpha-D-hexoses, and the |
| | | interconversion of alpha-D-ribose 1- |
| | | phosphate and 5-phosphate |
| | Beta- | |
| | phosphoglucomutase | |
| | Maltose alpha-D- | |
| | glucosyltransferase | |
| Tryptophan metabolism | Indole-3-lactate | |
| | dehydrogenase | |
| | Indole-3-acetaldehyde | |
| | reductase (NADH) | |
| | Indole-3-acetaldehyde | |
| | reductase (NADPH) | |
| | 3-hydroxyacyl-CoA | Also oxidizes S-3-hydroxyacyl-N- |
| | dehydrogenase | acylthioethanolamine and S-3- |
| | | hydroxyacylhydrolipoate Some enzymes |
| | | act, more slowly, with NADP(+) Broad |
| | | specificity to acyl chain-length (c.f EC |
| | | 1.1.1.211) |
| | O-aminophenol oxidase | Isophenoxazine may be formed by a |
| | | secondary condensation from the initial |
| | | oxidation product |
| | Catalase | This enzyme can also act as a peroxidase |
| | | (EC 1.11.1.7) for which several organic |
| | | substances, especially ethanol, can act as |
| | | a hydrogen donor A manganese protein |
| | | containing Mn(III) in the resting state, |
| | | which also belongs here, is often called |
| | | pseudocatalase Enzymes from some |
| | | microorganisms, such as Penicillium |
| | | simplicissimum, which exhibit both |
| | | catalase and peroxidase activity, have |
| | | sometimes been referred to as catalase- |
| | | peroxidase |
| | 7,8- | |
| | dihydroxykynurenate | |
| | 8,8A-dioxygenase | |
| | Tryptophan 2,3- | Broad specificity towards tryptamine and |
| | dioxygenase | derivatives including D- and L- |
| | | tryptophan, 5-hydroxytryptophan and |
| | | serotonin |
| | Indole 2,3-dioxygenase | The enzyme from jasminum is a |
| | | flavoprotein containing copper, and |
| | | forms anthranilate as the final product |
| | | One enzyme from Tecoma stans is also a |
| | | flavoprotein containing copper and uses |
| | | three atoms of oxygen per molecule of |
| | | indole, to form anthranil (3,4- |
| | | benzisoxazole) A second enzyme from |
| | Glycogen (starch) | The recommended name varies according |
| | synthase | to the source of the enzyme and the |
| | | nature of its synthetic product Glycogen |
| | | synthase from animal tissues is a |
| | | complex of a catalytic subunit and the |
| | | protein glycogenin The enzyme requires |
| | | glucosylated glycogenin as a primer; this |
| | | is the reaction product of EC 2.4.1.186 A |
| | | similar enzyme utilizes ADP-glucose (Cf. |
| | | EC 2.4.1.21) |
| | Cellulose synthase | Involved in the synthesis of cellulose A |
| | (UDP-forming) | similar enzyme utilizes GDP-glucose (Cf. |
| | | EC 2.4.1.29) |
| | Sucrose synthase | |
| | Sucrose-phosphate | |
| | synthase | |
| | Alpha, alpha-trehalose- | See also EC 2.4.1.36 |
| | phosphate synthase | |
| | (UDP-forming) | |
| | UDP- | Family of enzymes accepting a wide |
| | glucuronosyltransferase | range of substrates, including phenols, |
| | | alcohols, amines and fatty acids Some of |
| | | the activities catalysed were previously |
| | | listed seperately as EC 2.4.1.42, EC |
| | | 2.4.1.59, EC 2.4.1.61, EC 2.4.1.76, EC |
| | | 2.4.1.77, EC 2.4.1.84, EC 2.4.1.107 and |
| | | EC 2.4.1.108 A temporary nomenclature |
| | | for the various forms whose delineation |
| | | is in a state of flux |
| | 1,4-alpha-glucan | Converts amylose into amylopectin The |
| | branching enzyme | recommended name requires a |
| | | qualification depending on the product, |
| | | glycogen or amylopectin, e.g. glycogen |
| | | branching enzyme, amylopectin |
| | | branching enzyme. The latter has |
| | | frequently been termed Q-enzyme |
| | Cellobiose | |
| | phosphorylase | |
| | Starch (bacterial | The recommended name various |
| | glycogen) synthase | according to the source of the enzyme |
| | | and the nature of its synthetic product, |
| | | e.g. starch synthase, bacterial glycogen |
| | | synthase A similar enzyme utilizes UDP- |
| | | glucose (Cf. EC 2.4.1.11) |
| | 4-alpha- | An enzymic activity of this nature forms |
| | glucanotransferase | part of the mammalian and Yeast |
| | | glycogen branching system (see EC |
| | | 3.2.1.33) |
| | Cellulose synthase | Involved in the synthesis of cellulose A |
| | (GDP-forming) | similar enzyme utilizes UDP-glucose (Cf. |
| | | EC 2.4.1.12) |
| | 1,3-beta-glucan | |
| | synthase | |
| | Phenol beta- | Acts on a wide range of phenols |
| | glucosyltransferase | |
| | Amylosucrase | |
| | Polygalacturonate 4- | |
| | alpha- | |
| | galacturonosyltransferase | |
| | Dextransucrase | |
| | Alpha,alpha-trehalose | |
| | phosphorylase | |
| | Sucrose phosphorylase | In the forward reaction, arsenate may |
| | | replace phosphate In the reverse reaction |
| | | various ketoses and L-arabinose may |
| | | replace D-fructose |
| | Maltose phosphorylase | |
| | 1,4-beta-D-xylan | |
| | synthase | |
| | Hexokinase | D-glucose, D-mannose, D-fructose, |
| | | sorbitol and D-glucosamine can act as |
| | | acceptors ITP and dATP can act as |
| | | donors The liver isoenzyme has |
| | | sometimes been called glucokinase |
| | Phosphoglucokinase | |
| | Glucose-1,6- | D-glucose 6-phosphate can act as |
| | biphosphate synthase | acceptor, forming D-glucose 1,6- |
| | | bisphosphate |
| | Glucokinase | A group of enzymes found in |
| | | invertebrates and microorganisms highly |
| | | specific for glucose |
| | Fructokinase | |
| | Glucose-1-phosphate | |
| | phosphodismutase | |
| | Protein-N(PI)- | Comprises a group of related enzymes |
| | phosphohistidine-sugar | The protein substrate is a phosphocarrier |
| | phosphotransferase | protein of low molecular mass (9.5 Kd) A |
| | | phosphoenzyme intermediate is formed |
| | | The enzyme translocates the sugar it |
| | | phosphorylates into bacteria Aldohexoses |
| | | and their glycosides and alditols are |
| | | phosphorylated on O-6; fructose and |
| | | sorbose on O-1 Glycerol and |
| | | disaccharides are also substrates |
| | Glucose-1-phosphate | |
| | adenylyltransferase | |
| | Glucose-1-phosphate | |
| | cytidylyltransferase | |
| | Glucose-1-phosphate | Also acts, more slowly, on D-mannose 1- |
| | guanylyltransferase | phosphate |
| | UTP--glucose-1- | |
| | phosphate | |
| | uridylyltransferase | |
| | Pectinesterase | |
| | Trehalose-phosphatase | |
| | Sucrose-phosphatase | |
| | Glucose-6-phosphatase | Wide distribution in animal tissues Also |
| | | catalyses potent transphosphorylations |
| | | from carbamoyl phosphate, hexose |
| | | phosphates, pyrophosphate, |
| | | phosphoenolpyruvate and nucleoside di- |
| | | and triphosphates, to D-glucose, D- |
| | | mannose, 3-methyl-D-glucose, or 2- |
| | | deoxy-D-glucose (cf. EC 2.7.1.62, EC |
| | | 2.7.1.79, and EC 3.9.1.1) |
| | Alpha-amylase | Acts on starch, glycogen and related |
| | | polysaccharides and oligosaccharides in a |
| | | random manner; reducing groups are |
| | | liberated in the alpha-configuration |
| | Oligo-1,6-glucosidase | Also hydrolyses palatinose The enzyme |
| | | from intestinal mucosa is a single |
| | | polypeptide chain also catalysing the |
| | | reaction of EC 3.2.1.48 |
| | Maltose-6[PRIME]- | Hydrolyses a variety of 6-phospho-D- |
| | phosphate glucosidase | glucosides, including maltose 6- |
| | | phosphate, alpha[PRIME]alpha-trehalose |
| | | 6-phosphate, sucrose 6-phosphate and p- |
| | | nitrophenyl-alpha-D-glucopyranoside 6- |
| | | phosphate (as a chromogenic substrate) |
| | | The enzyme is activated by Fe(II), |
| | | Mn(II), Co(II) and Ni(II). It is rapidly |
| | | inactivated in air |
| | Polygalacturonase | |
| | Beta-amylase | Acts on starch, glycogen and related |
| | | polysaccharides and oligosaccharides |
| | | producing beta-maltose by an inversion |
| | Alpha-glucosidase | Group of enzymes whose specificity is |
| | | directed mainly towards the |
| | | exohydrolysis of 1,4-alpha-glucosidic |
| | | linkages, and that hydrolyse |
| | | oligosaccharides rapidly, relative to |
| | | polysaccharides, which are hydrolysed |
| | | relatively slowly, or not at all The |
| | | intestinal enzyme also hydrolyses |
| | | polysaccharides, catalysing the reactions |
| | | of EC 3.2.1.3, and more slowly, |
| | | hydrolyses 1,6-alpha-D-glucose links |
| | Beta-glucosidase | Wide specificity for beta-D-glucosides. |
| | | Some examples also hydrolyse one or |
| | | more of the following: beta-D- |
| | | galactosides, alpha-L-arabinosides, beta- |
| | | D-xylosides, and beta-D-fucosides |
| | Beta-fructofuranosidase | Substrates include sucrose Also catalyses |
| | | fructotransferase reactions |
| | Alpha,alpha-trehalase | |
| | Glucan 1,4-alpha- | Most forms of the enzyme can rapidly |
| | glucosidase | hydrolyse 1,6-alpha-D-glucosidic bonds |
| | | when the next bond in sequence is 1,4, |
| | | and some preparations of this enzyme |
| | | hydrolyse 1,6-and 1,3-alpha-D- |
| | | glucosidic bonds in other polysaccharides |
| | | This entry covers all such enzymes acting |
| | | on polysaccharides more rapidly than on |
| | | oligosaccharides EC 3.2.1.20 from |
| | | mammalian intestine can catalyse similar |
| | | reactions |
| | Beta-glucuronidase | |
| | Amylo-1,6-glucosidase | In mammals and yeast this enzyme is |
| | | linked to a glycosyltransferase similar to |
| | | EC 2.4.1.25; together these two activities |
| | | constitute the glycogen debranching |
| | | system |
| | Xylan 1,4-beta- | Also hydrolyses xylobiose Some other |
| | xylosidase | exoglycosidase activities have been |
| | | found associated with this enzyme in |
| | | sheep liver |
| | Glucan endo-1,3-beta- | Very limited action on mixed-link (1,3- |
| | D-glucosidase | 1,4-)-beta-D-glucans Hydrolyses |
| | | laminarin, paramylon and pachyman |
| | | Different from EC 3.2.1.6 |
| | Cellulase | Will also hydrolyse 1,4-linkages in beta- |
| | | D-glucans also containing 1,3-linkages |
| | Sucrose alpha- | This enzyme is isolated from intestinal |
| | glucosidase | mucosa as a single polypeptide chain also |
| | | displaying activity towards isomaltose |
| | | (oligo-1,6-glucosidase, cf. EC 3.2.1.10) |
| | Cyclomaltodextrinase | Also hydrolyses linear maltodextrin |
| | Glucan 1,3-beta- | Acts on oligosaccharides but very slowly |
| | glucosidase | on laminaribiose |
| | Levanase | |
| | Galacturan 1,4-alpha- | |
| | galacturonidase | |
| | Glucan 1,4-beta- | Acts on 1,4-beta-D-glucans and related |
| | glucosidase | oligosaccharides Cellobiose is |
| | | hydrolysed, very slowly |
| | Cellulose 1,4-beta- | |
| | cellobiosidase | |
| | Alpha,alpha- | |
| | phosphotrehalase | |
| | ADP-sugar | Has a distinct specificity from the UDP- |
| | diphosphatase | sugar pyrophosphatase (EC 3.6.1.45) |
| | Nucleotide | Substrates include NAD(+), NADP(+), |
| | pyrophosphatase | FAD, CoA and also ATP and ADP |
| | UDP-glucuronate | |
| | decarboxylase | |
| | CDP-glucose 4,6- | |
| | dehydratase | |
| | CDP-abequose | |
| | epimerase | |
| | UDP-glucuronate 4- | |
| | epimerase | |
| | Glucose-6-phosphate | Also catalyses the anomerization of D- |
| | isomerase | glucose 6-phosphate |
| | Phosphoglucomutase | Maximum activity is only obtained in the |
| | | presence of alpha-D-glucose 1,6- |
| | | bisphosphate. This bisphosphate is an |
| | | intermediate in the reaction, being |
| | | formed by transfer of a phosphate residue |
| | | from the enzyme to the substrate, but the |
| | | dissociation of biphosphate from the |
| | | enzyme complex is much slower than the |
| | | overall isomerization Also, more slowly, |
| | | catalyses the interconversion of 1- |
| | | phosphate and 6-phosphate isomers of |
| | | many other alpha-D-hexoses, and the |
| | | interconversion of alpha-D-ribose 1- |
| | | phosphate and 5-phosphate |
| | Beta- | |
| | phosphoglucomutase | |
| | Maltose alpha-D- | |
| | glucosyltransferase | |
| Tryptophan metabolism | Indole-3-lactate | |
| | dehydrogenase | |
| | Indole-3-acetaldehyde | |
| | reductase (NADH) | |
| | Indole-3-acetaldehyde | |
| | reductase (NADPH) | |
| | 3-hydroxyacyl-CoA | Also oxidizes S-3-hydroxyacyl-N- |
| | dehydrogenase | acylthioethanolamine and S-3- |
| | | hydroxyacylhydrolipoate Some enzymes |
| | | act, more slowly, with NADP(+) Broad |
| | | specificity to acyl chain-length (c.f EC |
| | | 1.1.1.211) |
| | O-aminophenol oxidase | Isophenoxazine may be formed by a |
| | | secondary condensation from the initial |
| | | oxidation product |
| | Catalase | This enzyme can also act as a peroxidase |
| | | (EC 1.11.1.7) for which several organic |
| | | substances, especially ethanol, can act as |
| | | a hydrogen donor A manganese protein |
| | | containing Mn(III) in the resting state, |
| | | which also belongs here, is often called |
| | | pseudocatalase Enzymes from some |
| | | microorganisms, such as Penicillium |
| | | simplicissimum, which exhibit both |
| | | catalase and peroxidase activity, have |
| | | sometimes been referred to as catalase- |
| | | peroxidase |
| | 7,8- | |
| | dihydroxykynurenate | |
| | 8,8A-dioxygenase | |
| | Tryptophan 2,3- | Broad specificity towards tryptamine and |
| | dioxygenase | derivatives including D- and L- |
| | | tryptophan, 5-hydroxytryptophan and |
| | | serotonin |
| | Indole 2,3-dioxygenase | The enzyme from jasminum is a |
| | | flavoprotein containing copper, and |
| | | forms anthranilate as the final product |
| | | One enzyme from Tecoma stans is also a |
| | | flavoprotein containing copper and uses |
| | | three atoms of oxygen per molecule of |
| | | indole, to form anthranil (3,4- |
| | | benzisoxazole) A second enzyme from |
| | | Tecoma stans, which is not a |
| | | flavoprotein, uses four atoms of oxygen |
| | | and forms anthranilate as the final |
| | | product |
| | 2,3-dihydroxyindole | |
| | 2,3-dioxygenase | |
| | Indoleamine-pyrrole | Acts on many substituted and |
| | 2,3-dioxygenase | unsubstituted indoleamines, including |
| | | melatonin Involved in the degradation of |
| | | melatonin |
| | 3-hydroxyanthranilate | Tha product of the reaction |
| | 3,4-dioxygenase | spontaneously rearrange to quinolinic |
| | | acid (quin) |
| | Tryptophan 2- | |
| | monooxygenase | |
| | Tryptophan 2[PRIME]- | Acts on a number of indolyl-3-alkane |
| | dioxygenase | derivatives, oxidizing the 3-side-chain in |
| | | the 2[PRIME]-position. Best substrates |
| | | are L-tryptophan and 5-hydroxy-L- |
| | | tryptophan |
| | Kynurenine 3- | |
| | monooxygenase | |
| | Unspecific | Acts on a wide range of substrates |
| | monooxygenase | including many xenobiotics, steroids, |
| | | fatty acids, vitamins and prostaglandins |
| | | Reactions catalysed include |
| | | hydroxylation, epoxidation, N-oxidation, |
| | | sulfooxidation, N-, S- and O- |
| | | dealkylations, desulfation, deamination, |
| | | and reduction of azo, nitro, and N-oxide |
| | | groups |
| | Anthranilate 3- | |
| | monooxygenase | |
| | Tryptophan 5- | Activated by phosphorylation, catalysed |
| | monooxygenase | by a CA(2+)-activated protein kinase |
| | Kynurenine 7,8- | |
| | hydroxylase | |
| | Aldehyde | Wide specificity, including oxidation of |
| | dehydrogenase (NAD+) | D-glucuronolactone to D-glucarate |
| | Aminomuconate- | Also acts on 2-hydroxymuconate |
| | semialdehyde | semialdehyde |
| | dehydrogenase | |
| | Aldehyde oxidase | Also oxidizes quinoline and pyridine |
| | | derivatives May be identical with EC |
| | | 1.1.3.22 |
| | Indole-3-acetaldehyde | Also oxidizes indole-3-aldehyde and |
| | oxidase | acetaldehyde, more slowly |
| | Oxoglutarate | Component of the multienzyme 2- |
| | dehydrogenase | oxoglutarate dehydrogenase complex |
| | (lipoamide) | |
| | Kynurenate-7,8- | |
| | dihydrodiol | |
| | dehydrogenase | |
| | Glutaryl-CoA | |
| | dehydrogenase | |
| | L-amino acid oxidase | |
| | Amine oxidase (flavin- | Acts on primary amines, and usually also |
| | containing) | on secondary and tertiary amines |
| | Amine oxidase (copper- | A group of enzymes including those |
| | containing) | oxidizing primary amines, diamines and |
| | | histamine One form of EC 1.3.1.15 from |
| | | rat kidney also catalyses this reaction |
| | Acetylindoxyl oxidase | |
| | Acetylserotonin O- | Some other hydroxyindoles also act as |
| | methyltransferase | acceptor, more slowly |
| | Indole-3-pyruvate C- | |
| | methyltransferase | |
| | Amine N- | A wide range of primary, secondary, and |
| | methyltransferase | tertiary amines can act as acceptors, |
| | | including tryptamine, aniline, nicotine |
| | | and a variety of drugs and other |
| | | xenobiotics |
| | Aralkylamine N- | Narrow specificity towards |
| | acetyltransferase | aralkylamines, including serotonin Not |
| | | identical with EC 2.3.1.5 |
| | Acetyl-CoA C- | |
| | acetyltransferase | |
| | Tryptophan | Also acts on 5-hydroxytryptophan and, to |
| | aminotransferase | a lesser extent on the phenyl amino acids |
| | Kynurenine-- | Also acts on 3-hydroxykynurenine |
| | oxoglutarate | |
| | aminotransferase | |
| | Thioglucosidase | Has a wide specificity for thioglycosides |
| | Amidase | |
| | Formamidase | Also acts, more slowly, on acetamide, |
| | | propanamide and butanamide |
| | Arylformamidase | Also acts on other aromatic |
| | | formylamines |
| | Nitrilase | Acts on a wide range of aromatic nitriles |
| | | including (indole-3-yl)-acetonitrile and |
| | | also on some aliphatic nitriles, and on the |
| | | corresponding acid amides (cf. EC |
| | | 4.2.1.84) |
| | Kynureninase | Also acts on 3[PRIME]- |
| | | hydroxykynurenine and some other (3- |
| | | arylcarbonyl)-alanines |
| | Aromatic-L-amino-acid | Also acts on L-tryptophan, 5-hydroxy-L- |
| | decarboxylase | tryptophan and dihydroxy-L- |
| | | phenylalanine (DOPA) |
| | Phenylpyruvate | Also acts on indole-3-pyruvate |
| | decarboxylase | |
| | Aminocarboxymuconat | The product rearranges non-enzymically |
| | e-semialdehyde | to picolinate |
| | decarboxylase | |
| | Tryptophanase | Also catalyses the synthesis of |
| | | tryptophan from indole and serine Also |
| | | catalyses 2,3-elimination and beta- |
| | | replacement reactions of some indole- |
| | | substituted tryptophan analogs of L- |
| | | cysteine, L-serine and other 3-substituted |
| | | amino acids |
| | Enoyl-CoA hydratase | Acts in the reverse direction With cis- |
| | | compounds, yields (3R)-3-hydroxyacyl- |
| | | CoA (cf. EC 4.2.1.74) |
| | Nitrile hydratase | Acts on short-chain aliphatic nitriles, |
| | | converting them into the corresponding |
| | | acid amides Does not act on these amides |
| | | or on aromatic nitriles (cf EC 3.5.5.1) |
| | Tryptophan--tRNA | |
| | ligase | |
| Tyrosine metabolism | Alcohol dehydrogenase | Acts on primary or secondary alcohols or |
| | | hemiacetals The animal, but not the |
| | | yeast, enzyme acts also on cyclic |
| | | secondary alcohols |
| | (R)-4- | Also acts, more slowly, on (R)-3- |
| | hydroxyphenyllactate | phenyllactate, (R)-3-(indole-3-yl)lactate |
| | dehydrogenase | and (R)-lactate |
| | Hydroxyphenylpyruvat | Also acts on 3-(3,4- |
| | e reductase | dihydroxyphenyl)lactate Involved with |
| | | EC 2.3.1.140 in the biosynthesis of |
| | | rosmarinic acid |
| | Aryl-alcohol | A group of enzymes with broad |
| | dehydrogenase | specificity towards primary alcohols with |
| | | an aromatic or cyclohex-l-ene ring, but |
| | | with low or no activity towards short- |
| | | chain aliphatic alcohols |
| | Catechol oxidase | Also acts on a variety of substituted |
| | | catechols Many of these enzymes also |
| | | catalyse the reaction listed under EC |
| | | 1.14.18.1; this is especially true for the |
| | | classical tyrosinase |
| | Iodide peroxidase | |
| | 3,4- | |
| | dihydroxyphenylacetate | |
| | 2,3-dioxygenase | |
| | 4- | |
| | hydroxyphenylpyruvate | |
| | dioxygenase | |
| | Stizolobate synthase | The intermediate product undergoes ring |
| | | closure and oxidation, with NAD(P)(+) |
| | | as acceptor, to stizolobic acid |
| | Stizolobinate synthase | The intermediate product undergoes ring |
| | | closure and oxidation, with NAD(P)(+) |
| | | as acceptor, to stizolobinic acid |
| | Gentisate 1,2- | |
| | dioxygenase | |
| | Homogentisate 1,2- | |
| | dioxygenase | |
| | 4-hydroxyphenylacetate | Also acts on 4-hydroxyhydratropate |
| | 1-monooxygenase | forming 2-methylhomogentisate and on |
| | | 4-hydroxyphenoxyacetate forming |
| | | hydroquinone and glycolate |
| | 4-hydroxyphenylacetate | |
| | 3-monooxygenase | |
| | Tyrosine N- | |
| | monooxygenase | |
| | Hydroxyphenylacetonitrile | |
| | 2-monooxygenase | |
| | Tyrosine 3- | Activated by phosphorylation, catalysed |
| | monooxygenase | by EC 2.7.1.128 |
| | Dopamine-beta- | Stimulated by fumarate |
| | monooxygenase | |
| | Monophenol | A group of copper proteins that also |
| | monooxygenase | catalyse the reaction of EC 1.10.3.1, if |
| | | only 1,2-benzenediols are available as |
| | | substrate |
| | Succinate- | |
| | semialdehyde | |
| | dehydrogenase | |
| | (NAD(P)+) | |
| | Aryl-aldehyde | Oxidizes a number of aromatic |
| | dehydrogenase | aldehydes, but not aliphatic aldehydes |
| | Aldehyde | Wide specificity, including oxidation of |
| | dehydrogenase (NAD+) | D-glucuronolactone to D-glucarate |
| | 4-carboxy-2- | Does not act on unsubstituted aliphatic or |
| | hydroxymuconate-6- | aromatic aldehydes or glucose NAD(+) |
| | semialdehyde | can replace NADP(+), but with lower |
| | dehydrogenase | affinity |
| | Aldehyde | |
| | dehydrogenase | |
| | (NAD(P)+) | |
| | 4- | With EC 4.2.1.87, brings about the |
| | hydroxyphenylacetalde | metabolism of octopamine in |
| | hyde dehydrogenase | Pseudomonas |
| | Aldehyde | Also oxidizes quinoline and pyridine |
| | | derivatives May be identical with EC |
| | | 1.1.3.22 |
| | L-amino acid oxidase | |
| | Amine oxidase (flavin- | Acts on primary amines, and usually also |
| | containing) | on secondary and tertiary amines |
| | Amine oxidase (copper- | A group of enzymes including those |
| | containing) | oxidizing primary amines, diamines and |
| | | histamine One form of EC 1.3.1.15 from |
| | | rat kidney also catalyses this reaction |
| | Aralkylamine | Phenazine methosulfate can act as |
| | dehydrogenase | acceptor Acts on aromatic amines and, |
| | | more slowly, on some long-chain |
| | | aliphatic amines, but not on methylamine |
| | | or ethylamine (cf EC 1.4.99.3) |
| | Phenol O- | Acts on a wide variety of simple alkyl-, |
| | methyltransferase | methoxy-and halo-phenols |
| | Tyramine N- | Has some activity on phenylethylamine |
| | methyltransferase | analogs |
| | Phenylethanolamine N- | Acts on various phenylethanolamines; |
| | methyltransferase | converts noradrenalin into adrenalin |
| | Catechol O- | The mammalian enzymes act more |
| | methyltransferase | rapidly on catecholamines such as |
| | | adrenaline or noradrenaline than on |
| | | catechols |
| | Glutamine N- | |
| | phenylacetyltransferase | |
| | Rosmarinate synthase | Involved with EC 1.1.1.237 in the |
| | | biosynthesis of rosmarinic acid |
| | Hydroxymandelonitrile | 3,4-dihydroxymandelonitrile can also act |
| | glucosyltransferase | as acceptor |
| | Aspartate | Also acts on L-tyrosine, L-phenylalanine |
| | aminotransferase | and L-tryptophan. This activity can be |
| | | formed from EC 2.6.1.57 by controlled |
| | | proteolysis |
| | Dihydroxyphenylalanin | |
| | e aminotransferase | |
| | Tyrosine | L-phenylalanine can act instead of L- |
| | aminotransferase | tyrosine The mitochondrial enzyme may |
| | | be identical with EC 2.6.1.1 The three |
| | | isoenzymic forms are interconverted by |
| | | EC 3.4.22.4 |
| | Aromatic amino acid | L-methionine can also act as donor, more |
| | transferase | slowly Oxaloacetate can act as acceptor |
| | | Controlled proteolysis converts the |
| | | enzyme to EC 2.6.1.1 |
| | Histidinol-phosphate | |
| | aminotransferase | |
| | Fumarylacetoacetase | Also acts on other 3,5- and 2,4-dioxo |
| | | acids |
| | Acylpyruvate hydrolase | Acts on formylpyruvate, 2,4- |
| | | dioxopentanoate, 2,4-dioxohexanoate and |
| | | 2,4-dioxoheptanoate |
| | Tyrosine decarboxylase | The bacterial enzyme also acts on 3- |
| | | hydroxytyrosine and, more slowly, on 3- |
| | | hydroxyphenylalanine |
| | Aromatic-L-amino-acid | Also acts on L-tryptophan, 5-hydroxy-L- |
| | decarboxylase | tryptophan and dihydroxy-L- |
| | | phenylalanine (DOPA) |
| | Gentisate | |
| | decarboxylase | |
| | 5-oxopent-3-ene-1,2,5- | |
| | tricarboxylate | |
| | decarboxylase | |
| | Tyrosine phenol-lyase | Also slowly catalyses pyruvate formation |
| | | from D-tyrosine, S-methyl-L-cysteine, |
| | | L-cysteine, L-serine and D-serine |
| | (S)-norcoclaurine | The reaction makes a 6-membered ring |
| | synthase | by forming a bond between C-6 of the |
| | | 3,4-dihydroxyphenyl group of the |
| | | dopamine and C-1 of the aldehyde in the |
| | | imine formed between the substrates The |
| | | product is the precursor of the |
| | | benzylisoquinoline alkaloids in plants |
| | | Will also catalyse the reaction of 4-(2- |
| | | aminoethyl)benzene-1,2-diol + (3,4- |
| | | dihydroxyphenyl)acetaldehyde to form |
| | | (S)-norlaudanosoline, but this alkaloid |
| | | has not been found to occur in plants |
| | Dihydroxyphenylalanin | |
| | e ammonia-lyase | |
| | Phenylalanine | May also act on L-tyrosine |
| | ammonia-lyase | |
| | Maleylacetoacetate | Also acts on maleylpyruvate |
| | isomerase | |
| | Maleylpyruvate | |
| | isomerase | |
| | Phenylpyruvate | Also acts on other arylpyruvates |
| | tautomerase | |
| | 5-carboxymethyl-2- | |
| | hydroxymuconate | |
| | delta-isomerase | |
| | Tyrosine 2,3- | |
| | aminomutase | |
| | Phenylacetate--CoA | Also acts, more slowly, on acetate, |
| | ligase | propanoate and butanoate, but not on |
| | | hydroxy derivatives of phenylacetate and |
| | | related compounds |

### VII. PROMOTERS AS SENTINELS

[0630] Useful promoters include those that are capable of facilitating preferential transcription, i.e. tissue-specific or developmentally regulated gene expression and being a component of facile systems to evaluate the metabolic/physiological state of a plant cell, tissue or organ. Many such promoters are included in this application. Operably linking a sequence to these promoters that can act as a reporter and inserting the construct into a plant allows detection of the preferential in plantar transcription. For example, the quantitative state of responses to environmental conditions can be detected by using a plant having a construct that contains a stress-inducible promoter linked to and controlling expression of a sequence encoding GFP. The greater the stress promoter is induced, the greater the levels of fluorescence from GFP will be produced and this provides a measure of the level of stress being expressed by the plant and/or the ability of the plant to respond internally to the stress.

[0631] More specifically, using this system the activities of any metabolic pathway (catabolic and anabolic), stress-related pathways as on any plant gene repeated activity can be monitored. In addition, assays can be developed using this sentinel system to select for superior genotypes with greater yield characteristics or to select for plants with altered responses to chemical, herbicide, or plant growth regulators or to identify chemical, herbicides or plant growth regulators by their response on such sentinels.

[0632] Specifically, a promoter that is regulated in plants in the desired way, is operably linked to a reporter such as GFP, RFP, etc., and the constructs are introduced into the plant of interest. The behavior of the reporter is monitored using technologies typically specific for that reporter. With GFP, RFP, etc., it could typically be by microscopy of whole plants, organs, tissues or cells under excitation by an appropriate wavelength of UV light.

### VIII. HOW TO MAKE DIFFERENT EMBODIMENTS OF THE INVENTION

[0633] The invention relates to (I) polynucleotides and methods of use thereof, such as

[0634] IA. Probes, Primers and Substrates;

[0635] IB. Methods of Detection and Isolation;
[0636] B.1. Hybridization;
[0637] B.2. Methods of Mapping;
[0638] B.3. Southern Blotting;
[0639] B.4. Isolating cDNA from Related Organisms;
[0640] B.5. Isolating and/or Identifying Orthologous Genes

[0641] IC. Methods of Inhibiting Gene Expression
[0642] C.1. Antisense
[0643] C.2. Ribozyme Constructs;
[0644] C.3. Chimeraplasts;
[0645] C.4 Co-Suppression;
[0646] C.5. Transcriptional Silencing
[0647] C.6. Other Methods to Inhibit Gene Expression

[0648] ID. Methods of Functional Analysis;

[0649] IE. Promoter Sequences and Their Use;

[0650] IF. UTRs and/or Intron Sequences and Their Use; and

[0651] IG. Coding Sequences and Their Use.

[0652] The invention also relates to (II) polypeptides and proteins and methods of use thereof, such as

[0653] IIA. Native Polypeptides and Proteins
[0654] A.1 Antibodies
[0655] A.2 In Vitro Applications

[0656] IIB. Polypeptide Variants, Fragments and Fusions
[0657] B.1 Variants
[0658] B.2 Fragments
[0659] B.3 Fusions

[0660] The invention also includes (III) methods of modulating polypeptide production, such as

[0661] IIIA. Suppression
[0662] A.1 Antisense
[0663] A.2 Ribozymes
[0664] A.3 Co-suppression
[0665] A.4 Insertion of Sequences into the Gene to be Modulated
[0666] A.5 Promoter Modulation
[0667] A.6 Expression of Genes containing Dominant-Negative Mutations

[0668] IIIB. Enhanced Expression
[0669] B.1 Insertion of an Exogenous Gene
[0670] B.2 Promoter Modulation

[0671] The invention further concerns (IV) gene constructs and vector construction, such as

[0672] IVA. Coding Sequences

[0673] IVB. Promoters

[0674] IVC. Signal Peptides

[0675] The invention still further relates to

[0676] V. Transformation Techniques

I. Polynucleotides

[0677] Exemplified SDFs of the invention represent fragments of the genome of corn, wheat, rice, soybean or Arabidopsis and/or represent mRNA expressed from that genome. The isolated nucleic acid of the invention also encompasses corresponding fragments of the genome and/or cDNA complement of other organisms as described in detail below.

[0678] Polynucleotides of the invention are isolated from polynucleotide libraries using primers comprising sequences similar to those described, in the attached Reference and Sequences Tables or complements thereof. See, for example, the methods described in Sambrook et al., supra.

[0679] Alternatively, the polynucleotides of the invention can be produced by chemical synthesis. Such synthesis methods are described below.

[0680] It is contemplated that the nucleotide sequences presented herein contain some small percentage of errors. These errors arise in the normal course of determination of nucleotide sequences. Sequence errors can be corrected by obtaining seeds deposited under the accession numbers cited above, propagating them, isolating genomic DNA or appropriate mRNA from the resulting plants or seeds thereof, amplifying the relevant fragment of the genomic DNA or mRNA using primers having a sequence that flanks the erroneous sequence and sequencing the amplification product.

[0681] I.A. Probes, Primers and Substrates

[0682] SDFs of the invention can be applied to substrates for use in array applications such as, but not limited to, assays of global gene expression, under varying conditions of development, and growth conditions. The arrays are also used in diagnostic or forensic methods (WO95/35505, U.S. Pat. No. 5,445,943 and U.S. Pat. No. 5,410,270).

[0683] Probes and primers of the instant invention hybridize to a polynucleotide comprising a sequence in or encoded by those in the Reference and Sequence Tables or fragments or complements thereof. Though many different nucleotide sequences can encode an amino acid sequence, the sequences of the Reference and Sequence Table are generally preferred for encoding polypeptides of the invention. However, the sequence of the probes and/or primers of the instant invention need not be identical to those in the Reference and Sequence Tables or the complements thereof. For example, some variation in probe or primer sequence and/or length allows detection of additional family members as well as orthologous genes and more taxonomically distant related sequences. Similarly, probes and/or primers of the invention include additional nucleotides that serve as a label for detecting the formed duplex or for subsequent cloning purposes.

[0684] Probe length varys depending on the application. For use as primers, probes are 12-40 nucleotides, preferably 18-30 nucleotides long. For use in mapping, probes are preferably 50 to 500 nucleotides, preferably 100-250 nucleotides long. For Southern hybridizations, probes as long as several kilobases are used as explained below.

[0685] The probes and/or primers are produced by synthetic procedures such as the triester method of Matteucci et al. J. Am. Chem. Soc. 103:3185(1981) or according to Urdea et al. Proc. Natl. Acad. 80:7461 (1981) or using commercially available automated oligonucleotide synthesizers.

[0686] I.B. Methods of Detection and Isolation

[0687] The polynucleotides of the invention can be utilized in a number of methods known to those skilled in the art as probes and/or primers to isolate and detect polynucleotides including, without limitation: Southerns, Northems, Branched DNA hybridization assays, polymerase chain reaction microarray assays and variations thereof. Specific methods given by way of examples, and discussed below include:

[0688] Hybridization

[0689] Methods of Mapping

[0690] Southern Blotting

[0691] Isolating cDNA from Related Organisms

[0692] Isolating and/or Identifying Orthologous Genes.

[0693] Also, the nucleic acid molecules of the invention can used in other methods, such as high density oligonucleotide hybridizing assays, described, for example, in U.S. Pat. Nos. 6,004,753; 5,945,306; 5,945,287; 5,945,308; 5,919,686; 5,919,661; 5,919,627; 5,874,248; 5,871,973; 5,871,971; 5,871,930; and PCT Pub. Nos. WO 9946380; WO 9933981; WO 9933870; WO 9931252; WO 9915658; WO 9906572; WO 9858052; WO 9958672; and WO 9810858.

[0694] B.1. Hybridization

[0695] The isolated SDFs of the Reference and Sequence tables or fragments thereof of the present invention can be used as probes and/or primers for detection and/or isolation of related polynucleotide sequences through hybridization. Hybridization of one nucleic acid to another constitutes a physical property that defines the subject SDF of the invention and the identified related sequences. Also, such hybridization imposes structural limitations on the pair. A good general discussion of the factors for determining hybridization conditions is provided by Sambrook et al. (“Molecular Cloning, a Laboratory Manual, 2nd ed., c. 1989 by Cold Spring Harbor Laboratory Press, Cold Spring Harbor, N.Y.; see esp., chapters 11 and 12). Additional considerations and details of the physical chemistry of hybridization are provided by G. H. Keller and M. M. Manak “DNA Probes”, 2^{nd} Ed. pp. 1-25, c. 1993 by Stockton Press, New York, N.Y.

[0696] Depending on the stringency of the conditions under which these probes and/or primers are used, polynucleotides exhibiting a wide range of similarity to those in the Reference and Sequence or fragments thereof are detected or isolated. When the practitioner wishes to examine the result of membrane hybridizations under a variety of stringencies, an efficient way to do so is to perform the hybridization under a low stringency condition, then to wash the hybridization membrane under increasingly stringent conditions.

[0697] When using SDFs to identify orthologous genes in other species, the practitioner will preferably adjust the amount of target DNA of each species so that, as nearly as is practical, the same number of genome equivalents are present for each species examined. This prevents faint signals from species having large genomes, and thus small numbers of genome equivalents per mass of DNA, from erroneously being interpreted as absence of the corresponding gene in the genome.

[0698] The probes and/or primers of the instant invention can also be used to detect or isolate nucleotides that are “identical” to the probes or primers. Two nucleic acid sequences or polypeptides are said to be “identical” if the sequence of nucleotides or amino acid residues, respectively, in the two sequences is the same when aligned for maximum correspondence as described below.

[0699] Isolated polynucleotides within the scope of the invention also include allelic variants of the specific sequences presented in the Reference and Sequence tables. The probes and/or primers of the invention are also used to detect and/or isolate polynucleotides exhibiting at least 80% sequence identity with the sequences of the Reference and Sequence tables or fragments thereof.

[0700] With respect to nucleotide sequences, degeneracy of the genetic code provides the possibility to substitute at least one nucleotide of the nucleotide sequence of a gene with a different nucleotide without changing the amino acid sequence of the polypeptide. Hence, the DNA of the present invention also has any base sequence that has been changed from a sequence in the Reference and Sequence tables by substitution in accordance with degeneracy of genetic code. References describing codon usage include: Carels et al., J. Mol. Evol. 46: 45 (1998) and Fennoy et al., Nucl. Acids Res. 21(23): 5294 (1993).

[0701] B.2. Mapping

[0702] The isolated SDF DNA of the invention is used to create various types of genetic and physical maps of the genome of corn, Arabidopsis, soybean, rice, wheat, or other plants. Some SDFs are absolutely associated with particular phenotypic traits, allowing construction of gross genetic maps. While not all SDFs are immediately associated with a phenotype, all SDFs can be used as probes for identifying polymorphisms associated with phenotypes of interest. Briefly, one method of mapping involves total DNA isolation from individuals. The DNA is subsequently cleaved with one or more restriction enzymes, separated according to mass, transferred to a solid support, hybridized with SDF DNA and the pattern of fragments compared. Polymorphisms associated with a particular SDF are visualized as differences in the size of fragments produced between individual DNA samples after digestion with a particular restriction enzyme and hybridization with the SDF. After identification of polymorphic SDF sequences, linkage studies are conducted. By using the polymeric individuals as parents in crossing programs, F2 progeny recombinants or recombinant inbreds, for example, are then analyzed. The order of DNA polymorphisms along the chromosomes is determined based on the frequency with which they are inherited together versus independently. The closer the location of two polymorphisms on a chromosome, the higher the probability that they are inherited together. Integration of the relative positions of all the polymorphisms and associated marker SDFs produce a genetic map of the species where the distances between markers reflect the recombination frequencies in that chromosome segment.

[0703] The use of recombinant inbred lines for such genetic mapping is described for Arabidopsis by Alonso-Blanco et al. (Methods in Molecular Biology, vol. 82, “Arabidopsis Protocols”, pp. 137-146, J. M. Martinez-Zapater and J. Salinas, eds., c. 1998 by Humana Press, Totowa, N.J.) and for corn by Burr (“Mapping Genes with Recombinant Inbreds”, pp. 249-254. In Freeling, M. and V. Walbot (Ed.), The Maize Handbook, c. 1994 by Springer-Verlag New York, Inc.: New York, N.Y., USA; Berlin Germany; Burr et al. Genetics (1998) 118: 519; Gardiner, J. et al., (1993) Genetics 134: 917). This procedure, however, is not limited to plants and is used for other organisms (such as yeast) or for individual cells.

[0704] The SDFs of the present invention are also used for simple sequence repeat (SSR) mapping. Rice SSR mapping is described by Morgante et al. (The Plant Journal (1993) 3: 165), Panaud et al. (Genome (1995) 38: 1170); Senior et al. (Crop Science (1996) 36: 1676), Taramino et al. (Genome (1996) 39: 277) and Ahn et al. (Molecular and General Genetics (1993) 241: 483-90). SSR mapping is achieved using various methods. In one instance, polymorphisms are identified when sequence specific probes contained within an SDF flanking an SSR are made and used in polymerase chain reaction (PCR) assays with template DNA from two or more individuals of interest. Here, a change in the number of tandem repeats between the SSR-flanking sequences produces differently sized fragments (U.S. Pat. No. 5,766,847). Alternatively, polymorphisms are identified by using the PCR fragment produced from the SSR-flanking sequence specific primer reaction as a probe against Southern blots representing different individuals (U. H. Refseth et al., (1997) Electrophoresis 18: 1519).

[0705] Genetic and physical maps of crop species have many uses. For example, these maps are used to devise positional cloning strategies for isolating novel genes from the mapped crop species. In addition, because the genomes of closely related species are largely syntenic (i.e. they display the same ordering of genes within the genome), these maps are used to isolate novel alleles from relatives of crop species by positional cloning strategies.

[0706] The various types of maps discussed above are used with the SDFs of the invention to identify Quantitative Trait Loci (QTLs). Many important crop traits, such as the solids content of tomatoes, are quantitative traits and result from the combined interactions of several genes. These genes reside at different loci in the genome, often times on different chromosomes, and generally exhibit multiple alleles at each locus. The SDFs of the invention are used to identify QTLs and isolate specific alleles as described by de Vicente and Tanksley (Genetics 134:585 (1993)). In addition to isolating QTL alleles in present crop species, the SDFs of the invention are also used to isolate alleles from the corresponding QTL of wild relatives. Transgenic plants having various combinations of QTL alleles are then created and the effects of the combinations measured. Once a desired allele combination is identified, crop improvement is accomplished either through biotechnological means or by directed conventional breeding programs (for review see Tanksley and McCouch, Science 277:1063 (1997)).

[0707] In another embodiment, the SDFs are used to help create physical maps of the genome of corn, Arabidopsis and related species. Where SDFs are ordered on a genetic map, as described above, they are used as probes to discover which clones in large libraries of plant DNA fragments in YACs, BACs, etc. contain the same SDF or similar sequences, thereby facilitating the assignment of the large DNA fragments to chromosomal positions. Subsequently, the large BACs, YACs, etc. are ordered unambiguously by more detailed studies of their sequence composition (e.g. Marra et al. (1997) Genomic Research 7:1072-1084) and by using their end or other sequences to find the identical sequences in other cloned DNA fragments. The overlapping of DNA sequences in this way allows building large contigs of plant sequences to be built that, when sufficiently extended, provide a complete physical map of a chromosome. Sometimes the SDFs themselves provide the means of joining cloned sequences into a contig. All scientific and patent publications cited in this paragraph are hereby incorporated by reference.

[0708] The patent publication WO95/35505 and U.S. Pat. Nos. 5,445,943 and 5,410,270, both hereby incorporated by reference, describe scanning multiple alleles of a plurality of loci using hybridization to arrays of oligonucleotides. These techniques are useful for each of the types of mapping discussed above.

[0709] Following the procedures described above and using a plurality of the SDFs of the present invention, any individual is genotyped. These individual genotypes are used for the identification of particular cultivars, varieties, lines, ecotypes and genetically modified plants or can serve as tools for subsequent genetic studies involving multiple phenotypic traits.

[0710] B.3 Southern Blot Hybridization

[0711] The sequences from Reference and Sequence tables or fragments thereof can be used as probes for various hybridization techniques. These techniques are useful for detecting target polynucleotides in a sample or for determining whether transgenic plants, seeds or host cells harbor a gene or sequence of interest and thus are expected to exhibit a particular trait or phenotype.

[0712] In addition, the SDFs from the invention are used to isolate additional members of gene families from the same or different species and/or orthologous genes from the same or different species. This is accomplished by hybridizing an SDF to, for example, a Southern blot containing the appropriate genomic DNA or cDNA. Given the resulting hybridization data, one of ordinary skill in the art distinguishes and isolates the correct DNA fragments by size, restriction sites, sequence and stated hybridization conditions from a gel or from a library.

[0713] Identification and isolation of orthologous genes from closely related species and alleles within a species is particularly desirable because of their potential for crop improvement. Many important crop traits, such as the solid content of tomatoes, result from the combined interactions of the products of several genes residing at different loci in the genome. Generally, alleles at each of these loci make quantitative differences to the trait. By identifying and isolating numerous alleles for each locus from within or different species, transgenic plants with various combinations of alleles are created and the effects of the combinations measured. Once a more favorable allele combination is identified, crop improvement is accomplished either through biotechnological means or by directed conventional breeding programs (Tanksley et al. Science 277:1063(1997)). All scientific and patent publications cited in this paragraph are hereby incorporated by reference.

[0714] The results from hybridizations of the SDFs of the invention to, for example, Southern blots containing DNA from another species are also used to generate restriction fragment maps for the corresponding genomic regions. These maps provide additional information about the relative positions of restriction sites within fragments, further distinguishing mapped DNA from the remainder of the genome.

[0715] Physical maps are made by digesting genomic DNA with different combinations of restriction enzymes.

[0716] Probes for Southern blotting to distinguish individual restriction fragments can range in size from 15 to 20 nucleotides to several thousand nucleotides. More preferably, the probe is 100 to 1,000 nucleotides long for identifying members of a gene family when it is found that repetitive sequences would complicate the hybridization. For identifying an entire corresponding gene in another species, the probe is more preferably the length of the gene, typically 2,000 to 10,000 nucleotides, but probes 50-1,000 nucleotides long are also used. Some genes, however, require probes up to 1,500 nucleotides long or overlapping probes constituting the full-length sequence to span their lengths.

[0717] Also, while it is preferred that the probe be homogeneous with respect to its sequence, it is not necessary. For example, as described below, a probe representing members of a gene family having diverse sequences is generated using PCR to amplify genomic DNA or RNA templates using primers derived from SDFs that include sequences that define the gene family.

[0718] For identifying corresponding genes in another species, the next most preferable probe is a cDNA spanning the entire coding sequence, which allows all of the mRNA-coding fragment of the gene to be identified. Probes for Southern blotting are easily generated from SDFs by making primers having the sequence at the ends of the SDF and using corn or Arabidopsis genomic DNA as a template. In instances where the SDF includes sequence conserved among species, primers including the conserved sequence are used for PCR with genomic DNA from a species of interest to obtain a probe.

[0719] Similarly, if the SDF includes a domain of interest, that fragment of the SDF is used to make primers and, with appropriate template DNA, used to make a probe to identify genes containing the domain. Alternatively, the PCR products are resolved, for example by gel electrophoresis and cloned and/or sequenced. Using Southern hybridization, the variants of the domain among members of a gene family, both within and across species, are examined.

[0720] B.4.1 Isolating DNA from Related Organisms

[0721] The SDFs of the invention are used to isolate the corresponding DNA from other organisms. Either cDNA or genomic DNA is isolated. For isolating genomic DNA, a lambda, cosmid, BAC, YAC, or other large insert genomic library from the plant of interest is constructed using standard molecular biology techniques as described in detail by Sambrook et al. 1989 (Molecular Cloning: A Laboratory Manual, 2^{nd} ed. Cold Spring Harbor Laboratory Press, New York) and by Ausubel et al. 1992 (Current Protocols in Molecular Biology, Greene Publishing, New York).

[0722] To screen a phage library, for example, recombinant lambda clones are plated out on appropriate bacterial medium using an appropriate E. Coli host strain. The resulting plaques are lifted from the plates using nylon or nitrocellulose filters. The plaque lifts are processed through denaturation, neutralization, and washing treatments following the standard protocols outlined by Ausubel et al. (1992). The plaque lifts are hybridized to either radioactively labeled or non-radioactively labeled SDF DNA at room temperature for about 16 hours, usually in the presence of 50% formamide and 5×SSC (sodium chloride and sodium citrate) buffer and blocking reagents. The plaque lifts are then washed at 42° C. with 1% Sodium Dodecyl Sulfate (SDS) and at a particular concentration of SSC. The SSC concentration used is dependent upon the stringency at which hybridization occurred in the initial Southern blot analysis performed. For example, if a fragment hybridized under medium stringency (e.g., Tm-20° C.), then this condition is maintained or preferably adjusted to a less stringent condition (e.g., Tm-30° C.) to wash the plaque lifts. Positive clones show detectable hybridization, e.g. by exposure to X-ray films or chromogen formation. The positive clones are then subsequently isolated for purification using the same general protocol outlined above. Once the clone is purified, restriction analysis is conducted to narrow the region corresponding to the gene of interest. The restriction analysis and succeeding subcloning steps are done using procedures described by, for example Sambrook et al. (1989) cited above.

[0723] The procedures outlined for the lambda library are essentially similar to those used for YAC library screening, except that the YAC clones are harbored in bacterial colonies. The YAC clones are plated out at reasonable density on nitrocellulose or nylon filters supported by appropriate bacterial medium in petri plates. Following the growth of the bacterial clones, the filters are processed through the denaturation, neutralization, and washing steps following the procedures of Ausubel et al. 1992. The same hybridization procedures for lambda library screening are followed.

[0724] To isolate cDNA, similar procedures using appropriately modified vectors are employed. For instance, the library is constructed in a lambda vector appropriate for cloning cDNA such as λgt11. Alternatively, the cDNA library is made in a plasmid vector. cDNA for cloning is prepared by any of the methods known in the art, but is preferably prepared as described above. Preferably, a cDNA library includes a high proportion of full-length clones.

[0725] B.5. Isolating and/or Identifying Orthologous Genes

[0726] Probes and primers of the invention are used to identify and/or isolate polynucleotides related to those in the Reference and Sequence tables. Related polynucleotides are those that are native to other plant organisms and exhibit either similar sequence or encode polypeptides with similar biological activity. One specific example is an orthologous gene. Orthologous genes have the same functional activity. As such, orthologous genes are distinguished from homologous genes. The percentage of identity is a function of evolutionary separation and, in closely related species, the percentage of identity can be 98% to 100%. The amino acid sequence of a protein encoded by an orthologous gene can be less than 75% identical, but tends to be at least 75% or at least 80% identical, more preferably at least 90%, most preferably at least 95% identical to the amino acid sequence of the reference protein.

[0727] To find orthologous genes, the probes are hybridized to nucleic acids from a species of interest under low stringency conditions, preferably one where sequences containing as much as 40-45% mismatches are able to hybridize. This condition is established by Tₘ-40° C. to Tm-48° C. (see below). Blots are then washed under conditions of increasing stringency. It is preferable that the wash stringency be such that sequences that are 85 to 100% identical will hybridize. More preferably, sequences 90 to 100% identical hybridize and most preferably only sequences greater than 95% identical hybridize. One of ordinary skill in the art will recognize that, due to degeneracy in the genetic code, amino acid sequences that are identical can be encoded by DNA sequences as little as 67% identity or less. Thus, it is preferable, for example, to make an overlapping series of shorter probes, on the order of 24 to 45 nucleotides, and individually hybridize them to the same arrayed library to avoid the problem of degeneracy introducing large numbers of mismatches.

[0728] As evolutionary divergence increases, genome sequences also tend to diverge. Thus, one of skill will recognize that searches for orthologous genes between more divergent species require the use of lower stringency conditions compared to searches between closely related species. Also, degeneracy of the genetic code is more of a problem for searches in the genome of a species more evolutionarily distant from the species that is the source of the SDF probe sequence(s).

[0729] Therefore the method described in Bouckaert et al., U.S. Ser. No. 60/121,700 Atty. Dkt. No. 2750-117P, Client Dkt. No. 00010.001, filed Feb. 25, 1999, hereby incorporated in its entirety by reference, is applied to the SDFs of the present invention to isolate related genes from plant species which do not hybridize to the corn, Arabidopsis, soybean, rice, wheat, and other plant sequences of the Reference and Sequence tables.

[0730] The SDFs of the invention are also used as probes to search for genes that are related to the SDF within a species. Such related genes are typically considered to be members of a gene family. In such a case, the sequence similarity is often concentrated into one or a few fragments of the sequence. The fragments of similar sequence that define the gene family typically encode a fragment of a protein or RNA that has an enzymatic or structural function. The percentage of identity in the amino acid sequence of the domain that defines the gene family is preferably at least 70%, more preferably at least 80 to 95%, most preferably at least 85 to 99%. To search for members of a gene family within a species, a low stringency hybridization is usually performed, but this will depend upon the size, distribution and degree of sequence divergence of domains that define the gene family. SDFs encompassing regulatory regions are used to identify coordinately expressed genes by using the regulatory region sequence of the SDF as a probe.

[0731] In the instances where the SDFs are identified as being expressed from genes that confer a particular phenotype, then the SDFs are also used as probes to assay plants of different species for those phenotypes.

[0732] I.C. Methods to Inhibit Gene Expression

[0733] The nucleic acid molecules of the present invention are used to inhibit gene transcription and/or translation. Example of such methods include, without limitation:

[0734] Antisense Constructs;

[0735] Ribozyme Constructs;

[0736] Chimeraplast Constructs;

[0737] Co-Suppression;

[0738] Transcriptional Silencing; and

[0739] Other Methods of Gene Expression.

[0740] C.1 Antisense

[0741] In some instances it is desirable to suppress expression of an endogenous or exogenous gene. A well-known instance is the FLAVOR-SAVOR™ tomato, in which the gene encoding ACC synthase is inactivated by an antisense approach, thus delaying softening of the fruit after ripening. See for example, U.S. Pat. No. 5,859,330; U.S. Pat. No. 5,723,766; Oeller, et al, Science, 254:437-439(1991); and Hamilton et al, Nature, 346:284-287 (1990). As another example, timing of flowering is controlled by suppression of the FLOWERING LOCUS C (FLC). High levels of this transcript are associated with late flowering, while absence of FLC is associated with early flowering (S. D. Michaels et al., Plant Cell 11:949 (1999). Other examples include the transition of apical meristem from leaf and shoot production to flowering which is regulated by TERMINAL FLOWER1, APETALA1 and LEAFY. Suppressing TFL1 expression induce a transition from shoot production to flowering (S. J. Liljegren, Plant Cell 11: 1007 (1999)). In yet another example, arrested ovule development and female sterility result from suppression of the ethylene forming enzyme, but can be reversed by application of ethylene (D. De Martinis et al., Plant Cell 11:1061 (1999)). The ability to manipulate female fertility of plants is useful in increasing fruit production and creating hybrids.

[0742] Some polynucleotide SDFs in the Reference and Sequence tables represent sequences that are expressed in corn,wheat, rice, soybean Arabidopsis and/or other plants. Thus the invention includes using these sequences to generate antisense constructs to inhibit translation and/or degradation of transcripts of said SDFs, typically in a plant cell.

[0743] To accomplish this, a polynucleotide segment from the desired gene that hybridizes to the mRNA expressed from the desired gene (the “antisense segment”) is operably linked to a promoter such that the antisense strand of RNA is transcribed when the construct is present in a host cell. A regulated promoter is used in the construct to control transcription of the antisense segment so that transcription occurs only under desired circumstances.

[0744] The antisense segment introduced is typically substantially identical to at least a fragment of the endogenous gene or genes to be repressed. The sequence, however, need not be perfectly identical to inhibit expression. Further, the antisense product may hybridize to the untranslated region instead of or in addition to the coding sequence of the gene. The vectors of the present invention designed such that the inhibitory effect applies to other proteins within a family of genes exhibiting homology or substantial homology to the target gene.

[0745] For antisense suppression, the introduced antisense segment sequence also need not be full length relative to either the primary transcription product or the fully processed mRNA. Generally, a higher percentage of sequence identity is used to compensate for the use of a shorter sequence. Furthermore, the introduced sequence need not have the same intron or exon pattern, and homology of non-coding segments are equally effective. Normally, a sequence of between about 30 or 40 nucleotides and the full length of the transcript can be used, although a sequence of at least about 100 nucleotides is preferred, a sequence of at least about 200 nucleotides is more preferred, and a sequence of at least about 500 nucleotides is especially preferred.

[0746] C.2. Ribozymes

[0747] It is also contemplated that gene constructs representing ribozymes and based on the SDFs in the Reference and Sequence tables tables and fragment thereof are an object of the invention. Ribozymes are also used to inhibit expression of genes by suppressing the translation of the mRNA into a polypeptide. It is possible to design ribozymes that specifically pair with virtually any target RNA and cleave the phosphodiester backbone at a specific location, thereby functionally inactivating the target RNA. In carrying out this cleavage, the ribozyme is not itself altered, and is thus capable of recycling and cleaving other molecules, making it a true enzyme. The inclusion of ribozyme sequences within antisense RNAs confers RNA-cleaving activity upon them, thereby increasing the activity of the constructs.

[0748] A number of classes of ribozymes are known. One class of ribozymes is derived from a number of small circular RNAs, which are capable of self-cleavage and replication in plants. The RNAs replicate either alone (viroid RNAs) or with a helper virus (satellite RNAs). Examples include RNAs from avocado sunblotch viroid and the satellite RNAs from tobacco ringspot virus, lucerne transient streak virus, velvet tobacco mottle virus, solanum nodiflorum mottle virus and subterranean clover mottle virus. The design and use of target RNA-specific ribozymes is described in Haseloff et al. Nature, 334:585 (1988).

[0749] Like the antisense constructs above, the ribozyme sequence fragment necessary for pairing need not be identical to the target nucleotides to be cleaved, nor identical to the sequences in the Reference and Sequence tables or fragments thereof. Ribozymes are constructed by combining the ribozyme sequence and some fragment of the target gene which allows recognition of the target gene mRNA by the resulting ribozyme molecule. Generally, the sequence in the ribozyme capable of binding to the target sequence exhibits a percentage of sequence identity with at least 80%, preferably with at least 85%, more preferably with at least 90% and most preferably with at least 95%, even more preferably, with at least 96%, 97%, 98% or 99% sequence identity to some fragment of a sequence in the Reference and Sequence tables or the complements thereof. The ribozyme is equally effective in inhibiting mRNA translation by cleaving either in the untranslated or coding regions. Generally, a higher percentage of sequence identity is used to compensate for the use of a shorter sequence. Furthermore, the introduced sequence need not have the same intron or exon pattern, and homology of non-coding segments are equally effective.

[0750] C.3. Chimeraplasts

[0751] The SDFs of the invention, such as those described by Reference and Sequence tables are also used to construct chimeraplasts that introduced into a cell to produce at least one specific nucleotide change in a sequence corresponding to the SDF of the invention. A chimeraplast is an oligonucleotide comprising DNA and/or RNA that specifically hybridizes to a target region in a manner which creates a mismatched base-pair. This mismatched base-pair signals the cell's repair enzyme machinery which acts on the mismatched region and results in the replacement, insertion or deletion of designated nucleotide(s). The altered sequence is then expressed by the cell's normal cellular mechanisms. Chimeraplasts are designed to repair mutant genes, modify genes, introduce site-specific mutations, and/or act to interrupt or alter normal gene function (U.S. Pat. Nos. 6,010,907 and 6,004,804; and PCT Pub. No. WO99/58723 and WO99/07865).

[0752] C.4. Sense Suppression

[0753] The SDFs of the Reference and Sequence tables of the present invention are also useful to modulate gene expression by sense suppression. Sense suppression represents another method of gene suppression that introduces at least one exogenous copy or fragment of the endogenous sequence to be suppressed.

[0754] Introduction of expression cassettes in which a nucleic acid is configured in the sense orientation with respect to the promoter into the chromosome of a plant or by a self-replicating virus is an effective means by which to induce degradation of mRNAs of target genes. For an example of the use of this method to modulate expression of endogenous genes see, Napoli et al., The Plant Cell 2:279 (1990), and U.S. Pat. Nos. 5,034,323, 5,231,020, and 5,283,184. Inhibition of expression requires some transcription of the introduced sequence.

[0755] For sense suppression, the introduced sequence generally is substantially identical to the endogenous sequence intended to be inactivated. The minimal percentage of sequence identity is typically greater than about 65%, but a higher percentage of sequence identity might exert a more effective reduction in the level of normal gene products. Sequence identity of more than about 80% is preferred, though about 95% to absolute identity is most preferred. As with antisense regulation, the effect applys to any other proteins within a similar family of genes exhibiting homology or substantial homology to the suppressing sequence.

[0756] C.5. Transcriptional Silencing

[0757] The nucleic acid sequences of the invention, including the SDFs of the reference, Sequence, Protein Group, and Protein Group Matrix tables, and fragments thereof, contain sequences that can be inserted into the genome of an organism resulting in transcriptional silencing. Such regulatory sequences need not be operatively linked to coding sequences to modulate transcription of a gene. Specifically, a promoter sequence without any other element of a gene can be introduced into a genome to transcriptionally silence an endogenous gene (see, for example, Vaucheret, H et al. (1998) The Plant Journal 16: 651-659). As another example, triple helices can be formed using oligonucleotides based on sequences from Reference, Sequence, Protein Group, and Protein Group Matrix tables, fragments thereof, and substantially similar sequence thereto. The oligonucleotide can be delivered to the host cell and can bind to the promoter in the genome to form a triple helix and prevent transcription. An oligonucleotide of interest is one that can bind to the promoter and block binding of a transcription factor to the promoter. In such a case, the oligonucleotide can be complementary to the sequences of the promoter that interact with transcription binding factors.

[0758] C.6. Other Methods to Inhibit Gene Expression

[0759] Yet another means of suppressing gene expression is to insert a polynucleotide into the gene of interest to disrupt transcription or translation of the gene.

[0760] Low frequency homologous recombination is used to target a polynucleotide insert to a gene by flanking the polynucleotide insert with sequences that are substantially similar to the gene to be disrupted. Sequences from the Reference and Sequence tables, fragments thereof and substantially similar sequences thereto are used for homologous recombination.

[0761] In addition, random insertion of polynucleotides into a host cell genome is used to disrupt the gene of interest (Azpiroz-Leehan et al., Trends in Genetics 13:152 (1997). In this method, screening for clones from a library containing random insertions is preferred to identifying those that have polynucleotides inserted into the gene of interest. Such screening is performed using probes and/or primers described above based on sequences from Reference and Sequence tables, fragments thereof, and substantially similar sequence thereto. The screening is also performed by selecting clones or R₁ plants having a desired phenotype.

[0762] I.D. Methods of Functional Analysis

[0763] The constructs described in the methods under I.C. above are used to determine the function of the polypeptide encoded by the gene that is targeted by the constructs.

[0764] Down-regulating the transcription and translation of the targeted gene in the host cell or organisms, such as a plant, produces phenotypic changes as compared to a wild-type cell or organism. In addition, in vitro assays are used to determine if any biological activity, such as calcium flux, DNA transcription, nucleotide incorporation, etc., are being modulated by the down-regulation of the targeted gene.

[0765] Coordinated regulation of sets of genes, e.g. those contributing to a desired polygenic trait, is sometimes necessary to obtain a desired phenotype. SDFs of the invention representing transcription activation and DNA binding domains are assembled into hybrid transcriptional activators. These hybrid transcriptional activators are used with their corresponding DNA elements (i.e. those bound by the DNA-binding SDFs) to effect coordinated expression of desired genes (J. J. Schwarz et al., Mol. Cell. Biol. 12:266 (1992), A. Martinez et al., Mol. Gen. Genet. 261:546 (1999)).

[0766] The SDFs of the invention are also used in the two-hybrid genetic systems to identify networks of protein-protein interactions (L. McAlister-Henn et al., Methods 19:330 (1999), J. C. Hu et al., Methods 20:80 (2000), M. Golovkin et al., J. Biol. Chem. 274:36428 (1999), K. Ichimura et al., Biochem. Biophys. Res. Comm. 253:532 (1998)). The SDFs of the invention also are used in various expression display methods to identify important protein-DNA interactions (e.g. B. Luo et al., J. Mol. Biol. 266:479 (1997)).

[0767] I.E. Promoters

[0768] The SDFs of the invention are also useful as structural or regulatory sequences in a construct for modulating the expression of the corresponding gene in a plant or other organism, e.g. a symbiotic bacterium. For example, promoter sequences associated to SDFs of the reference, Sequence, Protein Group, and Protein Group Matrix tables of the present invention can be useful in directing expression of coding sequences either as constitutive promoters or to direct expression in particular cell types, tissues, or organs or in response to environmental stimuli.

[0769] With respect to the SDFs of the present invention a promoter is likely to be a relatively small portion of a genomic DNA (gDNA) sequence located in the first 2000 nucleotides upstream from an initial exon identified in a gDNA sequence or initial “ATG” or methionine codon or translational start site in a corresponding cDNA sequence. Such promoters are more likely to be found in the first 1000 nucleotides upstream of an initial ATG or methionine codon or translational start site of a cDNA sequence corresponding to a gDNA sequence. In particular, the promoter is usually located upstream of the transcription start site. The fragments of a particular gDNA sequence that function as elements of a promoter in a plant cell will preferably be found to hybridize to gDNA sequences presented and described in the Reference table at medium or high stringency, relevant to the length of the probe and its base composition.

[0770] Promoters are generally modular in nature. Promoters can consist of a basal promoter that functions as a site for assembly of a transcription complex comprising an RNA polymerase, for example RNA polymerase II. A typical transcription complex will include additional factors such as TF_{II}B, TF_{II}D, and TF_{II}E. Of these, TF_{II}D appears to be the only one to bind DNA directly. The promoter might also contain one or more enhancers and/or suppressors that function as binding sites for additional transcription factors that have the function of modulating the level of transcription with respect to tissue specificity and of transcriptional responses to particular environmental or nutritional factors, and the like.

[0771] Short DNA sequences representing binding sites for proteins can be separated from each other by intervening sequences of varying length. For example, within a particular functional module, protein binding sites may be constituted by regions of 5 to 60, preferably 10 to 30, more preferably 10 to 20 nucleotides. Within such binding sites, there are typically 2 to 6 nucleotides that specifically contact amino acids of the nucleic acid binding protein. The protein binding sites are usually separated from each other by 10 to several hundred nucleotides, typically by 15 to 150 nucleotides, often by 20 to 50 nucleotides. DNA binding sites in promoter elements often display dyad symmetry in their sequence. Often elements binding several different proteins, and/or a plurality of sites that bind the same protein, will be combined in a region of 50 to 1,000 basepairs.

[0772] Elements that have transcription regulatory function can be isolated from their corresponding endogenous gene, or the desired sequence can be synthesized, and recombined in constructs to direct expression of a coding region of a gene in a desired tissue-specific, temporal-specific or other desired manner of inducibility or suppression. When hybridizations are performed to identify or isolate elements of a promoter by hybridization to the long sequences presented in the Reference tables, conditions are adjusted to account for the above-described nature of promoters. For example short probes, constituting the element sought, are preferably used under low temperature and/or high salt conditions. When long probes, which might include several promoter elements are used, low to medium stringency conditions are preferred when hybridizing to promoters across species.

[0773] If a nucleotide sequence of an SDF, or part of the SDF, functions as a promoter or fragment of a promoter, then nucleotide substitutions, insertions or deletions that do not substantially affect the binding of relevant DNA binding proteins would be considered equivalent to the exemplified nucleotide sequence. It is envisioned that there are instances where it is desirable to decrease the binding of relevant DNA binding proteins to silence or down-regulate a promoter, or conversely to increase the binding of relevant DNA binding proteins to enhance or up-regulate a promoter and vice versa. In such instances, polynucleotides representing changes to the nucleotide sequence of the DNA-protein contact region by insertion of additional nucleotides, changes to identity of relevant nucleotides, including use of chemically-modified bases, or deletion of one or more nucleotides are considered encompassed by the present invention. In addition, fragments of the promoter sequences described by Reference tables and variants thereof can be fused with other promoters or fragments to facilitate transcription and/or transcription in specific type of cells or under specific conditions.

[0774] Promoter function can be assayed by methods known in the art, preferably by measuring activity of a reporter gene operatively linked to the sequence being tested for promoter function. Examples of reporter genes include those encoding luciferase, green fluorescent protein, GUS, neo, cat and bar.

[0775] I.F. UTRs and Junctions

[0776] Polynucleotides comprising untranslated (UTR) sequences and intron/exon junctions are also within the scope of the invention. UTR sequences include introns and 5′ or 3′ untranslated regions (5′ UTRs or 3′ UTRs). Fragments of the sequences shown in the Reference and Sequence tables comprise UTRs and intron/exon junctions.

[0777] Some of these fragments of SDFs, especially UTRs, have regulatory functions related to, for example, translation rate and mRNA stability. Thus, these fragments of SDFs are isolated for use as elements of gene constructs for regulated production of polynucleotides encoding desired polypeptides.

[0778] Some introns of genomic DNA segments also have regulatory functions. Sometimes regulatory elements, especially transcription enhancer or suppressor elements, are found within introns. Also, elements related to stability of heteronuclear RNA and efficiency of splicing and of transport to the cytoplasm for translation are found in intron elements. Thus, these segments also find use as elements of expression vectors intended for use to transform plants.

[0779] Just as with promoters UTR sequences and intron/exon junctions vary from those shown in the Reference and Sequence tables. Such changes from those sequences preferably do not affect the regulatory activity of the UTRs or intron/exon junction sequences on expression, transcription, or translation unless selected to do so. However, in some instances, down- or up-regulation of such activity may be desired to modulate traits or phenotypic or in vitro activity.

[0780] I.G. Coding Sequences

[0781] Isolated polynucleotides of the invention include coding sequences that encode polypeptides comprising an amino acid sequence encoded by sequences described in the Reference and Sequence tables.

[0782] A nucleotide sequence encodes a polypeptide if a cell (or a cell free in vitro system) expressing that nucleotide sequence produces a polypeptide having the recited amino acid sequence when the nucleotide sequence is transcribed and the primary transcript is subsequently processed and translated by a host cell (or a cell free in vitro system) harboring the nucleic acid. Thus, an isolated nucleic acid that encodes a particular amino acid sequence is a genomic sequence comprising exons and introns or a cDNA sequence that represents the product of splicing thereof. An isolated nucleic acid encoding an amino acid sequence also encompasses heteronuclear RNA, which contains sequences that are spliced out during expression, and mRNA, which lacks those sequences.

[0783] Coding sequences are constructed using chemical synthesis techniques or by isolating coding sequences or by modifying such synthesized or isolated coding sequences as described above.

[0784] In addition to coding sequences encoding the polypeptide sequences of the Reference and Sequence tables, which are native to corn, Arabidopsis, soybean, rice, wheat, and other plants, the isolated polynucleotides are polynucleotides that encode variants, fragments, and fusions of those native proteins. Such polypeptides are described below in part II.

[0785] In variant polynucleotides generally, the number of substitutions, deletions or insertions is preferably less than 20%, more preferably less than 15%; even more preferably less than 10%, 5%, 3% or 1% of the number of nucleotides comprising a particularly exemplified sequence. It is generally expected that non-degenerate nucleotide sequence changes that result in 1 to 10, more preferably 1 to 5 and most preferably 1 to 3 amino acid insertions, deletions or substitutions do not greatly affect the function of an encoded polypeptide. The most preferred embodiments are those wherein 1 to 20, preferably 1 to 10, most preferably 1 to 5 nucleotides are added to, or deleted from and/or substituted in the sequences specifically disclosed in the Reference and Sequence tables or fragments thereof.

[0786] Insertions or deletions in polynucleotides intended to be used for encoding a polypeptide preferably preserve the reading frame. This consideration is not so important in instances when the polynucleotide is intended to be used as a hybridization probe.

II. Polypeptides and Proteins

[0787] IIA. Native polypeptides and proteins

[0788] Polypeptides within the scope of the invention include both native proteins as well as variants, fragments, and fusions thereof. Polypeptides of the invention are those encoded by any of the six reading frames of sequences shown in the Reference and Sequence tables, preferably encoded by the three frames reading in the 5′ to 3′ direction of the sequences as shown.

[0789] Native polypeptides include the proteins encoded by the sequences shown in the Reference and Sequence tables. Such native polypeptides include those encoded by allelic variants.

[0790] Polypeptide and protein variants will exhibit at least 75% sequence identity to those native polypeptides of the Reference and Sequence tables. More preferably, the polypeptide variants will exhibit at least 85% sequence identity; even more preferably, at least 90% sequence identity; more preferably at least 95%, 96%, 97%, 98%, or 99% sequence identity. Fragments of polypeptide or fragments of polypeptides exhibit similar percentages of sequence identity to the relevant fragments of the native polypeptide. Fusions exhibit a similar percentage of sequence identity in that fragment of the fusion represented by the variant of the native peptide.

[0791] Furthermore, polypeptide variants exhibit at least one of the functional properties of the native protein. Such properties include, without limitation, protein interaction, DNA interaction, biological activity, immunological activity, receptor binding, signal transduction, transcription activity, growth factor activity, secondary structure, three-dimensional structure, etc. As to properties related to in vitro or in vivo activities, the variants preferably exhibit at least 60% of the activity of the native protein; more preferably at least 70%, even more preferably at least 80%, 85%, 90% or 95% of at least one activity of the native protein.

[0792] One type of variant of native polypeptides comprises amino acid substitutions, deletions and/or insertions. Conservative substitutions are preferred to maintain the function or activity of the polypeptide.

[0793] Within the scope of percentage of sequence identity described above, a polypeptide of the invention may have additional individual amino acids or amino acid sequences inserted into the polypeptide in the middle thereof and/or at the N-terminal and/or C-terminal ends thereof. Likewise, some of the amino acids or amino acid sequences may be deleted from the polypeptide.

[0794] A.1 Antibodies

[0795] Isolated polypeptides are utilized to produce antibodies. Polypeptides of the invention are generally used, for example, as antigens for raising antibodies by known techniques. The resulting antibodies are useful as reagents for determining the distribution of the antigen protein within the tissues of a plant or within a cell of a plant. The antibodies are also useful for examining the production level of proteins in various tissues, for example in a wild-type plant or following genetic manipulation of a plant, by methods such as Western blotting.

[0796] Antibodies of the present invention, both polyclonal and monoclonal, are prepared by conventional methods. In general, the polypeptides of the invention are first used to immunize a suitable animal, such as a mouse, rat, rabbit, or goat. Rabbits and goats are preferred for the preparation of polyclonal sera due to the volume of serum obtainable and the availability of labeled anti-rabbit and anti-goat antibodies as detection reagents. Immunization is generally performed by mixing or emulsifying the protein in saline, preferably in an adjuvant such as Freund's complete adjuvant, and injecting the mixture or emulsion parenterally (generally subcutaneously or intramuscularly). A dose of 50-200 μg/injection is typically sufficient. Immunization is generally boosted 2-6 weeks later with one or more injections of the protein in saline, preferably using Freund's incomplete adjuvant. One may alternatively generate antibodies by in vitro immunization using methods known in the art, which for the purposes of this invention is considered equivalent to in vivo immunization.

[0797] Polyclonal antisera is obtained by bleeding the immunized animal into a glass or plastic container, incubating the blood at 25° C. for one hour, followed by incubating the blood at 4° C. for 2-18 hours. The serum is recovered by centrifugation (e.g., 1,000×g for 10 minutes). About 20-50 ml per bleed may be obtained from rabbits.

[0798] Monoclonal antibodies are prepared using the method of Kohler and Milstein, Nature 256: 495 (1975), or modification thereof. Typically, a mouse or rat is immunized as described above. However, rather than bleeding the animal to extract serum, the spleen (and optionally several large lymph nodes) is removed and dissociated into single cells. If desired, the spleen cells can be screened (after removal of nonspecifically adherent cells) by applying a cell suspension to a plate or well coated with the protein antigen. B-cells producing membrane-bound immunoglobulin specific for the antigen bind to the plate and are not rinsed away with the rest of the suspension. Resulting B-cells, or all dissociated spleen cells, are then induced to fuse with myeloma cells to form hybridomas and are cultured in a selective medium (e.g., hypoxanthine, aminopterin, thymidine medium, “HAT”). The resulting hybridomas are plated by limiting dilution, and are assayed for the production of antibodies which bind specifically to the immunizing antigen (and which do not bind to unrelated antigens). The selected Mab-secreting hybridomas are then cultured either in vitro (e.g., in tissue culture bottles or hollow fiber reactors) or in vivo (as ascites in mice).

[0799] Other methods for sustaining antibody-producing B-cell clones, such as by EBV transformation, are known.

[0800] If desired, the antibodies (whether polyclonal or monoclonal) may be labeled using conventional techniques. Suitable labels include fluorophores, chromophores, radioactive atoms (particularly ³²P and ¹²⁵I), electron-dense reagents, enzymes and ligands having specific binding partners. Enzymes are typically detected by their activity. For example, horseradish peroxidase is usually detected by its ability to convert 3,3′,5,5′-tetramethylbenzidine (TNB) to a blue pigment, quantifiable with a spectrophotometer.

[0801] A.2 In Vitro Applications of Polypeptides

[0802] Some polypeptides of the invention will have enzymatic activities that are useful in vitro. For example, the soybean trypsin inhibitor (Kunitz) family is one of the numerous families of proteinase inhibitors. It comprises plant proteins which have inhibitory activity against serine proteinases from the trypsin and subtilisin families, thiol proteinases and aspartic proteinases. Thus, these peptides find in vitro use in protein purification protocols and in therapeutic settings requiring topical application of protease inhibitors.

[0803] Delta-aminolevulinic acid dehydratase (EC 4.2.1.24) (ALAD) catalyzes the second step in the biosynthesis of heme, the condensation of two molecules of 5-aminolevulinate to form porphobilinogen and is also involved in chlorophyll biosynthesis (Kaczor et al. (1994) Plant Physiol. 1-4: 1411-7; Smith (1988) Biochem. J. 249: 423-8; Schneider (1976) Z. naturforsch. [C] 31: 55-63). Thus, ALAD proteins can be used as catalysts in synthesis of heme derivatives. Enzymes of biosynthetic pathways generally can be used as catalysts for in vitro synthesis of the compounds representing products of the pathway.

[0804] Polypeptides encoded by SDFs of the invention are engineered to provide purification reagents to identify and purify additional polypeptides that bind to them. This allows one to identify proteins that function as multimers or elucidate signal transduction or metabolic pathways. In the case of DNA binding proteins, the polypeptide are used in a similar manner to identify the DNA determinants of specific binding (S. Pierrou et al., Anal. Biochem. 229:99 (1995), S. Chusacultanachai et al., J. Biol. Chem. 274:23591 (1999), Q. Lin et al., J. Biol. Chem. 272:27274 (1997)).

[0805] II.B. Polypeptide Variants, Fragments, and Fusions

[0806] Generally, variants, fragments, or fusions of the polypeptides encoded by the maximum length sequence(MLS) can exhibit at least one of the activities of the identified domains and/or related polypeptides described in Sections (C) and (D) of The Reference tables corresponding to the MLS of interest.

[0807] II.B1 Variants

[0808] A type of variant of the native polypeptides comprises amino acid substitutions. Conservative substitutions, described above (see II.), are preferred to maintain the function or activity of the polypeptide. Such substitutions include conservation of charge, polarity, hydrophobicity, size, etc. For example, one or more amino acid residues within the sequence is substituted with another amino acid of similar polarity that acts as a functional equivalent, for example providing a hydrogen bond in an enzymatic catalysis. Substitutes for an amino acid within an exemplified sequence are preferably made among the members of the class to which the amino acid belongs. For example, the nonpolar (hydrophobic) amino acids include alanine, leucine, isoleucine, valine, proline, phenylalanine, tryptophan and methionine. The polar neutral amino acids include glycine, serine, threonine, cysteine, tyrosine, asparagine, and glutamine. The positively charged (basic) amino acids include arginine, lysine and histidine. The negatively charged (acidic) amino acids include aspartic acid and glutamic acid.

[0809] Within the scope of percentage of sequence identity described above, a polypeptide of the invention may have additional individual amino acids or amino acid sequences inserted into the polypeptide in the middle thereof and/or at the N-terminal and/or C-terminal ends thereof. Likewise, some of the amino acids or amino acid sequences may be deleted from the polypeptide. Amino acid substitutions may also be made in the sequences; conservative substitutions being preferred.

[0810] One preferred class of variants are those that comprise (1) the domain of an encoded polypeptide and/or (2) residues conserved between the encoded polypeptide and related polypeptides. For this class of variants, the encoded polypeptide sequence is changed by insertion, deletion, or substitution at positions flanking the domain and/or conserved residues.

[0811] Another class of variants includes those that comprise an encoded polypeptide sequence that is changed in the domain or conserved residues by a conservative substitution.

[0812] Yet another class of variants includes those that lack one of the in vitro activities, or structural features of the encoded polypeptides. One example is polypeptides or proteins produced from genes comprising dominant negative mutations. Such a variant may comprise an encoded polypeptide sequence with non-conservative changes in a particular domain or group of conserved residues.

[0813] II.A.2 Fragments

[0814] Fragments of particular interest are those that comprise a domain identified for a polypeptide encoded by an MLS of the instant invention and variants thereof. Also, fragments that comprise at least one region of residues conserved between an MLS encoded polypeptide and its related polypeptides are of great interest. Fragments are sometimes useful as polypeptides corresponding to genes comprising dominant negative mutations.

[0815] II.A.3 Fusions

[0816] Of interest are chimeras comprising (1) a fragment of the MLS encoded polypeptide or variants thereof of interest and (2) a fragment of a polypeptide comprising the same domain. For example, an AP2 helix encoded by a MLS of the invention fused to second AP2 helix from ANT protein, which comprises two AP2 helices. The present invention also encompasses fusions of MLS encoded polypeptides, variants, or fragments thereof fused with related proteins or fragments thereof.

Definition of Domains

[0817] The polypeptides of the invention possess identifying domains as shown in The Reference tables, which indicate specific domains within the MLS encoded polypeptides. In addition, the domains within the MLS encoded polypeptide are defined by the region that exhibits at least 70% sequence identity with the consensus sequences listed in the detailed description below of each of the domains.

[0818] The majority of the protein domain descriptions given in the protein domain table are obtained from the Prosite and the Pfam websites available on the internet.

[0819] A. Activities of Polypeptides Comprising Signal Peptides

[0820] Polypeptides comprising signal peptides are a family of proteins that are typically targeted to (1) a particular organelle or intracellular compartment, (2) interact with a particular molecule or (3) for secretion outside of a host cell. Example of polypeptides comprising signal peptides include, without limitation, secreted proteins, soluble proteins, receptors, proteins retained in the ER, etc.

[0821] These proteins comprising signal peptides are useful to modulate ligand-receptor interactions, cell-to-cell communication, signal transduction, intracellular communication, and activities and/or chemical cascades that take part in an organism outside or within of any particular cell.

[0822] One class of such proteins are soluble proteins which are transported out of the cell. These proteins act as ligands that bind to receptor to trigger signal transduction or to permit communication between cells.

[0823] Another class is receptor proteins which also comprise a retention domain that lodges the receptor protein in the membrane when the cell transports the receptor to the surface of the cell. Like the soluble ligands, receptors also modulate signal transduction and communication between cells.

[0824] In addition the signal peptide itself can serve as a ligand for some receptors. An example is the interaction of the ER targeting signal peptide with the signal recognition particle (SRP). Here, the SRP binds to the signal peptide, halting translation, and the resulting SRP complex then binds to docking proteins located on the surface of the ER, prompting transfer of the protein into the ER.

[0825] A description of signal peptide residue composition is described below in Subsection IV.C.1.

III. Methods of Modulating Polypeptide Production

[0826] It is contemplated that polynucleotides of the invention are incorporated into a host cell or in-vitro system to modulate polypeptide production. For instance, the SDFs prepared as described herein are used to prepare expression cassettes useful in a number of techniques for suppressing or enhancing expression.

[0827] An example are polynucleotides comprising sequences to be transcribed, such as coding sequences, of the present invention are inserted into nucleic acid constructs to modulate polypeptide production. Typically, such sequences to be transcribed are heterologous to at least one element of the nucleic acid construct to generate a chimeric gene or construct.

[0828] Another example of useful polynucleotides are nucleic acid molecules comprising regulatory sequences of the present invention. Chimeric genes or constructs are generated when the regulatory sequences of the invention linked to heterologous sequences in a vector construct. Within the scope of the invention are such chimeric gene and/or constructs.

[0829] Also within the scope of the invention are nucleic acid molecules, whereof at least a part or fragment of these DNA molecules are presented in the Reference and Sequence tables of the present application, and wherein the coding sequence is under the control of its own promoter and/or its own regulatory elements. Such molecules are useful for transforming the genome of a host cell or an organism regenerated from said host cell for modulating polypeptide production.

[0830] Additionally, a vector capable of producing the oligonucleotide can be inserted into the host cell to deliver the oligonucleotide.

[0831] More detailed description of components to be included in vector constructs are described both above and below.

[0832] Whether the chimeric vectors or native nucleic acids are utilized, such polynucleotides are incorporated into a host cell to modulate polypeptide production. Native genes and/or nucleic acid molecules are effective when exogenous to the host cell.

[0833] Methods of modulating polypeptide expression includes, without limitation:

[0834] Suppression methods, such as
[0835] Antisense
[0836] Ribozymes
[0837] Co-suppression
[0838] Insertion of Sequences into the Gene to be Modulated
[0839] Regulatory Sequence Modulation.

[0840] as well as Methods for Enhancing Production, such as
[0841] Insertion of Exogenous Sequences; and
[0842] Regulatory Sequence Modulation.

[0843] III.A. Suppression

[0844] Expression cassettes of the invention are used to suppress expression of endogenous genes which comprise the SDF sequence. Inhibiting expression is useful, for instance, to tailor the ripening characteristics of a fruit (Oeller et al., Science 254:437 (1991)) or to influence seed size (WO98/07842) or to provoke cell ablation (Mariani et al., Nature 357: 384-387 (1992).

[0845] As described above, a number of methods are used to inhibit gene expression in plants, such as antisense, ribozyme, introduction of exogenous genes into a host cell, insertion of a polynucleotide sequence into the coding sequence and/or the promoter of the endogenous gene of interest and the like.

[0846] III.A.1. Antisense

[0847] An expression cassette as described above transformed into host cell or plant to produce an antisense strand of RNA. For plant cells, antisense RNA inhibits gene expression by preventing the accumulation of mRNA which encodes the enzyme of interest, see, e.g., Sheehy et al., Proc. Nat. Acad. Sci. USA, 85:8805 (1988), and Hiatt et al., U.S. Pat. No. 4,801,340.

[0848] III.A.2. Ribozymes

[0849] Similarly, ribozyme constructs are transformed into a plant to cleave mRNA and down-regulate translation.

[0850] III.A.3. Co-Suppression

[0851] Another method of suppression occurs by introducing an exogenous copy of the gene to be suppressed. Introduction of expression cassettes in which a nucleic acid is configured in the sense orientation with respect to the promoter prevents the accumulation of mRNA. A detailed description of this method is described above.

[0852] III.A.4. Insertion of Sequences into the Gene to be Modulated

[0853] Yet another means of suppressing gene expression is to insert a polynucleotide into the gene of interest to disrupt transcription or translation of the gene.

[0854] Homologous recombination could be used to target a polynucleotide insert to a gene using the Cre-Lox system (A. C. Vergunst et al., Nucleic Acids Res. 26:2729 (1998), A. C. Vergunst et al., Plant Mol. Biol. 38:393 (1998), H. Albert et al., Plant J. 7:649 (1995)).

[0855] In addition, random insertion of polynucleotides into a host cell genome are also used to disrupt the gene of interest (Azpiroz-Leehan et al., Trends in Genetics 13:152 (1997)). In this method, screening for clones from a library containing random insertions is preferred for identifying those that have polynucleotides inserted into the gene of interest. Such screening is performed using probes and/or primers described above based on sequences from the Reference and Sequence tables, fragments thereof, and substantially similar sequence thereto. The polynucleotide sequence into the coding sequence and/or the promoter of the endogenous gene of interest and the like.

[0856] III.A.1. Antisense

[0857] An expression cassette as described above transformed into host cell or plant to produce an antisense strand of RNA. For plant cells, antisense RNA inhibits gene expression by preventing the accumulation of mRNA which encodes the enzyme of interest, see, e.g., Sheehy et al., Proc. Nat. Acad. Sci. USA, 85:8805 (1988), and Hiatt et al., U.S. Pat. No. 4,801,340.

[0858] III.A.2. Ribozymes

[0859] Similarly, ribozyme constructs are transformed into a plant to cleave mRNA and down-regulate translation.

[0860] III.A.3. Co-Suppression

[0861] Another method of suppression occurs by introducing an exogenous copy of the gene to be suppressed. Introduction of expression cassettes in which a nucleic acid is configured in the sense orientation with respect to the promoter prevents the accumulation of mRNA. A detailed description of this method is described above.

[0862] III.A.4. Insertion of Sequences into the Gene to be Modulated

[0863] Yet another means of suppressing gene expression is to insert a polynucleotide into the gene of interest to disrupt transcription or translation of the gene.

[0864] Homologous recombination could be used to target a polynucleotide insert to a gene using the Cre-Lox system (A. C. Vergunst et al., Nucleic Acids Res. 26:2729 (1998), A. C. Vergunst et al., Plant Mol. Biol. 38:393 (1998), H. Albert et al., Plant J. 7:649 (1995)).

[0865] In addition, random insertion of polynucleotides into a host cell genome are also used to disrupt the gene of interest (Azpiroz-Leehan et al., Trends in Genetics 13:152 (1997)). In this method, screening for clones from a library containing random insertions is preferred for identifying those that have polynucleotides inserted into the gene of interest. Such screening is performed using probes and/or primers described above based on sequences from the Reference and Sequence tables, fragments thereof, and substantially similar sequence thereto. The screening isalso performed by selecting clones or any transgenic plants having a desired phenotype.

[0866] III.A.5. Regulatory Sequence Modulation

[0867] The SDFs described in the Reference and Sequence tables or polynucleotides encoding polypeptides of the Protein Group or Protein Group Matrix tables, and fragments thereof are examples of nucleotides of the invention that contain regulatory sequences that can be used to suppress or inactivate transcription and/or translation from a gene of interest as discussed in I.C.5.

[0868] III.A.6. Genes Comprising Dominant-Negative Mutations

[0869] When suppression of production of the endogenous, native protein is desired it is often helpful to express a gene comprising a dominant negative mutation. Genes comprising dominant negative mutations produce a variant polypeptide that is capable of competing with the native polypeptide, but which does not produce the native result. Consequently, over-expression of genes comprising these mutations titrate out an undesired activity of the native protein. For example, the product from a gene comprising a dominant negative mutation of a receptor is used to constitutively activate or suppress a signal transduction cascade, allowing examination of the phenotype and thus the trait(s) controlled by that receptor and pathway. Alternatively, the protein arising from the gene comprising a dominant-negative mutation is an inactive enzyme still capable of binding to the same substrate as the native protein and therefore competes with such native proteins.

[0870] Products from genes comprising dominant-negative mutations also act upon the native protein itself to prevent activity. For example, the native protein may be active only as a homo-multimer or as one subunit of a hetero-multimer. Incorporation of an inactive subunit into the multimer with native subunit(s) inhibits activity.

[0871] Thus, gene function is modulated in host cells of interest by insertion into these cells vector constructs comprising a gene comprising a dominant-negative mutation.

[0872] III.B. Enhanced Expression

[0873] Enhanced expression of a gene of interest in a host cell is accomplished by either (1) insertion of an exogenous gene; or (2) promoter modulation.

[0874] III.B.1. Insertion of an Exogenous Gene

[0875] Insertion of an expression construct encoding an exogenous gene boosts the number of gene copies expressed in a host cell.

[0876] Such expression constructs comprise genes that either encode the native protein that is of interest or that encode a variant that exhibits enhanced activity as compared to the native protein. Such genes encoding proteins of interest are constructed from the sequences from the Reference and Sequence tables, fragments thereof, and substantially similar sequence thereto.

[0877] Such an exogenous gene includes a constitutive promoter permitting expression in any cell in a host organism or a promoter that directs transcription only in particular cells or times during a host cell life cycle or in response to environmental stimuli.

[0878] III.B.2. Regulatory Sequence Modulation

[0879] The SDFs of the Reference and Sequence tables, and fragments thereof, contain regulatory sequences that are used to enhance expression of a gene of interest. For example, some of these sequences contain useful enhancer elements. In some cases, duplication of enhancer elements or insertion of exogenous enhancer elements increases expression of a desired gene from a particular promoter. As other examples, all 11 promoters require binding of a regulatory protein to be activated, while some promoters may need a protein that signals a promoter binding protein to expose a polymerase binding site. In either case, over-production of such proteins are used to enhance expression of a gene of interest by increasing the activation time of the promoter.

[0880] Such regulatory proteins are encoded by some of the sequences in the Reference and Sequence tables, fragments thereof, and substantially similar sequences thereto.

[0881] Coding sequences for these proteins are constructed as described above.

IV. Gene Constructs and Vector Construction

[0882] To use isolated SDFs of the present invention or a combination of them or parts and/or mutants and/or fusions of said SDFs in the above techniques, recombinant DNA vectors that comprise said SDFs and are suitable for transformation of cells, such as plant cells, are usually prepared. The SDF construct are made using standard recombinant DNA techniques (Sambrook et al. 1989) and is introduced to the species of interest by Agrobacterium mediated transformation or by other means of transformation (e.g particle gun bombardment) as referenced below.

[0883] The vector backbone can be any of those typical in the art such as plasmids, viruses, artificial chromosomes, BACs, YACs, PACs and vectors of the sort described by

[0884] (a) BAC: Shizuya et al., Proc. Natl. Acad. Sci. USA 89: 8794-8797 (1992); Hamilton et al., Proc. Natl. Acad. Sci. USA 93: 9975-9979 (1996);

[0885] (b) YAC: Burke et al., Science 236:806-812 (1987);.

[0886] (c) PAC: Sternberg N. et al., Proc Natl Acad Sci USA. January;87(1):103-7 (1990);

[0887] (d) Bacteria-Yeast Shuttle Vectors: Bradshaw et al., Nucl Acids Res 23: 4850-4856 (1995);

[0888] (e) Lambda Phage Vectors: Replacement Vector, e.g., Frischauf et al., J. Mol Biol 170: 827-842 (1983); or Insertion vector, e.g., Huynh et al., In: Glover N M (ed) DNA Cloning: A practical Approach, Vol. 1 Oxford: IRL Press (1985);

[0889] (f) T-DNA gene fusion vectors:Walden et al., Mol Cell Biol 1: 175-194 (1990); and

[0890] (g) Plasmid vectors: Sambrook et al., infra.

[0891] Typically, a vector comprises the exogenous gene, which in its turn comprises an SDF of the present invention to be introduced into the genome of a host cell, and which gene may be an antisense construct, a ribozyme construct chimeraplast, or a coding sequence with any desired transcriptional and/or translational regulatory sequences, such as promoters, UTRs, and 3′ end termination sequences. Vectors of the invention also include origins of replication, scaffold attachment regions (SARs), markers, homologous sequences, introns, etc.

[0892] A DNA sequence coding for the desired polypeptide, for example a cDNA sequence encoding a full length protein, are preferably combined with transcriptional and translational initiation regulatory sequences which direct the transcription of the sequence from the gene in the intended tissues of the transformed plant. For example, for over-expression, a plant promoter fragment is employed that direct transcription of the gene in all tissues of a regenerated plant. Alternatively, the plant promoter directs transcription of an SDF of the invention in a specific tissue (tissue-specific promoters) or is otherwise under more precise environmental control (inducible promoters).

[0893] If proper polypeptide production is desired, a polyadenylation region at the 3′-end of the coding region is typically included. The polyadenylation region is derived from the natural gene, from a variety of other plant genes, or from T-DNA.

[0894] The vector comprising the sequences from genes or SDF or the invention comprises a marker gene that confers a selectable phenotype on plant cells. The vector includes promoter and coding sequence, for instance. For example, the marker may encode biocide resistance, particularly antibiotic resistance, such as resistance to kanamycin, G418, bleomycin, hygromycin, or herbicide resistance, (e.g. resistance to chlorosulfuron or phosphinotricin).

[0895] IV.A. Coding Sequences

[0896] Generally, the sequence in the transformation vector and to be introduced into the genome of the host cell does not need to be absolutely identical to an SDF of the present invention. Also, it is not necessary for it to be full length, relative to either the primary transcription product or fully processed mRNA. Furthermore, the introduced sequence need not have the same intron or exon pattern as a native gene. Also, heterologous non-coding segments can be incorporated into the coding sequence without changing the desired amino acid sequence of the polypeptide to be produced.

[0897] IV.B. Promoters

[0898] As explained above, introducing an exogenous SDF from the same species or an orthologous SDF from another species is useful to modulate the expression of a native gene corresponding to that SDF of interest. Such an SDF construct is under the control of either a constitutive promoter or a highly regulated inducible promoter (e.g., a copper inducible promoter). The promoter of interest is initially either endogenous or heterologous to the species in question. When re-introduced into the genome of said species, such promoter becomes exogenous to said species. Over-expression of an SDF transgene leads to co-suppression of the homologous endogeneous sequence thereby creating some alterations in the phenotypes of the transformed species as demonstrated by similar analysis of the chalcone synthase gene (Napoli et al., Plant Cell 2:279 (1990) and van der Krol et al., Plant Cell 2:291 (1990)). If an SDF is found to encode a protein with desirable characteristics, its over-production is controlled so that its accumulation is manipulated in an organ- or tissue-specific manner utilizing a promoter having such specificity.

[0899] Likewise, if the promoter of an SDF (or an SDF that includes a promoter) is found to be tissue-specific or developmentally regulated, such a promoter is utilized to drive or facilitate the transcription of a specific gene of interest (e.g., seed storage protein or root-specific protein). Thus, the level of accumulation of a particular protein is manipulated or its spatial localization in an organ- or tissue-specific manner is altered.

[0900] IV.C Signal Peptides

[0901] SDFs of the present invention containing signal peptides are indicated in the Reference and Sequence tables. In some cases it may be desirable for the protein encoded by an introduced exogenous or orthologous SDF to be targeted (1) to a particular organelle intracellular compartment, (2) to interact with a particular molecule such as a membrane molecule or (3) for secretion outside of the cell harboring the introduced SDF. This is accomplished using a signal peptide.

[0902] Signal peptides direct protein targeting, are involved in ligand-receptor interactions and act in cell to cell communication. Many proteins, especially soluble proteins, contain a signal peptide that targets the protein to one of several different intracellular compartments. In plants, these compartments include, but are not limited to, the endoplasmic reticulum (ER), mitochondria, plastids (such as chloroplasts), the vacuole, the Golgi apparatus, protein storage vessicles (PSV) and, in general, membranes. Some signal peptide sequences are conserved, such as the Asn-Pro-Ile-Arg amino acid motif found in the N-terminal propeptide signal that targets proteins to the vacuole (Marty (1999) The Plant Cell 11: 587-599). Other signal peptides do not have a consensus sequence per se, but are largely composed of hydrophobic amino acids, such as those signal peptides targeting proteins to the ER (Vitale and Denecke (1999) The Plant Cell 11: 615-628). Still others do not appear to contain either a consensus sequence or an identified common secondary sequence, for instance the chloroplast stromal targeting signal peptides (Keegstra and Cline (1999) The Plant Cell 11: 557-570). Furthermore, some targeting peptides are bipartite, directing proteins first to an organelle and then to a membrane within the organelle (e.g. within the thylakoid lumen of the chloroplast; see Keegstra and Cline (1999) The Plant Cell 11: 557-570). In addition to the diversity in sequence and secondary structure, placement of the signal peptide is also varied. Proteins destined for the vacuole, for example, have targeting signal peptides found at the N-terminus, at the C-terminus and at a surface location in mature, folded proteins. Signal peptides also serve as ligands for some receptors.

[0903] These characteristics of signal proteins are used to more tightly control the phenotypic expression of introduced SDFs. In particular, associating the appropriate signal sequence with a specific SDF allows sequestering of the protein in specific organelles (plastids, as an example), secretion outside of the cell, targeting interaction with particular receptors, etc. Hence, the inclusion of signal proteins in constructs involving the SDFs of the invention increases the range of manipulation of SDF phenotypic expression. The nucleotide sequence of the signal peptide is isolated from characterized genes using common molecular biological techniques or is synthesized in vitro.

[0904] In addition, the native signal peptide sequences, both amino acid and nucleotide, described in the Reference and Sequence tables is used to modulate polypeptide transport. Further variants of the native signal peptides described in the Reference and Sequence tables are contemplated. Insertions, deletions, or substitutions can be made. Such variants retain at least one of the functions of the native signal peptide as well as exhibiting some degree of sequence identity to the native sequence.

[0905] Also, fragments of the signal peptides of the invention are useful and are fused with other signal peptides of interest to modulate transport of a polypeptide.

V. Transformation Techniques

[0906] A wide range of techniques for inserting exogenous polynucleotides are known for a number of host cells, including, without limitation, bacterial, yeast, mammalian, insect and plant cells. Techniques for transforming a wide variety of higher plant species are well known and described in the technical and scientific literature. See, e.g. Weising et al., Ann. Rev. Genet. 22:421 (1988); and Christou, Euphytica, v. 85, n. 1-3:13-27, (1995).

[0907] DNA constructs of the invention are introduced into the genome of the desired plant host by a variety of conventional techniques. For example, the DNA construct is introduced directly into the genomic DNA of the plant cell using techniques such as electroporation and microinjection of plant cell protoplasts, or the DNA constructs are introduced directly to plant tissue using ballistic methods, such as DNA particle bombardment. Alternatively, the DNA constructs are combined with suitable T-DNA flanking regions and introduced into a conventional Agrobacterium tumefaciens host vector. The virulence functions of the Agrobacterium tumefaciens host will direct the insertion of the construct and adjacent marker into the plant cell DNA when the cell is infected by the bacteria (McCormac et al., Mol. Biotechnol. 8:199 (1997); Hamilton, Gene 200:107 (1997); Salomon et al. EMBO J 3:141 (1984); Herrera-Estrella et al. EMBO J 2:987 (1983)).

[0908] Microinjection techniques are known in the art and are described in the scientific and patent literature. The introduction of DNA constructs using polyethylene glycol precipitation is described in Paszkowski et al. EMBO J 3:2717 (1984). Electroporation techniques are described in Fromm et al. Proc. Natl Acad. Sci. USA 82:5824 (1985). Ballistic transformation techniques are described in Klein et al. Nature 327:773 (1987). Agrobacterium tumefaciens-mediated transformation techniques, including disarming and use of binary or co-integrate vectors, are well described in the scientific literature. See, for example Hamilton, C M., Gene 200:107 (1997); Müiller et al. Mol. Gen. Genet. 207:171 (1987); Komari et al. Plant J. 10:165 (1996); Venkateswarlu et al. Biotechnology 9:1103 (1991) and Gleave, A P., Plant Mol. Biol. 20:1203 (1992); Graves and Goldman, Plant Mol. Biol. 7:34 (1986) and Gould et al., Plant Physiology 95:426 (1991).

[0909] Transformed plant cells which are derived by any of the above transformation techniques are cultured to regenerate a whole plant that possesses the transformed genotype and thus the desired phenotype, for example seedlessness. Such regeneration techniques rely on manipulation of certain phytohormones in a tissue culture growth medium, typically relying on a biocide and/or herbicide marker which has been introduced together with the desired nucleotide sequences. Plant regeneration from cultured protoplasts is described in Evans et al., Protoplasts Isolation and Culture in “Handbook of Plant Cell Culture,” pp. 124-176, MacMillan Publishing Company, New York, 1983; and Binding, Regeneration of Plants, Plant Protoplasts, pp. 21-73, CRC Press, Boca Raton, 1988. Regeneration is also obtained from plant callus, explants, organs, or parts thereof. Such regeneration techniques are described generally in Klee et al. Ann. Rev. of Plant Phys. 38:467 (1987). Regeneration of monocots (rice) is described by Hosoyama et al. (Biosci. Biotechnol. Biochem. 58:1500 (1994)) and by Ghosh et al. (J. Biotechnol. 32:1 (1994)). The nucleic acids of the invention are used to confer desired traits on essentially any plant.

[0910] Thus, the invention has use over a broad range of plants, including species from the genera Anacardium, Arachis, Asparagus, Atropa, Avena, Brassica, Citrus, Citrullus, Capsicum, Carthamus, Cocos, Coffea, Cucumis, Cucurbita, Daucus, Elaeis, Fragaria, Glycine, Gossypium, Helianthus, Heterocallis, Hordeum, Hyoscyamus, Lactuca, Linum, Lolium,Lupinus, Lycopersicon, Malus, Manihot, Majorana, Medicago, Nicotiana, Olea, Oryza, Panieum, Pannesetum, Persea, Phaseolus, Pistachia, Pisum, Pyrus, Prunus, Raphanus, Ricinus, Secale, Senecio, Sinapis, Solanum, Sorghum, Theobromus, Trigonella, Triticum, Vicia, Vitis, Vigna, and, Zea.

[0911] One of skill recognizes that after the expression cassette is stably incorporated in transgenic plants and confirmed to be operable, it can be introduced into other plants by sexual crossing. Any of a number of standard breeding techniques are used, depending upon the species to be crossed.

[0912] The particular sequences of SDFs identified are provided in the attached Reference and Sequence tables.

### IX. DEFINITIONS

[0913] The following terms are utilized throughout this application:

[0914] Allelic variant: An “allelic variant” is an alternative form of the same SDF, which resides at the same chromosomal locus in the organism. Allelic variations can occur in any portion of the gene sequence, including regulatory regions. Allelic variants can arise by normal genetic variation in a population. Allelic variants can also be produced by genetic engineering methods. An allelic variant can be one that is found in a naturally occurring plant, including a cultivar or ecotype. An allelic variant may or may not give rise to a phenotypic change, and may or may not be expressed. An allele can result in a detectable change in the phenotype of the trait represented by the locus. A phenotypically silent allele can give rise to a product.
[0915] Alternatively spliced messages: Within the context of the current invention, “alternatively spliced messages” refers to mature mRNAs originating from a single gene with variations in the number and/or identity of exons, introns and/or intron-exon junctions.
[0916] Chimeric: The term “chimeric” is used to describe genes, as defined supra, or contructs wherein at least two of the elements of the gene or construct, such as the promoter and the coding sequence and/or other regulatory sequences and/or filler sequences and/or complements thereof, are heterologous to each other.
[0917] Constitutive Promoter: Promoters referred to herein as “constitutive promoters” actively promote transcription under most, but not necessarily all, environmental conditions and states of development or cell differentiation. Examples of constitutive promoters include the cauliflower mosaic virus (CaMV) 35S transcript initiation region and the 1′ or 2′ promoter derived from T-DNA of Agrobacterium tumefaciens, and other transcription initiation regions from various plant genes, such as the maize ubiquitin-1 promoter, known to those of skill.
[0918] Coordinately Expressed: The term “coordinately expressed,” as used in the current invention, refers to genes that are expressed at the same or a similar time and/or stage and/or under the same or similar environmental conditions.
[0919] Domain: Domains are fingerprints or signatures that can be used to characterize protein families and/or parts of proteins. Such fingerprints or signatures can comprise conserved (1) primary sequence, (2) secondary structure, and/or (3) three-dimensional conformation. Generally, each domain has been associated with either a family of proteins or motifs. Typically, these families and/or motifs have been correlated with specific in-vitro and/or in-vivo activities. A domain can be any length, including the entirety of the sequence of a protein. Detailed descriptions of the domains, associated families and motifs, and correlated activities of the polypeptides of the instant invention are described below. Usually, the polypeptides with designated domain(s) can exhibit at least one activity that is exhibited by any polypeptide that comprises the same domain(s).
[0920] Endogenous: The term “endogenous,” within the context of the current invention refers to any polynucleotide, polypeptide or protein sequence which is a natural part of a cell or organisms regenerated from said cell.
[0921] Exogenous: “Exogenous,” as referred to within, is any polynucleotide, polypeptide or protein sequence, whether chimeric or not, that is initially or subsequently introduced into the genome of an individual host cell or the organism regenerated from said host cell by any means other than by a sexual cross. Examples of means by which this can be accomplished are described below, and include Agrobacterium-mediated transformation (of dicots—e.g Salomon et al. EMBO J. 3:141 (1984); Herrera-Estrella et al. EMBO J. 2:987 (1983); of monocots, representative papers are those by Escudero et al., Plant J. 10:355 (1996), Ishida et al., Nature Biotechnology 14:745 (1996), May et al., Bio/Technology 13:486 (1995)), biolistic methods (Armaleo et al., Current Genetics 17:97 1990)), electroporation, in planta techniques, and the like. Such a plant containing the exogenous nucleic acid is referred to here as a T₀ for the primary transgenic plant and T₁ for the first generation. The term “exogenous” as used herein is also intended to encompass inserting a naturally found element into a non-naturally found location.
[0922] Filler sequence: As used herein, “filler sequence” refers to any nucleotide sequence that is inserted into DNA construct to evoke a particular spacing between particular components such as a promoter and a coding region and may provide an additional attribute such as a restriction enzyme site.
[0923] Gene: The term “gene,” as used in the context of the current invention, encompasses all regulatory and coding sequence contiguously associated with a single hereditary unit with a genetic function (see SCHEMATIC 1). Genes can include non-coding sequences that modulate the genetic function that include, but are not limited to, those that specify polyadenylation, transcriptional regulation, DNA conformation, chromatin conformation, extent and position of base methylation and binding sites of proteins that control all of these. Genes comprised of “exons” (coding sequences), which may be interrupted by “introns” (non-coding sequences), encode proteins. A gene's genetic function may require only RNA expression or protein production, or may only require binding of proteins and/or nucleic acids without associated expression. In certain cases, genes adjacent to one another may share sequence in such a way that one gene will overlap the other. A gene can be found within the genome of an organism, artificial chromosome, plasmid, vector, etc., or as a separate isolated entity.
[0924] Gene Family: “Gene family” is used in the current invention to describe a group of functionally related genes, each of which encodes a separate protein.
[0925] Heterologous sequences: “Heterologous sequences” are those that are not operatively linked or are not contiguous to each other in nature. For example, a promoter from corn is considered heterologous to an Arabidopsis coding region sequence. Also, a promoter from a gene encoding a growth factor from corn is considered heterologous to a sequence encoding the corn receptor for the growth factor. Regulatory element sequences, such as UTRs or 3′ end termination sequences that do not originate in nature from the same gene as the coding sequence originates from, are considered heterologous to said coding sequence. Elements operatively linked in nature and—contiguous to each other are not heterologous to each other. On the other hand, these same elements remain operatively linked but become heterologous if other filler sequence is placed between them. Thus, the promoter and coding sequences of a corn gene expressing an amino acid transporter are not heterologous to each other, but the promoter and coding sequence of a corn gene operatively linked in a novel manner are heterologous.
[0926] Homologous gene: In the current invention, “homologous gene” refers to a gene that shares sequence similarity with the gene of interest. This similarity may be in only a fragment of the sequence and often represents a functional domain such as, examples including without limitation a DNA binding domain, a domain with tyrosine kinase activity, or the like. The functional activities of homologous genes are not necessarily the same.
[0927] Inducible Promoter: An “inducible promoter” in the context of the current invention refers to a promoter which is regulated under certain conditions, such as light, chemical concentration, protein concentration, conditions in an organism, cell, or organelle, etc. A typical example of an inducible promoter, which can be utilized with the polynucleotides of the present invention, is PARSK1, the promoter from the Arabidopsis gene encoding a serine-threonine kinase enzyme, and which promoter is induced by dehydration, abscissic acid and sodium chloride (Wang and Goodman, Plant J 8:37 (1995)) Examples of environmental conditions that may affect transcription by inducible promoters include anaerobic conditions, elevated temperature, or the presence of light.
[0928] Intergenic region: “Intergenic region,” as used in the current invention, refers to nucleotide sequence occurring in the genome that separates adjacent genes.
[0929] Mutant gene: In the current invention, “mutant” refers to a heritable change in DNA sequence at a specific location. Mutants of the current invention may or may not have an associated identifiable function when the mutant gene is transcribed.
[0930] Orthologous Gene: In the current invention “orthologous gene” refers to a second gene that encodes a gene product that performs a similar function as the product of a first gene. The orthologous gene may also have a degree of sequence similarity to the first gene. The orthologous gene may encode a polypeptide that exhibits a degree of sequence similarity to a polypeptide corresponding to a first gene. The sequence similarity can be found within a functional domain or along the entire length of the coding sequence of the genes and/or their corresponding polypeptides.
[0931] Percentage of sequence identity: “Percentage of sequence identity,” as used herein, is determined by comparing two optimally aligned sequences over a comparison window, where the fragment of the polynucleotide or amino acid sequence in the comparison window may comprise additions or deletions (e.g., gaps or overhangs) as compared to the reference sequence (which does not comprise additions or deletions) for optimal alignment of the two sequences. The percentage is calculated by determining the number of positions at which the identical nucleic acid base or amino acid residue occurs in both sequences to yield the number of matched positions, dividing the number of matched positions by the total number of positions in the window of comparison and multiplying the result by 100 to yield the percentage of sequence identity. Optimal alignment of sequences for comparison may be conducted by the local homology algorithm of Smith and Waterman Add. APL. Math. 2:482 (1981), by the homology alignment algorithm of Needleman and Wunsch J. Mol. Biol. 48:443 (1970), by the search for similarity method of Pearson and Lipman Proc. Natl. Acad Sci. (USA) 85: 2444 (1988), by computerized implementations of these algorithms (GAP, BESTFIT, BLAST, PASTA, and TFASTA in the Wisconsin Genetics Software Package, Genetics Computer Group (GCG), 575 Science Dr., Madison, Wis.), or by inspection. Given that two sequences have been identified for comparison, GAP and BESTFIT are preferably employed to determine their optimal alignment. Typically, the default values of 5.00 for gap weight and 0.30 for gap weight length are used. The term “substantial sequence identity” between polynucleotide or polypeptide sequences refers to polynucleotide or polypeptide comprising a sequence that has at least 80% sequence identity, preferably at least 85%, more preferably at least 90% and most preferably at least 95%, even more preferably, at least 96%, 97%, 98% or 99% sequence identity compared to a reference sequence using the programs.
[0932] Plant Promoter: A “plant promoter” is a promoter capable of initiating transcription in plant cells and can drive or facilitate transcription of a fragment of the SDF of the instant invention or a coding sequence of the SDF of the instant invention. Such promoters need not be of plant origin. For example, promoters derived from plant viruses, such as the CaMV35S promoter or from Agrobacterium tumefaciens such as the T-DNA promoters, can be plant promoters. A typical example of a plant promoter of plant origin is the maize ubiquitin-1 (ubi-1)promoter known to those of skill.
[0933] Promoter: The term “promoter,” as used herein, refers to a region of sequence determinants located upstream from the start of transcription of a gene and which are involved in recognition and binding of RNA polymerase and other proteins to initiate and modulate transcription. A basal promoter is the minimal sequence necessary for assembly of a transcription complex required for transcription initiation. Basal promoters frequently include a “TATA box” element usually located between 15 and 35 nucleotides upstream from the site of initiation of transcription. Basal promoters also sometimes include a “CCAAT box” element (typically a sequence CCAAT) and/or a GGGCG sequence, usually located between 40 and 200 nucleotides, preferably 60 to 120 nucleotides, upstream from the start site of transcription.
[0934] Public sequence: The term “public sequence,” as used in the context of the instant application, refers to any sequence that has been deposited in a publicly accessible database. This term encompasses both amino acid and nucleotide sequences. Such sequences are publicly accessible, for example, on the BLAST databases on the NCBI FTP web site (accessible at ncbi.nlm.gov/blast). The database at the NCBI GTP site utilizes “gi” numbers assigned by NCBI as a unique identifier for each sequence in the databases, thereby providing a non-redundant database for sequence from various databases, including GenBank, EMBL, DBBJ, (DNA Database of Japan) and PDB (Brookhaven Protein Data Bank).
[0935] Regulatory Sequence: The term “regulatory sequence,” as used in the current invention, refers to any nucleotide sequence that influences transcription or translation initiation and rate, and stability and/or mobility of the transcript or polypeptide product. Regulatory sequences include, but are not limited to, promoters, promoter control elements, protein binding sequences, 5′ and 3′ UTRs, transcriptional start site, termination sequence, polyadenylation sequence, introns, certain sequences within a coding sequence, etc.
[0936] Related Sequences: “Related sequences” refer to either a polypeptide or a nucleotide sequence that exhibits some degree of sequence similarity with a sequence described by The Reference tables and The Sequence tables.
[0937] Scaffold Attachment Region (SAR): As used herein, “scaffold attachment region” is a DNA sequence that anchors chromatin to the nuclear matrix or scaffold to generate loop domains that can have either a transcriptionally active or inactive structure (Spiker and Thompson (1996) Plant Physiol. 110: 15-21).
[0938] Sequence-determined DNA fragments (SDFs): “Sequence-determined DNA fragments” as used in the current invention are isolated sequences of genes, fragments of genes, intergenic regions or contiguous DNA from plant genomic DNA or cDNA or RNA the sequence of which has been determined.
[0939] Signal Peptide: A “signal peptide” as used in the current invention is an amino acid sequence that targets the protein for secretion, for transport to an intracellular compartment or organelle or for incorporation into a membrane. Signal peptides are indicated in the tables and a more detailed description located below.
[0940] Specific Promoter: In the context of the current invention, “specific promoters” refers to a subset of inducible promoters that have a high preference for being induced in a specific tissue or cell and/or at a specific time during development of an organism. By “high preference” is meant at least 3-fold, preferably 5-fold, more preferably at least 10-fold still more preferably at least 20-fold, 50-fold or 100-fold increase in transcription in the desired tissue over the transcription in any other tissue. Typical examples of temporal and/or tissue specific promoters of plant origin that can be used with the polynucleotides of the present invention, are: PTA29, a promoter which is capable of driving gene transcription specifically in tapetum and only during anther development (Koltonow et al., Plant Cell 2:1201 (1990); RCc2 and RCc3, promoters that direct root-specific gene transcription in rice (Xu et al., Plant Mol. Biol. 27:237 (1995); TobRB27, a root-specific promoter from tobacco (Yamamoto et al., Plant Cell 3:371 (1991)). Examples of tissue-specific promoters under developmental control include promoters that initiate transcription only in certain tissues or organs, such as root, ovule, fruit, seeds, or flowers. Other suitable promoters include those from genes encoding storage proteins or the lipid body membrane protein, oleosin. A few root-specific promoters are noted above.
[0941] Stringency: “Stringency” as used herein is a function of probe length, probe composition (G+C content), and salt concentration, organic solvent concentration, and temperature of hybridization or wash conditions. Stringency is typically compared by the parameter Tₘ, which is the temperature at which 50% of the complementary molecules in the hybridization are hybridized, in terms of a temperature differential from Tₘ. High stringency conditions are those providing a condition of Tₘ-5° C. to Tₘ-10° C. Medium or moderate stringency conditions are those providing Tₘ-20° C. to Tₘ-29° C. Low stringency conditions are those providing a condition of Tₘ-40° C. to Tₘ-48° C. The relationship of hybridization conditions to Tₘ (in ° C.) is expressed in the mathematical equation
   Tₘ=81.5−16.6(log₁₀[Na⁺])+0.41(% G+C)−(600/N) (1)
   where N is the length of the probe. This equation works well for probes 14 to 70 nucleotides in length that are identical to the target sequence. The equation below for Tₘ of DNA-DNA hybrids is useful for probes in the range of 50 to greater than 500 nucleotides, and for conditions that include an organic solvent (formamide).
   Tₘ=81.5+16.6 log {[Na⁺]/(1+0.7[Na⁺])}+0.41(% G+C)−500/L 0.63(% formamide) (2)
   where L is the length of the probe in the hybrid. (P. Tijessen, “Hybridization with Nucleic Acid Probes” in Laboratory Techniques in Biochemistry and Molecular Biology, P. C. vand der Vliet, ed., c. 1993 by Elsevier, Amsterdam.) The Tₘ of equation (2) is affected by the nature of the hybrid; for DNA-RNA hybrids Tₘ is 10-15° C. higher than calculated, for RNA-RNA hybrids Tₘ is 20-25° C. higher. Because the Tₘ decreases about 1° C. for each 1% decrease in homology when a long probe is used (Bonner et al., J. Mol. Biol. 81:123 (1973)), stringency conditions can be adjusted to favor detection of identical genes or related family members.

[0942] Equation (2) is derived assuming equilibrium and therefore, hybridizations according to the present invention are most preferably performed under conditions of probe excess and for sufficient time to achieve equilibrium. The time required to reach equilibrium can be shortened by inclusion of a hybridization accelerator such as dextran sulfate or another high volume polymer in the hybridization buffer.

[0943] Stringency can be controlled during the hybridization reaction or after hybridization has occurred by altering the salt and temperature conditions of the wash solutions used. The formulas shown above are equally valid when used to compute the stringency of a wash solution. Preferred wash solution stringencies lie within the ranges stated above; high stringency is 5-8° C. below Tₘ, medium or moderate stringency is 26-29° C. below Tₘ and low stringency is 45-48° C. below Tₘ.
[0944] Substantially free of: A composition containing A is “substantially free of” B when at least 85% by weight of the total A+B in the composition is A. Preferably, A comprises at least about 90% by weight of the total of A+B in the composition, more preferably at least about 95% or even 99% by weight. For example, a plant gene or DNA sequence can be considered substantially free of other plant genes or DNA sequences.
[0945] Translational start site: In the context of the current invention, a “translational start site” is usually an ATG in the cDNA transcript, more usually the first ATG. A single cDNA, however, may have multiple translational start sites.
[0946] Transcription start site: “Transcription start site” is used in the current invention to describe the point at which transcription is initiated. This point is typically located about 25 nucleotides downstream from a TFIID binding site, such as a TATA box. Transcription can initiate at one or more sites within the gene, and a single gene may have multiple transcriptional start sites, some of which may be specific for transcription in a particular cell-type or tissue.
[0947] Untranslated region (UTR): A “UTR” is any contiguous series of nucleotide bases that is transcribed, but is not translated. These untranslated regions may be associated with particular functions such as increasing mRNA message stability. Examples of UTRs include, but are not limited to polyadenylation signals, terminations sequences, sequences located between the transcriptional start site and the first exon (5′ UTR) and sequences located between the last exon and the end of the mRNA (3′ UTR).
[0948] Variant: The term “variant” is used herein to denote a polypeptide or protein or polynucleotide molecule that differs from others of its kind in some way. For example, polypeptide and protein variants can consist of changes in amino acid sequence and/or charge and/or post-translational modifications (such as glycosylation, etc).

### X. EXAMPLES

[0949] The invention is illustrated by way of the following examples. The invention is not limited by these examples as the scope of the invention is defined solely by the claims following.

### Example 1

### cDNA Preparation

[0950] A number of the nucleotide sequences disclosed in the Reference and Sequence tables herein as representative of the SDFs of the invention are obtained by sequencing genomic DNA (gDNA) and/or cDNA from corn plants grown from HYBRID SEED # 35A19, purchased from Pioneer Hi-Bred International, Inc., Supply Management, P.O. Box 256, Johnston, Iowa 50131-0256.

[0951] A number of the nucleotide sequences disclosed in the Reference and Sequence tables herein as representative of the SDFs of the invention are also obtained by sequencing genomic DNA from Arabidopsis thaliana, Wassilewskija ecotype or by sequencing cDNA obtained from mRNA from such plants as described below. A.thaliana Wassilewskija is a true breeding strain. Seeds of the plant are available from the Arabidopsis Biological Resource Center at the Ohio State University, under the accession number CS2360. Seeds of this plant were deposited under the terms and conditions of the Budapest Treaty at the American Type Culture Collection, Manassas, Va. on Aug. 31, 1999, and were assigned ATCC No. PTA-595.

[0952] Other methods for cloning full-length cDNA are described, for example, by Seki et al., Plant Journal 15:707-720 (1998) “High-efficiency cloning of Arabidopsis full-length cDNA by biotinylated Cap trapper”; Maruyama et al., Gene 138:171 (1994) “Oligo-capping a simple method to replace the cap structure of eukaryotic mRNAs with oligoribonucleotides”; and WO 96/34981.

[0953] Tissues are, or each organ is, individually pulverized and frozen in liquid nitrogen. Next, the samples are homogenized in the presence of detergents and then centrifuged. The debris and nuclei are removed from the sample and more detergents were added to the sample. The sample is centrifuged and the debris is removed. Then the sample is applied to a 2M sucrose cushion to isolate polysomes. The RNA is isolated by treatment with detergents and proteinase K followed by ethanol precipitation and centrifugation. The polysomal RNA from the different tissues are pooled according to the following mass ratios: 15/15/1 for male inflorescences, female inflorescences and root, respectively. The pooled material is then used for cDNA synthesis by the methods described below.

[0954] Starting material for cDNA synthesis for the exemplary corn cDNA clones with sequences presented in the Reference and Sequence tables is poly(A)-containing polysomal mRNAs from inflorescences and root tissues of corn plants grown from HYBRID SEED #35A19. Male inflorescences and female (pre-and post-fertilization) inflorescences are isolated at various stages of development. Selection for poly(A) containing polysomal RNA is done using oligo d(T) cellulose columns, as described by Cox and Goldberg, “Plant Molecular Biology: A Practical Approach”, pp. 1-35, Shaw ed., c. 1988 by IRL, Oxford. The quality and the integrity of the polyA+RNAs are evaluated.

[0955] Starting material for cDNA synthesis for the exemplary Arabidopsis cDNA clones with sequences presented in the Reference and Sequence tables is polysomal RNA isolated from the top-most inflorescence tissues of Arabidopsis thaliana Wassilewskija (Ws.) and from roots of Arabidopsis thaliana Landsberg erecta (L. er.), also obtained from the Arabidopsis Biological Resource Center. Nine parts inflorescence to every part root is used, as measured by wet mass. Tissue is pulverized and exposed to liquid nitrogen. Next, the sample is homogenized in the presence of detergents and then centrifuged. The debris and nuclei are removed from the sample and more detergents are added to the sample. The sample is centrifuged and the debris removed and the sample applied to a 2M sucrose cushion to isolate polysomal RNA. Cox et al., “Plant Molecular Biology: A Practical Approach”, pp. 1-35, Shaw ed., c. 1988 by IRL, Oxford. The polysomal RNA is used for cDNA synthesis by the methods described below. Polysomal mRNA is then isolated as described above for corn cDNA. The quality of the RNA is assessed electrophoretically.

[0956] Following preparation of the mRNAs from various tissues as described above, selection of mRNA with intact 5′ ends and specific attachment of an oligonucleotide tag to the 5′ end of such mRNA is performed using either a chemical or enzymatic approach. Both techniques take advantage of the presence of the “cap” structure, which characterizes the 5′ end of most intact mRNAs and which comprises a guanosine generally methylated once, at the 7 position.

[0957] The chemical modification approach involves the optional elimination of the 2′,3′-cis diol of the 3′ terminal ribose, the oxidation of the 2′,3′-cis diol of the ribose linked to the cap of the 5′ ends of the mRNAs into a dialdehyde, and the coupling of the such obtained dialdehyde to a derivatized oligonucleotide tag. Further detail regarding the chemical approaches for obtaining mRNAs having intact 5′ ends is disclosed in International Application No. WO96/34981 published Nov. 7, 1996.

[0958] The enzymatic approach for ligating the oligonucleotide tag to the intact 5′ ends of mRNAs involves the removal of the phosphate groups present on the 5′ ends of uncapped incomplete mRNAs, the subsequent decapping of mRNAs having intact 5′ ends and the ligation of the phosphate present at the 5′ end of the decapped mRNA to an oligonucleotide tag. Further detail regarding the enzymatic approaches for obtaining mRNAs having intact 5′ ends is disclosed in Dumas Milne Edwards J. B. (Doctoral Thesis of Paris VI University, Le clonage des ADNc complets: difficultés et perspectives nouvelles. Apports pour l'étude de la régulation de l'expression de la tryptophane hydroxylase de rat, 20 Dec. 1993), EPO 625572 and Kato et al., Gene 150:243-250 (1994).

[0959] In both the chemical and the enzymatic approach, the oligonucleotide tag has a restriction enzyme site (e.g. an EcoRI site) therein to facilitate later cloning procedures. Following attachment of the oligonucleotide tag to the mRNA, the integrity of the mRNA is examined by performing a Northern blot using a probe complementary to the oligonucleotide tag.

[0960] For the mRNAs joined to oligonucleotide tags using either the chemical or the enzymatic method, first strand cDNA synthesis is performed using an oligo-dT primer with reverse transcriptase. This oligo-dT primer contains an internal tag of at least 4 nucleotides, which can be different from one mRNA preparation to another. Methylated dCTP is used for cDNA first strand synthesis to protect the internal EcoRi sites from digestion during subsequent steps. The first strand cDNA is precipitated using isopropanol after removal of RNA by alkaline hydrolysis to eliminate residual primers.

[0961] Second strand cDNA synthesis is conducted using a DNA polymerase, such as Klenow fragment and a primer corresponding to the 5′ end of the ligated oligonucleotide. The primer is typically 20-25 bases in length. Methylated dCTP is used for second strand synthesis in order to protect internal EcoRI sites in the cDNA from digestion during the cloning process.

[0962] Following second strand synthesis, the full-length cDNAs are cloned into a phagemid vector, such as pBlueScript™ (Stratagene). The ends of the full-length cDNAs are blunted with T4 DNA polymerase (Biolabs) and the cDNA is digested with EcoRI. Since methylated dCTP is used during cDNA synthesis, the EcoRI site present in the tag is the only hemi-methylated site; hence the only site susceptible to EcoRI digestion. In some instances, to facilitate subcloning, an Hind III adapter is added to the 3′ end of full-length cDNAs.

[0963] The full-length cDNAs are then size fractionated using either exclusion chromatography (AcA, Biosepra) or electrophoretic separation which yields 3 to 6 different fractions. The full-length cDNAs are then directionally cloned either into pBlueScript™ using either the EcoRI and Smal restriction sites or, when the Hind III adapter is present in the full-length cDNAs, the EcoRI and Hind III restriction sites. The ligation mixture is transformed, preferably by electroporation, into bacteria, which are then propagated under appropriate antibiotic selection.

[0964] Clones containing the oligonucleotide tag attached to full-length cDNAs are selected as follows.

[0965] The plasmid cDNA libraries made as described above are purified (e.g. by a column available from Qiagen). A positive selection of the tagged clones is performed as follows. Briefly, in this selection procedure, the plasmid DNA is converted to single stranded DNA using phage F1 gene II endonuclease in combination with an exonuclease (Chang et al., Gene 127:95 (1993)) such as exonuclease III or T7 gene 6 exonuclease. The resulting single stranded DNA is then purified using paramagnetic beads as described by Fry et al., Biotechniques 13: 124 (1992). Here the single stranded DNA is hybridized with a biotinylated oligonucleotide having a sequence corresponding to the 3′ end of the oligonucleotide tag. Preferably, the primer has a length of 20-25 bases. Clones including a sequence complementary to the biotinylated oligonucleotide are selected by incubation with streptavidin coated magnetic beads followed by magnetic capture. After capture of the positive clones, the plasmid DNA is released from the magnetic beads and converted into double stranded DNA using a DNA polymerase such as ThermoSequenase™ (obtained from Amersham Pharmacia Biotech). Alternatively, protocols such as the Gene Trapper™ kit (Gibco BRL) can be used. The double stranded DNA is then transformed, preferably by electroporation, into bacteria. The percentage of positive clones having the 5′ tag oligonucleotide is typically estimated to be between 90 and 98% from dot blot analysis.

[0966] Following transformation, the libraries are ordered in microtiter plates and sequenced. The Arabidopsis library was deposited at the American Type Culture Collection on Jan. 7, 2000 as “E-coli liba 010600” under the accession number PTA-1161.

### A. Example 2

### Southern Hybridizations

[0967] The SDFs of the invention are used in Southern hybridizations as described above. The following describes extraction of DNA from nuclei of plant cells, digestion of the nuclear DNA and separation by length, transfer of the separated fragments to membranes, preparation of probes for hybridization, hybridization and detection of the hybridized probe.

[0968] The procedures described herein are used to isolate related polynucleotides or for diagnostic purposes. Moderate stringency hybridization conditions, as defined above, are described in the present example. These conditions result in detection of hybridization between sequences having at least 70% sequence identity. As described above, the hybridization and wash conditions can be changed to reflect the desired percenatge of sequence identity between probe and target sequences that can be detected.

[0969] In the following procedure, a probe for hybridization is produced from two PCR reactions using two primers from genomic sequence of Arabidopsis thaliana. As described above, the particular template for generating the probe can be any desired template.

[0970] The first PCR product is assessed to validate the size of the primer to assure it is of the expected size. Then the product of the first PCR is used as a template, with the same pair of primers used in the first PCR, in a second PCR that produces a labeled product used as the probe.

[0971] Fragments detected by hybridization, or other bands of interest, are isolated from gels used to separate genomic DNA fragments by known methods for further purification and/or characterization.

Buffers for Nuclear DNA Extraction

[0972] 1. 10× HB

| | 1000 ml | |
|---|---|---|
| 40 mM spermidine | 10.2 g | Spermine (Sigma S-2876) and |
| | | spermidine (Sigma S-2501) |
| 10 mM spermine | 3.5 g | Stabilize chromatin and the nuclear |
| | | membrane |
| 0.1 M EDTA | 37.2 g | EDTA inhibits nuclease |
| (disodium) | | |
| 0.1 M Tris | 12.1 g | Buffer |
| 0.8 M KCl | 59.6 g | Adjusts ionic strength for stability of |
| | | nuclei |

[0973] Adjust pH to 9.5 with 10 N NaOH. It appears that there is a nuclease present in leaves. Use of pH 9.5 appears to inactivate this nuclease.
[0974] 2. 2 M sucrose (684 g per 1000 ml)
   [0975] Heat about half the final volume of water to about 50° C. Add the sucrose slowly then bring the mixture to close to final volume; stir constantly until it has dissolved. Bring the solution to volume.

[0976] 3. Sarkosyl solution (lyses nuclear membranes)

| | 1000 ml |
|---|---|
| N-lauroyl sarcosine (Sarkosyl) | 20.0 g |
| 0.1 M Tris | 12.1 g |
| 0.04 M EDTA (Disodium) | 14.9 g |

[0977] Adjust the pH to 9.5 after all the components are dissolved and bring up to the proper volume.
[0978] 4. 20% Triton X-100
   [0979] 80 ml Triton X-100
   [0980] 320 ml 1×HB (w/o β-ME and PMSF)
   [0981] Prepare in advance; Triton takes some time to dissolve
      A. Procedure

[0982] 1. Prepare 1× “H” buffer (keep ice-cold during use)

| | 1000 ml |
|---|---|
| 10X HB | 100 ml |
| 2 M sucrose | 250 ml a non-ionic osmoticum |
| Water | 634 ml |

[0983] Added just before use:

| | |
|---|---|
| 100 mM PMSF* | 10 ml a protease inhibitor; protects nuclear |
| | membrane proteins |
| β-mercaptoethanol | 1 ml inactivates nuclease by reducing |
| | disulfide bonds |

*100 mM PMSF (phenyl methyl sulfonyl fluoride, Sigma P-7626) (add 0.0875 g to 5 ml 100% ethanol)

[0984] 2. Homogenize the tissue in a blender (use 300-400 ml of 1×HB per blender). Be sure that you use 5-10 ml of HB buffer per gram of tissue. Blenders generate heat so be sure to keep the homogenate cold. It is necessary to put the blenders in ice periodically.
[0985] 3. Add the 20% Triton X-100 (25 ml per liter of homogenate) and gently stir on ice for 20 min. This lyses plastid, but not nuclear, membranes.
[0986] 4. Filter the tissue suspension through several nylon filters into an ice-cold beaker. The first filtration is through a 250-micron membrane; the second is through an 85-micron membrane; the third is through a 50-micron membrane; and the fourth is through a 20-micron membrane. Use a large funnel to hold the filters. Filtration can be sped up by gently squeezing the liquid through the filters.
[0987] 5. Centrifuge the filtrate at 1200 ×g for 20 min. at 4° C. to pellet the nuclei.
[0988] 6. Discard the dark green supernatant. The pellet will have several layers to it. One is starch; it is white and gritty. The nuclei are gray and soft. In the early steps, there may be a dark green and somewhat viscous layer of chloroplasts.

[0989] Wash the pellets in about 25 ml cold H buffer (with Triton X-100) and resuspend by swirling gently and pipetting. After the pellets are resuspended pellet the nuclei again at 1200-1300 ×g. Discard the supernatant.
[0990] Repeat the wash 3-4 times until the supernatant has changed from a dark green to a pale green. This usually happens after 3 or 4 resuspensions. At this point, the pellet is typically grayish white and very slippery. The Triton X-100 in these repeated steps helps to destroy the chloroplasts and mitochondria that contaminate the prep.
[0991] Resuspend the nuclei for a final time in a total of 15 ml of H buffer and transfer the suspension to a sterile 125 ml Erlenmeyer flask.
[0992] 7. Add 15 ml, dropwise, cold 2% Sarkosyl, 0.1 M Tris, 0.04 M EDTA solution (pH 9.5) while swirling gently. This lyses the nuclei. The solution will become very viscous.
[0993] 8. Add 30 grams of CsCl and gently swirl at room temperature until the CsCl is in solution. The mixture will be gray, white and viscous.
[0994] 9. Centrifuge the solution at 11,400×g at 4° C. for at least 30 min. The longer this spin is, the firmer the protein pellicle.
[0995] 10. The result is typically a clear green supernatant over a white pellet, and (perhaps) under a protein pellicle. Carefully remove the solution under the protein pellicle and above the pellet. Determine the density of the solution by weighing I ml of solution and add CsCl if necessary to bring to 1.57 g/ml. The solution contains dissolved solids (sucrose etc) and the refractive index alone will not be an accurate guide to CsCl concentration.
[0996] 11. Add 20 μl of 10 mg/ml EtBr per ml of solution.
[0997] 12. Centrifuge at 184,000×g for 16 to 20 hours in a fixed-angle rotor.
[0998] 13. Remove the dark red supernatant that is at the top of the tube with a plastic transfer pipette and discard. Carefully remove the DNA band with another transfer pipette. The DNA band is usually visible in room light; otherwise, use a long wave UV light to locate the band.
[0999] 14. Extract the ethidium bromide (EtBr) with isopropanol saturated with water and salt. Once the solution is clear, extract at least two more times to ensure that all of the EtBr is gone. Be very gentle, as it is very easy to shear the DNA at this step. This extraction may take a while because the DNA solution tends to be very viscous. If the solution is too viscous, dilute it with TE.
[1000] 15. Dialyze the DNA for at least two days against several changes (at least three times) of TE (10 mM Tris, 1 mM EDTA, pH 8) to remove the cesium chloride.
[1001] 16. Remove the dialyzed DNA from the tubing. If the dialyzed DNA solution contains a lot of debris, centrifuge the DNA solution at least at 2500 ×g for 10 min. and carefully transfer the clear supernatant to a new tube. Read the A260 concentration of the DNA.
[1002] 17. Assess the quality of the DNA by agarose gel electrophoresis (1% agarose gel) of the DNA. Load 50 ng and 100 ng (based on the OD reading) and compare it with known and good quality DNA. Undigested lambda DNA and a lambda-HindIII-digested DNA are good molecular weight makers.
   Protocol for Digestion of Genomic DNA
   Protocol:
[1003] 1. The relative amounts of DNA for different crop plants that provide approximately a balanced number of genome equivalent is given in Table 3 below. Note that due to the size of the wheat genome, wheat DNA will be underrepresented. Lambda DNA provides a useful control for complete digestion.
[1004] 2. Precipitate the DNA by adding 3 volumes of 100% ethanol. Incubate at −20° C. for at least two hours. Yeast DNA can be purchased and made up at the necessary concentration, therefore no precipitation is necessary for yeast DNA.
[1005] 3. Centrifuge the solution at 11,400 ×g for 20 min. Decant the ethanol carefully (be careful not to disturb the pellet). Be sure that the residual ethanol is completely removed either by vacuum desiccation or by carefully wiping the sides of the tubes with a clean tissue.
[1006] 4. Resuspend the pellet in an appropriate volume of water. Be sure the pellet is fully resuspended before proceeding to the next step. This may take about 30 min.
[1007] 5. Add the appropriate volume of 10× reaction buffer provided by the manufacturer of the restriction enzyme to the resuspended DNA followed by the appropriate volume of enzymes. Be sure to mix it properly by slowly swirling the tubes.
[1008] 6. Set-up the lambda digestion-control for each DNA that you are digesting.
[1009] 7. Incubate both the experimental and lambda digests overnight at 37° C. Spin down condensation in a microfuge before proceeding.
[1010] 8. After digestion, add 2 μl of loading dye (typically 0.25% bromophenol blue, 0.25% xylene cyanol in 15% Ficoll or 30% glycerol) to the lambda-control digests and load in 1% TPE-agarose gel (TPE is 90 mM Tris-phosphate, 2 mM EDTA, pH 8). If the lambda DNA in the lambda control digests are completely digested, proceed with the precipitation of the genomic DNA in the digests.
[1011] 9. Precipitate the digested DNA by adding 3 volumes of 100% ethanol and incubating in—−20° C. for at least 2 hours (preferably overnight).
   [1012] EXCEPTION: Arabidopsis and yeast DNA are digested in an appropriate volume; they don't have to be precipitated.

[1013] 10. Resuspend the DNA in an appropriate volume of TE (e.g., 22 μl×50 blots=1100 μl) and an appropriate volume of 10× loading dye (e.g., 2.4 μl×50 blots=120 μl). Be careful in pipetting the loading dye—it is viscous. Be sure you are pipetting the correct volume.

TABLE 3
Some guide points in digesting genomic DNA.

| | | | Genome | |
|---|---|---|---|---|
| | | Size Relative | Equivalent to | Amount |
| | | to | 2 μg | of DNA |
| Species | Genome Size | Arabidopsis | Arabidopsis DNA | per blot |
| Arabidopsis | 120 Mb | 1X | 1X | 2 μg |
| Brassica | 1,100 Mb | 9.2X | 0.54X | 10 μg |
| Corn | 2,800 Mb | 23.3X | 0.43X | 20 μg |
| Cotton | 2,300 Mb | 19.2X | 0.52X | 20 μg |
| Oat | 11,300 Mb | 94X | 0.11X | 20 μg |
| Rice | 400 Mb | 3.3X | 0.75X | 5 μg |
| Soybean | 1,100 Mb | 9.2X | 0.54X | 10 μg |
| Sugarbeet | 758 Mb | 6.3X | 0.8X | 10 μg |
| Sweetclover | 1,100 Mb | 9.2X | 0.54X | 10 μg |
| Wheat | 16,000 Mb | 133X | 0.08X | 20 μg |
| Yeast | 15 Mb | 0.12X | 1X | 0.25 μg |

Protocol for Southern Blot Analysis

[1014] The digested DNA samples are electrophoresed in 1% agarose gels in 1×TPE buffer. Low voltage, overnight separations are preferred. The gels are stained with EtBr and photographed.
[1015] 1. For blotting the gels, first incubate the gel in 0.25 N HCl (with gentle shaking) for about 15 min.
[1016] 2. Then briefly rinse with water. The DNA is denatured by 2 incubations. Incubate (with shaking) in 0.5 M NaOH in 1.5 M NaCl for 15 min.
[1017] 3. The gel is then briefly rinsed in water and neutralized by incubating twice (with shaking) in 1.5 M Tris pH 7.5 in 1.5 M NaCl for 15 min. p0 4. A nylon membrane is prepared by soaking it in water for at least 5 min, then in 6×SSC for at least 15 min. before use. (20×SSC is 175.3 g NaCi, 88.2 g sodium citrate per liter, adjusted to pH 7.0.)
[1018] 5. The nylon membrane is placed on top of the gel and all bubbles in between are removed. The DNA is blotted from the gel to the membrane using an absorbent medium, such as paper toweling and 6×SCC buffer. After the transfer, the membrane may be lightly brushed with a gloved hand to remove any agarose sticking to the surface.
[1019] 6. The DNA is then fixed to the membrane by UV crosslinking and baking at 80° C. The membrane is stored at 4° C. until use.
   B. Protocol for PCR Amplification of Genomic Gragments in Arabidopsis

[1020] Amplification Procedures:

[1021] 1. Mix the following in a 0.20 ml PCR tube or 96-well PCR plate:

| Volume | Stock | Final Amount or Conc. |
|---|---|---|
| 0.5 μl | ˜10 ng/μl genomic DNA¹ | 5 ng |
| 2.5 μl | 10X PCR buffer | 20 mM Tris, 50 mM KCl |
| 0.75 μl | 50 mM MgCl₂ | 1.5 mM |
| 1 μl | 10 pmol/μl Primer 1 (Forward) | 10 pmol |
| 1 μl | 10 pmol/μl Primer 2 (Reverse) | 10 pmol |
| 0.5 μl | 5 mM dNTPs | 0.1 mM |
| 0.1 μl | 5 units/μl Platinum Taq ™ (Life | 1 units |
| | Technologies, Gaithersburg, MD) | |
| | DNA Polymerase | |
| (to 25 μl) | Water | |

¹Arabidopsis DNA is used in the present experiment, but the procedure is a general one.

[1022] 2. The template DNA is amplified using a Perkin Elmer 9700 PCR machine:

[1023] 1) 94° C. for 10 min. followed by

| 2) 5 cycles: | 3) 5 cycles: | 4) 25 cycles: |
|---|---|---|
| 94° C. - 30 sec | 94° C. - 30 sec | 94° C. - 30 sec |
| 62° C. - 30 sec | 58° C. - 30 sec | 53° C. - 30 sec |
| 72° C. - 3 min | 72° C. - 3 min | 72° C. - 3 min |

[1024] 5) 72° C. for 7 min. Then the reactions are stopped by chilling to 4° C.

[1025] The procedure can be adapted to a multi-well format if necessary.

Quantification and Dilution of PCR Products:

[1026] 1. The product of the PCR is analyzed by electrophoresis in a 1% agarose gel. A linearized plasmid DNA can be used as a quantification standard (usually at 50, 100, 200, and 400 ng). These will be used as references to approximate the amount of PCR products. HindlIl-digested Lambda DNA is useful as a molecular weight marker. The gel can be run fairly quickly; e.g., at 100 volts. The standard gel is examined to determine that the size of the PCR products is consistent with the expected size and if there are significant extra bands or smeary products in the PCR reactions.
[1027] 2. The amounts of PCR products are estimated on the basis of the plasmid standard.
[1028] 3. For the small number of reactions that produce extraneous bands, a small amount of DNA from bands with the correct size can be isolated by dipping a sterile 10-μl tip into the band while viewing though a UV Transilluminator. The small amount of agarose gel (with the DNA fragment) is used in the labeling reaction.
   C. Protocol for PCR-DIG-Labeling of DNA
   Solutions:
   [1029] Reagents in PCR reactions (diluted PCR products, 10× PCR Buffer, 50 mM MgCl₂, 5 U/μl Platinum Taq Polymerase, and the primers)
   [1030] 10× dNTP+DIG-11-dUTP [1:5]: (2 mM dATP, 2 mM dCTP, 2 mM dGTP, 1.65 mM dTTP, 0.35 mM DIG-11-dUTP)
   [1031] 10× dNTP+DIG-11-dUTP [1:10]: (2 mM dATP, 2 mM dCTP, 2 mM dGTP, 1.81 mM dTTP, 0.19 mM DIG-11-dUTP)
   [1032] 10× dNTP+DIG-11-dUTP [1:15]: (2 mM dATP, 2 mM dCTP, 2 mM dGTP, 1.875 mM dTTP, 0.125 mM DIG-11-dUTP)
   [1033] TE buffer (10 mM Tris, 1 mM EDTA, pH 8)
   [1034] Maleate buffer: In 700 ml of deionized distilled water, dissolve 11.61 g maleic acid and 8.77 g NaCl. Add NaOH to adjust the pH to 7.5. Bring the volume to 1 L. Stir for 15 min. and sterilize.
   [1035] 10% blocking solution: In 80 ml deionized distilled water, dissolve 1.16 g maleic acid. Next, add NaOH to adjust the pH to 7.5. Add 10 g of the blocking reagent powder (Boehringer Mannheim, Indianapolis, Ind., Cat. no. 1096176). Heat to 60° C. while stirring to dissolve the powder. Adjust the volume to 100 ml with water. Stir and sterilize.
   [1036] 1% blocking solution: Dilute the 10% stock to 1% using the maleate buffer.
   [1037] Buffer 3 (100 mM Tris, 100 mM NaCl, 50 mM MgCl₂, pH 9.5). Prepared from autoclaved solutions of 1M Tris pH 9.5, 5 M NaCl, and 1 M MgCl₂ in autoclaved distilled water.
      Procedure:

[1038] 1. PCR reactions are performed in 25 μl volumes containing:

| | |
|---|---|
| PCR buffer | 1X |
| MgCl₂ | 1.5 mM |
| 10X dNTP + DIG-11-dUTP | 1X (please see the note below) |
| Platinum Taq ™ Polymerase | 1 unit |
| 10 pg probe DNA | |
| 10 pmol primer 1 | |

| | |
|---|---|
| Note: | |
| | Use for: |
| 10X dNTP + DIG-11-dUTP (1:5) | <1 kb |
| 10X dNTP + DIG-11-dUTP (1:10) | 1 kb to 1.8 kb |
| 10X dNTP + DIG-11-dUTP (1:15) | >1.8 kb |

[1039] 2. The PCR reaction uses the following amplification cycles:

[1040] 1) 94° C. for 10 min.

| 2) 5 cycles: | 3) 5 cycles: | 4) 25 cycles: |
|---|---|---|
| 95° C. - 30 sec | 95° C. - 30 sec | 95° C. - 30 sec |
| 61° C. - 1 min | 59° C. - 1 min | 51° C. - 1 min |
| 73° C. - 5 min | 75° C. - 5 min | 73° C. - 5 min |

[1041] 5) 72° C. for 8 min. The reactions are terminated by chilling to 4° C. (hold).
[1042] 3. The products are analyzed by electrophoresis- in a 1% agarose gel, comparing to an aliquot of the unlabelled probe starting material.
[1043] 4. The amount of DIG-labeled probe is determined as follows:

[1044] Make serial dilutions of the diluted control DNA in dilution buffer (TE: 10 mM Tris and 1 mM EDTA, pH 8) as shown in the following table:

| DIG-labeled control | | Final Conc. (Dilution |
|---|---|---|
| DNA starting conc. | Stepwise Dilution | Name) |
| 5 ng/μl | 1 μl in 49 μl TE | 100 pg/μl (A) |
| 100 pg/μl (A) | 25 μl in 25 μl TE | 50 pg/μl (B) |
| 50 pg/μl (B) | 25 μl in 25 μl TE | 25 pg/μl (C) |
| 25 pg/μl (C) | 20 μl in 30 μl TE | 10 pg/μl (D) |

[1045] a. Serial deletions of a DIG-labeled standard DNA ranging from 100 pg to 10 pg are spotted onto a positively charged nylon membrane, marking the membrane lightly with a pencil to identify each dilution.
[1046] b. Serial dilutions (e.g., 1:50, 1:2500, 1:10,000) of the newly labeled DNA probe are spotted.
[1047] c. The membrane is fixed by UV crosslinking.
[1048] d. The membrane is wetted with a small amount of maleate buffer and then incubated in 1% blocking solution for 15 min at room temp.
[1049] e. The labeled DNA is then detected using alkaline phosphatase conjugated anti-DIG antibody (Boehringer Mannheim, Indianapolis, Ind., cat. no. 1093274) and an NBT substrate according to the manufacture's instruction.
[1050] f. Spot intensities of the control and experimental dilutions are then compared to estimate the concentration of the PCR-DIG-labeled probe.
   D. Prehybridization and Hybridization of Southern Blots

[1051] Solutions:

| | |
|---|---|
| 100% Formamide | purchased from Gibco |
| 20X SSC | (1X = 0.15 M NaCl, 0.015 M Na₃citrate) |
| per L: | 175 g NaCl |
| | 87.5 g Na₃citrate•2H₂0 |

[1052] 20% Sarkosyl (N-lauroyl-sarcosine)
[1053] 20% SDS (sodium dodecyl sulphate)
[1054] 10% Blocking Reagent: In 80 ml deionized distilled water, dissolve 1.16 g maleic acid. Next, add NaOH to adjust the pH to 7.5. Add 10 g of the blocking reagent powder.
[1055] Heat to 60° C. while stirring to dissolve the powder. Adjust the volume to 100 ml with water. Stir and sterilize.

[1056] Prehybridization Mix:

| Final | | Volume | |
|---|---|---|---|
| Concentration | Components | (per 100 ml) | Stock |
| 50% | Formamide | 50 ml | 100% |
| 5X | SSC | 25 ml | 20X |
| 0.1% | Sarkosyl | 0.5 ml | 20% |
| 0.02% | SDS | 0.1 ml | 20% |
| 2% | Blocking Reagent | 20 ml | 10% |
| | Water | 4.4 ml | |

General Procedures:
[1057] 1. Place the blot in a heat-sealable plastic bag and add an appropriate volume of prehybridization solution (30 ml/100 cm²) at room temperature. Seal the bag with a heat sealer, avoiding bubbles as much as possible. Lay down the bags in a large plastic tray (one tray can accommodate at least 4-5 bags). Ensure that the bags are lying flat in the tray so that the prehybridization solution is evenly distributed throughout the bag. Incubate the blot for at least 2 hours with gentle agitation using a waver shaker.
[1058] 2. Denature DIG-labeled DNA probe by incubating for 10 min. at 98° C. using the PCR machine and immediately cool it to 4° C.
[1059] 3. Add probe to prehybridization solution (25 ng/ml; 30 ml=750 ng total probe) and mix well but avoid foaming. Bubbles may lead to background.
[1060] 4. Pour off the prehybridization solution from the hybridization bags and add new prehybridization and probe solution mixture to the bags containing the membrane.
[1061] 5. Incubate with gentle agitation for at least 16 hours.
[1062] 6. Proceed to medium stringency post-hybridization wash:
   [1063] Three times for 20 min. each with gentle agitation using 1×SSC, 1% SDS at 60° C.
   [1064] All wash solutions must be prewarmed to 60° C. Use about 100 ml of wash solution per membrane.
   [1065] To avoid background keep the membranes fully submerged to avoid drying in spots; agitate sufficiently to avoid having membranes stick to one another.
[1066] 7. After the wash, proceed to immunological detection and CSPD development.
   E. Procedure for Immunological Detection with CSPD

[1067] Solutions:

| | |
|---|---|
| Buffer 1: | Maleic acid buffer (0.1 M maleic acid, 0.15 M |
| | NaCl; adjusted to pH 7.5 with NaoH) |
| Washing buffer: | Maleic acid buffer with 0.3% (v/v) Tween 20. |
| Blocking stock solution | 10% blocking reagent in buffer 1. Dissolve |
| | (10X concentration): blocking reagent powder |
| | (Boehringer Mannheim, Indianapolis, IN, |
| | cat. no. 1096176) by constantly stirring on |
| | a 65° C. heating block or heat in a |
| | microwave, autoclave and store at 4° C. |
| Buffer 2 | Dilute the stock solution 1:10 in Buffer 1. |
| (1X blocking solution): | |
| Detection buffer: | 0.1 M Tris, 0.1 M NaCl, pH 9.5 |

Procedure:
[1068] 1. After the post-hybridization wash the blots are briefly rinsed (1-5 min.) in the maleate washing buffer with gentle shaking.
[1069] 2. Then the membranes are incubated for 30 min. in Buffer 2 with gentle shaking.
[1070] 3. Anti-DIG-AP conjugate (Boehringer Mannheim, Indianapolis, Ind., cat. no. 1093274) at 75 mU/ml (1:10,000) in Buffer 2 is used for detection. 75 ml of solution can be used for 3 blots.
[1071] 4. The membrane is incubated for 30 min. in the antibody solution with gentle shaking.
[1072] 5. The membrane are washed twice in washing buffer with gentle shaking. About 250 mls is used per wash for 3 blots.
[1073] 6. The blots are equilibrated for 2-5 min in 60 ml detection buffer.
[1074] 7. Dilute CSPD (1:200) in detection buffer. (This can be prepared ahead of time and stored in the dark at 4° C.).
   [1075] The following steps must be done individually. Bags (one for detection and one for exposure) are generally cut and ready before doing the following steps.
[1076] 8. The blot is carefully removed from the detection buffer and excess liquid removed without drying the membrane. The blot is immediately placed in a bag and 1.5 ml of CSPD solution is added. The CSPD solution can be spread over the membrane. Bubbles present at the edge and on the surface of the blot are typically removed by gentle rubbing. The membrane is incubated for 5 min. in CSPD solution.
[1077] 9. Excess liquid is removed and the membrane is blotted briefly (DNA side up) on Whatman 3MM paper. Do not let the membrane dry completely.
[1078] 10. Seal the damp membrane in a hybridization bag and incubate for 10 min at 37° C. to enhance the luminescent reaction.
[1079] 11. Expose for 2 hours at room temperature to X-ray film. Multiple exposures can be taken. Luminescence continues for at least 24 hours and signal intensity increases during the first hours.

### Example 3

### Microaray Experiments and Results

1. Sample Tissue Preparation

(a) Abscissic Acid (ABA)

[1080] Seeds of Arabidopsis thaliana (ecotype Wassilewskija) are sown in trays and left at 4° C. for 4 days to vernalize. They are then transferred to a growth chamber having grown 16 hr light/8 hr dark, 13,000 LUX, 70% humidity, and 20° C. and watered twice a week with 1 L of 1× Hoagland's solution. Approximately 1,000 14 day old plants are sprayed with 200-250 mls of 100 μM ABA in a 0.02% solution of the detergent Silwet L-77. Whole seedlings, including roots, are harvested within a 15 to 20 minute time period at 1 hr and 6 hr after treatment, flash-frozen in liquid nitrogen and stored at 80° C.

[1081] Seeds of maize hybrid 35A (Pioneer) are sown in water-moistened sand in flats (10 rows, 5-6 seed/row) and covered with clear, plastic lids before being placed in a growth chamber having 16 hr light (25° C.)/8 hr dark (20° C.), 75% relative humidity and 13,000-14,000 LUX Covered flats are watered every three days for 7 days. Seedlings are carefully removed from the sand and placed in 1-liter beakers with 100 μM ABA for treatment. Control plants are treated with water. After 6 hr and 24 hr, aerial and root tissues are separated and flash frozen in liquid nitrogen prior to storage at −80° C.

(b) Ap2

[1082] Seeds of Arabidopsis thaliana (ecotype Landesberg erecta) and floral mutant apetala2 (Jofuku et al., 1994, Plant Cell 6:1211-1225) are sown in pots and left at 4° C. for two to three days to vernalize. They are then transferred to a growth chamber. Plants are grown under long-day (16 hr light, 8 hr dark) conditions 7000-8000 LUX light intensity, 70% humidity and 22° C. temperature. Inflorescences containing immature floral buds (stages 1-7; Bowman, 1994) as wel as the inflorescence meristem are harvested and flashfrozen. Polysomal polyA+RNA is isolated from tissue according to Cox and Goldberg, 1988).

(c) Arabidopsis Endosperm

[1083] mea/mea Fruits 0-10 mm

[1084] Seeds of Arabidopsis thaliana heterozygous for the fertilization-independent endosperml (fiel) [Ohad et al., 1996; ecotype Landsberg erecta (Ler)] are sown in pots and left at 4° C. for two to three days to vernalize. Kiyosue et al. (1999) subsequently determined that fiel was allelic to the gametophytic maternal effect mutant medea (Grossniklaus et al., 1998). Imbibed seeds are then transferred to a growth chamber. Plants are grown under long-day (16 hr light: 8 hr dark) conditions, 7000-8000 LUX light intensity, 70% humidity, and 22° C. temperature. 1-2 siliques (fruits) bearing developing seeds just prior to dessication [9 days after flowering (DAF)] are selected from each plant and are hand-dissected to identify wild-type, mea/+heterozygotes, and mea/mea homozygous mutant plants. At this stage, homozygous mea/mea plants produce short siliques that contain >70% aborted seed and can be distinguished from those produced by wild-type (100% viable seed) and mea/+heterozygous (50% viable seed) plants (Ohad et al., 1996; Grossniklaus et al., 1998; Kiyosue et al., 1999). Siliques 0-10 mm in length containing developing seeds 0-9 DAF produced by homozygous mea/mea plants are harvested and flash frozen in liquid nitrogen.

[1085] Pods 0-10 mm (Control Tissue for Sample 70)

[1086] Seeds of Arabidopsis thaliana heterozygous for the fertilization-independent endosperml (fiel) [Ohad et al., 1996; ecotype Landsberg erecta (Ler)] are sown in pots and left at 4° C. for two to three days to vernalize. Kiyosue et al. (1999) subsequently determined that fiel was allelic to the gametophytic maternal effect mutant medea (Grossniklaus et al., 1998). Imbibed seeds are then transferred to a growth chamber. Plants are grown under long-day (16 hr light: 8 hr dark) conditions, 7000-8000 LUX light intensity, 70% humidity, and 22° C. temperature. 1-2 siliques (fruits) bearing developing seeds just prior to dessication [9 days after flowering (DAF)] are selected from each plant and are hand-dissected to identify wild-type, mea/+heterozygotes, and mea/mea homozygous mutant plants. At this stage, homozygous mea/mea plants produce short siliques that contain >70% aborted seed and can be distinguished from those produced by wild-type (100% viable seed) and mea/+heterozygous (50% viable seed) plants (Ohad et al., 1996; Grossniklaus et al., 1998; Kiyosue et al., 1999). Siliques 0-10 mm in length containing developing seeds 0-9 DAF produced by segregating wild-type plants are opened and the seeds removed. The remaining tissues (pods minus seed) are harvested and flash frozen in liquid nitrogen.

(d) Arabidopsis Seeds

[1087] Fruits (pod+seed) 0-5 mm

[1088] Seeds of Arabidopsis thaliana (ecotype Wassilewskija) are sown in pots and left at 4° C. for two to three days to vernalize. They are then transferred to a growth chamber. Plants are grown under long-day (16 hr light: 8 hr dark) conditions, 7000-8000 LUX light intensity, 70% humidity, and 22° C. temperature. 3-4 siliques (fruits) bearing developing seeds are selected from at least 3 plants and are hand-dissected to determine what developmental stage(s) is represented by the enclosed embryos. Description of the stages of Arabidopsis embryogenesis used in this determination were summarized by Bowman (1994). Silique lengths are then determined and used as an approximate determinant for embryonic stage. Siliques 0-5 mm in length containing post fertilization through pre-heart stage [0-72 hours after fertilization (HAF)] embryos are harvested and flash frozen in liquid nitrogen.

[1089] Fruits(pod+seed) 5-10 mm

[1090] Seeds of Arabidopsis thaliana (ecotype Wassilewskija) are sown in pots and left at 4° C. for two to three days to vernalize. They are then transferred to a growth chamber. Plants are grown under long-day (16 hr light: 8 hr dark) conditions, 7000-8000 LUX light intensity, 70% humidity, and 22° C. temperature. 3-4 siliques (fruits) bearing developing seeds were selected from at least 3 plants and are hand-dissected to determine what developmental stage(s) are represented by the enclosed embryos. Description of the stages of Arabidopsis embryogenesis used in this determination are summarized by Bowman (1994). Silique lengths are then determined and used as an approximate determinant for embryonic stage. Siliques 5-10 mm in length containing heart-through early upturned-U-stage [72-120 hours after fertilization (HAF)] embryos are harvested and flash frozen in liquid nitrogen.

[1091] Fruits(pod+seed) >10 mm

[1092] Seeds of Arabidopsis thaliana (ecotype Wassilewskija) are sown in pots and left at 4° C. for two to three days to vernalize. They are then transferred to a growth chamber. Plants are grown under long-day (16 hr light: 8 hr dark) conditions, 7000-8000 LUX light intensity, 70% humidity, and 22° C. temperature. 3-4 siliques (fruits) bearing developing seeds are selected from at least 3 plants and were hand-dissected to determine what developmental stage(s) are represented by the enclosed embryos. Description of the stages of Arabidopsis embryogenesis used in this determination were summarized by Bowman (1994). Silique lengths are then determined and used as an approximate determinant for embryonic stage. Siliques >10 mm in length containing green, late upturned-U-stage [>120 hours after fertilization (HAF)-9 days after flowering (DAF)] embryos are harvested and flash frozen in liquid nitrogen.

[1093] Green Pods 5-10 mm (Control Tissue for Samples 72-74)

[1094] Seeds of Arabidopsis thaliana (ecotype Wassilewskija) are sown in pots and left at 4° C. for two to three days to vernalize. They are then transferred to a growth chamber. Plants are grown under long-day (16 hr light: 8 hr dark) conditions, 7000-8000 LUX light intensity, 70% humidity, and 22° C. temperature. 3-4 siliques (fruits) bearing developing seeds are selected from at least 3 plants and are hand-dissected to determine what developmental stage(s) are represented by the enclosed embryos. Description of the stages of Arabidopsis embryogenesis used in this determination are summarized by Bowman (1994). Silique lengths are then determined and used as an approximate determinant for embryonic stage. Green siliques 5-10 mm in length containing developing seeds 72-120 hours after fertilization (HAF)] are opened and the seeds removed. The remaining tissues (green pods minus seed) were harvested and flash frozen in liquid nitrogen.

[1095] Green Seeds from Fruits >10 mm

[1096] Seeds of Arabidopsis thaliana (ecotype Wassilewskija) are sown in pots and left at 4° C. for two to three days to vernalize. They are then transferred to a growth chamber. Plants are grown under long-day (16 hr light: 8 hr dark) conditions, 7000-8000 LUX light intensity, 70% humidity, and 22° C. temperature. 3-4 siliques (fruits) bearing developing seeds are selected from at least 3 plants and are hand-dissected to determine what developmental stage(s) are represented by the enclosed embryos. Description of the stages of Arabidopsis embryogenesis used in this determination were summarized by Bowman (1994). Silique lengths are then determined and used as an approximate determinant for embryonic stage. Green siliques >10 mm in length containing developing seeds up to 9 days after flowering (DAF)] are opened and the seeds removed and harvested and flash frozen in liquid nitrogen.

[1097] Brown Seeds from Fruits >10 mm

[1098] Seeds of Arabidopsis thaliana (ecotype Wassilewskija) are sown in pots and left at 4° C. for two to three days to vernalize. They are then transferred to a growth chamber. Plants are grown under long-day (16 hr light: 8 hr dark) conditions, 7000-8000 LUX light intensity, 70% humidity, and 22° C. temperature. 3-4 siliques (fruits) bearing developing seeds are selected from at least 3 plants and are hand-dissected to determine what developmental stage(s) are represented by the enclosed embryos. Description of the stages of Arabidopsis embryogenesis used in this determination were summarized by Bowman (1994). Silique lengths are then determined and used as an approximate determinant for embryonic stage. Yellowing siliques >10 mm in length containing brown, dessicating seeds >11 days after flowering (DAF)] are opened and the seeds removed and harvested and flash frozen in liquid nitrogen.

[1099] Green/Brown Seeds from Fruits >10 mm

[1100] Seeds of Arabidopsis thaliana (ecotype Wassilewskija) are sown in pots and left at 4° C. for two to three days to vernalize. They were then transferred to a growth chamber. Plants are grown under long-day (16 hr light: 8 hr dark) conditions, 7000-8000 LUX light intensity, 70% humidity, and 22° C. temperature. 3-4 siliques (fruits) bearing developing seeds are selected from at least 3 plants and are hand-dissected to determine what developmental stage(s) are represented by the enclosed embryos. Description of the stages of Arabidopsis embryogenesis used in this determination were summarized by Bowman (1994). Silique lengths are then determined and used as an approximate determinant for embryonic stage. Green siliques >10 mm in length containing both green and brown seeds >9 days after flowering (DAF)] are opened and the seeds removed and harvested and flash frozen in liquid nitrogen.

[1101] Mature Seeds (24 Hours after Imbibition)

[1102] Mature dry seeds of Arabidopsis thaliana (ecotype Wassilewskija) are sown onto moistened filter paper and left at 4° C. for two to three days to vernalize. Imbibed seeds are then transferred to a growth chamber [16 hr light: 8 hr dark conditions, 7000-8000 LUX light intensity, 70% humidity, and 22° C. temperature], the emerging seedlings harvested after 48 hours and flash frozen in liquid nitrogen.

[1103] Mature Seeds (Dry)

[1104] Seeds of Arabidopsis thaliana (ecotype Wassilewskija) are sown in pots and left at 4° C. for two to three days to vernalize. They are then transferred to a growth chamber. Plants are grown under long-day (16 hr light: 8 hr dark) conditions, 7000-8000 LUX light intensity, 70% humidity, and 22° C. temperature and taken to maturity. Mature dry seeds are collected, dried for one week at 28° C., and vernalized for one week at 4° C. before use as a source of RNA.

[1105] Ovules(Ler-pi)

[1106] Seeds of Arabidopsis thaliana heterozygous for pistillata (pi) (ecotype Landsberg erecta (Ler)) are sown in pots and left at 4° C. for two to three days to vernalize. They are then transferred to a growth chamber. Plants are grown under long-day (16 hr light: 8 hr dark) conditions, 7000-8000 LUX light intensity, 76% humidity, and 24° C. temperature. Inflorescences are harvested from seedlings about 40 days old. The inflorescences are cut into small pieces and incubated in the following enzyme solution (pH 5) at room temperature for 0.5-1 hr.: 0.2% pectolyase Y-23, 0.04% pectinase, 5 mM MES, 3% Sucrose and MS salts (1900 mg/l KNO₃, 1650 mg/l NH₄NO₃, 370 mg/l MgSO₄·7 H₂O, 170 mg/l KH₂PO₄, 440 mg/l CaCl₂·2 H₂O, 6.2 mg/l H₂BO₃, 15.6 mg/l MnSO₄·4 H₂O, 8.6 mg/l ZnSO₄·7 H₂O, 0.25 mg/l NaMoO₄·2 H₂O, 0.025 mg/l CuCO₄·5 H₂O, 0.025 mg/l CoCl₂·6 H₂O, 0.83 mg/l KI, 27.8 mg/l FeSO₄·7 H₂O, 37.3 mg/l Disodium EDTA, pH 5.8). At the end of the incubation the mixture of inflorescence material and enzyme solution is passed through a size 60 sieve and then through a sieve with a pore size of 125 μm. Ovules greater than 125 μm in diameter are collected, rinsed twice in B5 liquid medium (2500 mg/l KNO₃, 250 mg/l MgSO₄·7 H₂O, 150 mg/l NaH2PO4·H₂O, 150 mg/l CaCl₂·2 H₂O, 134 mg/l (NH4)2 CaCl₂·SO₄, 3 mg/l H₂BO₃. 10 mg/l MnSO₄·4 H₂O, 2 ZnSO₄·7 H₂O, 0.25 mg/l NaMoO₄·2 H₂O, 0.025 mg/l CuCO₄·5 H₂O, 0.025 mg/l CoCl₂·6 H₂O, 0.75 mg/l KI, 40 mg/l EDTA sodium ferric salt, 20 g/l sucrose, 10 mg/l Thiamine hydrochloride, 1 mg/l Pyridoxine hydrochloride, 1 mg/l Nicotinic acid, 100 mg/l myo-inositol, pH 5.5)), rinsed once in deionized water and flash frozen in liquid nitrogen. The supernatant from the 125 μm sieving is passed through subsequent sieves of 50 μm and 32 μm. The tissue retained in the 32 μm sieve is collected and mRNA prepared for use as a control.

(e) Auxin Responsive (NAA)

[1107] Seeds of Arabidopsis thaliana (ecotype Wassilewskija) are sown in trays and left at 4° C. for 4 days to vernalize. They are then transferred to a growth chamber having 16 hr light/8 hr dark, 13,000 LUX, 70% humidity, 20° C. and watered twice a week with 1 L of 1× Hoagland's solution (recipe recited in Feldmann et al., (1987) Mol. Gen. Genet. 208: 1-9 and described as complete nutrient solution). Approximately 1,000 14 day old plants are spayed with 200-250 mls of 100 μM NAA in a 0.02% solution of the detergent Silwet L-77. Aerial tissues (everything above the soil line) are harvested within a 15 to 20 minute time period 1 hr and 6 hrs after treatment, flash-frozen in liquid nitrogen and stored at −80° C.

[1108] Seeds of maize hybrid 35A (Pioneer) are sown in water-moistened sand in flats (10 rows, 5-6 seed/row) and covered with clear, plastic lids before being placed in a growth chamber having 16 hr light (25° C.)/8 hr dark (20° C.), 75% relative humidity and 13,000-14,000 LUX Covered flats are watered every three days for 7 days. Seedlings are carefully removed from the sand and placed in 1-liter beakers with 100 μM NAA for treatment. Control plants are treated with water. After 6 hr and 24 hr, aerial and root tissues are separated and flash frozen in liquid nitrogen prior to storage at −80° C.

(f) Brassinosteroid Responsive (Br Bz)

[1109] Two separate experiments are performed, one with epi-brassinolide and one with the brassinosteroid biosynthetic inhibitor brassinazole. In the epi-brassinolide experiments, seeds of wild-type Arabidopsis thaliana (ecotype Wassilewskija) and the brassinosteroid biosynthetic mutant dwf4-1 are sown in trays and left at 4° C. for 4 days to vernalize. They are then transferred to a growth chamber having 16 hr light/8 hr dark, 11,000 LUX, 70% humidity and 22° C. temperature. Four week old plants are spayed with a 1 μM solution of epi-brassinolide and shoot parts (unopened floral primordia and shoot apical meristems) harvested three hours later. Tissue is flash-frozen in liquid nitrogen and stored at −80° C.

[1110] In the brassinazole experiments, seeds of wild-type Arabidopsis thaliana (ecotype Wassilewskija) are grown as described above. Four week old plants are sprayed with a 1 μM solution of brassinazole and shoot parts (unopened floral primordia and shoot apical meristems) harvested three hours later. Tissue is flash-frozen in liquid nitrogen and stored at −80° C.

[1111] In addition to the spray experiments, tissue is prepared from two different mutants; (1) a dwf4-1 knock out mutant and (2) a mutant overexpressing the dwf4-1 gene

[1112] Seeds of wild-type Arabidopsis thaliana (ecotype Wassilewskija) and of the dwf4-1 knock out and overexpressor mutants are sown in trays and left at 4° C. for 4 days to vernalize. They are then transferred to a growth chamber having 16 hr light/8 hr dark, 11,000 LUX, 70% humidity and 22° C. temperature. Tissue from shoot parts (unopened floral primordia and shoot apical meristems) is flash-frozen in liquid nitrogen and stored at −80° C.

[1113] Another experiment is completed with seeds of Arabidopsis thaliana (ecotype Wassilewskija) that are sown in trays and left at 4° C. for 4 days to vernalize. They are then transferred to a growth chamber. Plants are grown under long-day (16 hr light: 8 hr. dark) conditions, 13,000 LUX light intensity, 70% humidity, 20° C. temperature and watered twice a week with 1 L 1× Hoagland's solution (recipe recited in Feldmann et al., (1987) Mol. Gen. Genet. 208: 1-9 and described as complete nutrient solution). Approximately 1,000 14 day old plants are spayed with 200-250 mls of 0.1 μM Epi-Brassinolite in 0.02% solution of the detergent Silwet L-77. At 1 hr. and 6 hrs. after treatment aerial tissues are harvested within a 15 to 20 minute time period and flash-frozen in liquid nitrogen.

[1114] Seeds of maize hybrid 35A (Pioneer) are sown in water-moistened sand in flats (10 rows, 5-6 seed/row) and covered with clear, plastic lids before being placed in a growth chamber having 16 hr light (25° C.)/8 hr dark (20° C.), 75% relative humidity and 13,000-14,000 LUX. Covered flats are watered every three days for 7 days. Seedlings are carefully removed from the sand and placed in 1-liter beakers with 0.1 μM epi-brassinolide for treatment. Control plants are treated with distilled deionized water. After 24 hr, aerial and root tissues are separated and flash frozen in liquid nitrogen prior to storage at −80° C.

(g) Cold Shock Treatment

[1115] Seeds of Arabidopsis thaliana (ecotype Wassilewskija) are sown in trays and left at 4° C. for three days to vernalize before being transferred to a growth chamber having 16 hr light/8 hr dark, 12,000-14,000 LUX, 20° C. and 70% humidity. Fourteen day old plants are transferred to a 4° C. dark growth chamber and aerial tissues are harvested 1 hour and 6 hours later. Control plants are maintained at 20° C. and covered with foil to avoid exposure to light. Tissues are flash-frozen in liquid nitrogen and stored at −80° C.

[1116] Seeds of maize hybrid 35A (Pioneer) are sown in water-moistened sand in flats (10 rows, 5-6 seed/row) and covered with clear, plastic lids before being placed in a growth chamber having 16 hr light (25° C.)/8 hr dark (20° C.), 75% relative humidity and 13,000-14,000 LUX. Covered flats are watered every three days for 7 days. Seedlings are carefully removed from the sand and placed in 1-liter beakers containing 4° C. water for treatment. Control plants are treated with water at 25° C. After 1 hr and 6 hr aerial and root tissues are separated and flash frozen in liquid nitrogen prior to storage at −80° C.

(h) Cytokinin (BA)

[1117] Seeds of Arabidopsis thaliana (ecotype Wassilewskija) are sown in trays and left at 4° C. for 4 days to vernalize. They are then transferred to a growth chamber having 16 hr light/8 hr dark, 13,000 LUX, 70% humidity, 20° C. temperature and watered twice a week with 1 L of 1× Hoagland's solution. Approximately 1,000 14 day old plants are spayed with 200-250 mls of 100 μM BA in a 0.02% solution of the detergent Silwet L-77. Aerial tissues (everything above the soil line) are harvested within a 15 to 20 minute time period 1 hr and 6 hrs after treatment, flash-frozen in liquid nitrogen and stored at −80° C.

[1118] Seeds of maize hybrid 35A (Pioneer) are sown in water-moistened sand in flats (10 rows, 5-6 seed/row) and covered with clear, plastic lids before being placed in a growth chamber having 16 hr light (25° C.)/8 hr dark (20° C.), 75% relative humidity and 13,000-14,000 LUX. Covered flats were watered every three days for 7 days. Seedlings are carefully removed from the sand and placed in 1-liter beakers with 100 μM BA for treatment. Control plants are treated with water. After 6 hr, aerial and root tissues are separated and flash frozen in liquid nitrogen prior to storage at −80° C.

(i) Drought Stress

[1119] Seeds of Arabidopsis thaliana (ecotype Wassilewskija) are sown in pots and left at 4° C. for three days to vernalize before being transferred to a growth chamber having 16 hr light/8 hr dark, 150,000-160,000 LUX, 20° C. and 70% humidity. After 14 days, aerial tissues are cut and left to dry on 3MM Whatman paper in a petri-plate for 1 hour and 6 hours. Aerial tissues exposed for 1 hour and 6 hours to 3 MM Whatman paper wetted with 1× Hoagland's solution serve as controls. Tissues are harvested, flash-frozen in liquid nitrogen and stored at −80° C.

[1120] Alternatively, Arabidopsis thaliana (ecotype Wassilewskija) seed is vernalized at 4° C. for 3 days before sowing in Metromix soil type 350. Flats are placed in a growth chamber with 23° C., 16 hr light/8 hr. dark, 80% relative humidity, ˜13,000 LUX for germination and growth. Plants are watered with 1-1.5 L of water every four days. Watering is stopped 16 days after germination for the treated samples, but continues for the control samples. Rosette leaves and stems, flowers and siliques are harvested 2 d, 3 d, 4 d, 5 d, 6 d and 7 d after watering is stopped. Tissue is flash frozen in liquid nitrogen and kept at −80 ° C. until RNA is isolated. Flowers and siliques are also harvested on day 8 from plants that had undergone a 7 d drought treatment followed by 1 day of watering. Control plants (whole plants) are harvested after 5 weeks, flash frozen in liquid nitrogen and stored as above.

[1121] Seeds of maize hybrid 35A (Pioneer) are sown in water-moistened sand in flats (10 rows, 5-6 seed/row) and covered with clear, plastic lids before being placed in a growth chamber having 16 hr light (25° C.)/8 hr dark (20° C.), 75% relative humidity and 13,000-14,000 LUX. Covered flats are watered every three days for 7 days. Seedlings are carefully removed from the sand and placed in empty 1-liter beakers at room temperature for treatment. Control plants are placed in water. After 1 hr, 6 hr, 12 hr and 24 hr aerial and root tissues are separated and flash frozen in liquid nitrogen prior to storage at −80° C.

(j) Flowers (Green White or Buds)

[1122] Approximately 10 μl of Arabidopsis thaliana seeds (ecotype Wassilewskija) are sown on 350 soil (containing 0.03% marathon) and vernalized at 4C for 3 days. Plants are then grown at room temperature under fluorescent lighting until flowering. Flowers are harvested after 28 days in three different categories. Buds that had not opened at all and are completely green are categorized as “flower buds” (also referred to as green buds by the investigator). Buds that had started to open, with white petals emerging slightly are categorized as “green flowers” (also referred to as white buds by the investigator). Flowers that are mostly opened (with no silique elongation) with white petals completely visible are categorized as “white flowers” (also referred to as open flowers by the investigator). Buds and flowers are harvested with forceps, flash frozen in liquid nitrogen and stored at −80° C. until RNA is isolated.

(k) Germination

[1123] Arabidopsis thaliana seeds (ecotype Wassilewskija) is sterilized in bleach and rinsed with sterile water. The seeds are placed in 100 mm petri plates containing soaked autoclaved filter paper. Plates are foil-wrapped and left at 4° C. for 3 nights to vernalize. After cold treatment, the foil is removed and plates are placed into a growth chamber having 16 hr light/8 hr dark cycles, 23° C., 70% relative humidity and ˜11,000 lux. Seeds are collected 1 d, 2 d, 3 d and 4 d later, flash frozen in liquid nitrogen and stored at −80° C. until RNA is isolated.

(l) Gibberillic Acid (GA)

[1124] Seeds of Arabidopsis thaliana (ecotype Wassilewskija) are sown in trays and left at 4° C. for 4 days to vernalize. They are then transferred to a growth chamber having 16 hr light/8 hr. dark, 13,000 LUX, 70% humidity, 20° C. and watered twice a week with 1 L of 1× Hoagland's solution. Approximately 1,000 14 day old plants are sprayed with 200-250 mls of 100 μM gibberillic acid in a 0.02% solution of the detergent Silwet L-77. At 1 hr. and 6 hrs. after treatment, aerial tissues (everything above the soil line) are harvested within a 15 to 20 minute time period, flash-frozen in liquid nitrogen and stored at −80° C.

[1125] Alternatively, seeds of Arabidopsis thaliana (ecotype Ws) are sown in Metro-mix soil type 350 and left at 4° C. for 3 days to vernalize. They are then transferred to a growth chamber having 16 hr light/8 hr dark, 13,000 LUX, 80% humidity, 20° C. temperature and watered every four days with 1.5 L water. Fourteen (14) days after germination, plants are sprayed with 100 μM gibberillic acid or with water. Aerial tissues are harvested 1 hr 6 hrs 12 hrs and 24 hrs post-treatment, flash frozen and stored at 80° C.

[1126] Seeds of maize hybrid 35A (Pioneer) are sown in water-moistened sand in flats (10 rows, 5-6 seed/row) and covered with clear, plastic lids before being placed in a growth chamber having 16 hr light (25° C.)/8 hr dark (20° C.), 75% relative humidity and 13,000-14,000 LUX. Covered flats are watered every three days for 7 days. Seedlings are carefully removed from the sand and placed in 1 -liter beakers with 100 μM gibberillic acid for treatment. Control plants are treated with water. After 1 hr, 6 hr and 12 hr, aerial and root tissues were separated and flash frozen in liquid nitrogen prior to storage at −80° C.

(m) Heat Shock Treatment

[1127] Seeds of Arabidopsis thaliana (ecotype Wassilewskija) are sown in trays and left at 4° C. for three days to vernalize before being transferred to a growth chamber with 16 hr light/8 hr dark, 12,000-14,000 LUX, 70% humidity and 20° C., fourteen day old plants are transferred to a 42° C. growth chamber and aerial tissues are harvested 1 hr and 6 hr after transfer. Control plants are left at 20° c. and aerial tissues are harvested. Tissues are flash-frozen in liquid nitrogen and stored at −80° c.

[1128] Seeds of maize hybrid 35A (Pioneer) are sown in water-moistened sand in flats (10 rows, 5-6 seed/row) and covered with clear, plastic lids before being placed in a growth chamber having 16 hr light (25° C.)/8 hr dark (20° C.), 75% relative humidity and 13,000-14,000 LUX. Covered flats are watered every three days for 7 days. Seedlings are carefully removed from the sand and placed in 1-liter beakers containing 42° C. water for treatment. Control plants are treated with water at 25° C. After 1 I hr and 6 hr aerial and root tissues are separated and flash frozen in liquid nitrogen prior to storage at −80° C.

(n) Herbicide Treatment

[1129] Arabidopsis thaliana (ecotype Wassilewskija) seeds are sterilized for 5 min. with 30% bleach, 50 μl Triton in a total volume of 50 ml. Seeds are vernalized at 4° C. for 3 days before being plated onto GM agar plates at a density of about 144 seeds per plate. Plates are incubated in a Percival growth chamber having 16 hr light/8 hr dark, 80% relative humidity, 22° C. and 11,000 LUX for 14 days.

[1130] Plates are sprayed (˜0.5 mls/plate) with water, Finale (1.128 g/L), Glean (1.88 g/L), RoundUp (0.01 g/L) or Trimec (0.08 g/L). Tissue is collected and flash frozen in liquid nitrogen at the following time points: 0, 1, 2, 4, 8, 12, and 24 hours. Frozen tissue is stored at −80° C. prior to RNA isolation.

(o) Imbibed Seed

[1131] Seeds of maize hybrid 35A (Pioneer) are sown in water-moistened sand in covered flats (10 rows, 5-6 seed/row) and covered with clear, plastic lids before being placed in a growth chamber having 16 hr light (25° C.)/8 hr dark (20° C.), 75% relative humidity and 13,000-14,000 LUX. One day after sowing, whole seeds are flash frozen in liquid nitrogen prior to storage at −80° C. Two days after sowing, embryos and endosperm are isolated and flash frozen in liquid nitrogen prior to storage at −80° C. On days 3-6, aerial tissues, roots and endosperm are isolated and flash frozen in liquid nitrogen prior to storage at −80° C.

(p) Leaf Mutant 3642:

[1132] Mutant 3642 is a recessive mutation that causes abnormal leaf development. The leaves of mutant 3642 plants are characterized by leaf twisting and irregular leaf shape. Mutant 3642 plants also exhibit abnormally shaped floral organs which results in reduced fertility.

[1133] Seed segregating for the mutant phenotype are sown in Metro-mix 350 soil and grown in a Conviron growth chamber with watering by sub-irrigation twice a week. Environmental conditions are set at 20 degrees Celsius, 70% humidity with an 8 hour day, 16 hour night light regime. Plants are harvested after 4 weeks of growth and the entire aerial portion of the plant is harvested and immediately frozen in liquid nitrogen and stored at −80° C. Mutant phenotype plants are harvested separately from normal phenotype plants, which serve as the control tissue.

(q) Methyl Jasmonate (MeJ)

[1134] Seeds of Arabidopsis thaliana (ecotype Wassilewskija) are sown in trays and left at 4° C. for 4 days to vernalize before being transferred to a growth chamber having 16 hr light/8 hr. dark, 13,000 LUX, 70% humidity, 20° C. temperature and watered twice a week with 1 L of a 1× Hoagland's solution. Approximately 1,000 14 day old plants are sprayed with 200-250 mls of 0.001% methyl jasmonate in a 0.02% solution of the detergent Silwet L-77. At 1 hr and 6 hrs after treatment, whole seedlings, including roots, are harvested within a 15 to 20 minute time period, flash-frozen in liquid nitrogen and stored at 80° C.

[1135] Seeds of maize hybrid 35A (Pioneer) are sown in water-moistened sand in flats (10 rows, 5-6 seed/row) and covered with clear, plastic lids before being placed in a growth chamber having 16 hr light (25° C.)/8 hr dark (20° C.), 75% relative humidity and 13,000-14,000 LUX. Covered flats are watered every three days for 7 days. Seedlings are carefully removed from the sand and placed in 1-liter beakers with 0.001% methyl jasmonate for treatment. Control plants are treated with water. After 24 hr, aerial and root tissues are separated and flash frozen in liquid nitrogen prior to storage at −80° C.

(r) Nitric Oxide Treatment (Nanp)

[1136] Seeds of Arabidopsis thaliana (ecotype Wassilewskija) are sown in trays and left at 4° C. for three days to vernalize before being transferred to a growth chamber having 16 hr light/8 hr dark, 12,000-14,000 LUX, 20° C. and 70% humidity. Fourteen day old plants are sprayed with 5 mM sodium nitroprusside in a 0.02% Silwett L-77 solution. Control plants are sprayed with a 0.02% Silwett L-77 solution. Aerial tissues are harvested 1 hour and 6 hours after spraying, flash-frozen in liquid nitrogen and stored at −80° C.

[1137] Seeds of maize hybrid 35A (Pioneer) are sown in water-moistened sand in flats (10 rows, 5-6 seed/row) and covered with clear, plastic lids before being placed in a growth chamber having 16 hr light (25° C.)/8 hr dark (20° C.), 75% relative humidity and 13,000-14,000 LUX. Covered flats are watered every three days for 7 days. Seedlings are carefully removed from the sand and placed in 1-liter beakers with 5 mM nitroprusside for treatment. Control plants are treated with water. After 1 hr, 6 hr and 12 hr, aerial and root tissues are separated and flash frozen in liquid nitrogen prior to storage at −80° C.

(s) Nitrogen: Low to High

[1138] Arabidopsis thaliana (ecotype Wassilewskija) seeds are sown on flats containing 4 L of a 1:2 mixture of Grace Zonolite vermiculite and soil. Flats are watered with 3 L of water and vernalized at 4° C. for five days. Flats are placed in a Conviron growth chamber having 16 hr light/8 hr dark at 20° C., 80% humidity and 17,450 LUX. Flats are watered with approximately 1.5 L of water every four days. Mature, bolting plants (24 days after germination) are bottom treated with 2 L of either a control (100 mM mannitol pH 5.5) or an experimental (50 mM ammonium nitrate, pH 5.5) solution. Roots, leaves and siliques are harvested separately 30, 120 and 240 minutes after treatment, flash frozen in liquid nitrogen and stored at −80° C.

[1139] Hybrid maize seed (Pioneer hybrid 35A19) are aerated overnight in deionized water. Thirty seeds are plated in each flat, which contained 4 liters of Grace zonolite vermiculite. Two liters of water are bottom fed and flats were kept in a Conviron growth chamber with 16 hr light/8 hr dark at 20° C. and 80% humidity. Flats are watered with 1 L of tap water every three days. Five day old seedlings are treated as described above with 2 L of either a control (100 mM mannitol pH 6.5) solution or 1 L of an experimental (50 mM ammonium nitrate, pH 6.8) solution. Fifteen shoots per time point per treatment are harvested 10, 90 and 180 minutes after treatment, flash frozen in liquid nitrogen and stored at −80° C.

[1140] Alternatively, seeds of Arabidopsis thaliana (ecotype Wassilewskija) are left at 4° C. for 3 days to vernalize. They are then sown on vermiculite in a growth chamber having 16 hours light/8 hours dark, 12,000-14,000 LUX, 70% humidity, and 20° C. They are bottom-watered with tap water, twice weekly. Twenty-four days old plants are sprayed with either water (control) or 0.6% ammonium nitrate at 4 μL/cm² of tray surface. Total shoots and some primary roots are cleaned of vermiculite, flash-frozen in liquid nitrogen and stored at −80° C.

(t) Nitrogen High to Low

[1141] Wild type Arabidopsis thaliana seeds (ecotype Wassilewskija) are surface sterilized with 30% Clorox, 0.1% Triton X-100 for 5 minutes. Seeds are then rinsed with 4-5 exchanges of sterile double distilled deionized water. Seeds are vernalized at 4° C. for 2-4 days in darkness. After cold treatment, seeds are plated on modified 1× MS media (without NH₄NO₃ or KNO₃), 0.5% sucrose, 0.5 g/L MES pH5.7, 1% phytagar and supplemented with KNO₃ to a final concentration of 60 mM (high nitrate modified 1× MS media). Plates are then grown for 7 days in a Percival growth chamber at 22° C. with 16 hr. light/8 hr dark.

[1142] Germinated seedlings are then transferred to a sterile flask containing 50 mL of high nitrate modified 1× MS liquid media. Seedlings are grown with mild shaking for 3 additional days at 22° C. in 16 hr. light/8 hr dark (in a Percival growth chamber) on the high nitrate modified 1× MS liquid media.

[1143] After three days of growth on high nitrate modified 1× MS liquid media, seedlings are transferred either to a new sterile flask containing 50 mL of high nitrate modified 1× MS liquid media or to low nitrate modified 1× MS liquid media (containing 20 μM KNO₃). Seedlings are grown in these media conditions with mild shaking at 22° C. in 16 hr light/8 hr dark for the appropriate time points and whole seedlings harvested for total RNA isolation via the Trizol method (LifeTech.). The time points used for the microarray experiments are 10 min. and 1 hour time points for both the high and low nitrate modified 1× MS media.

[1144] Alternatively, seeds that are surface sterilized in 30% bleach containing 0.1% Triton X-100 and further rinsed in sterile water, are planted on MS agar, (0.5% sucrose) plates containing 50 mM KNO₃ (potassium nitrate). The seedlings are grown under constant light (3500 LUX) at 22° C. After 12 days, seedlings are transferred to MS agar plates containing either 1 mM KNO₃ or 50 mM KNO₃. Seedlings transferred to agar plates containing 50 mM KNO₃ are treated as controls in the experiment. Seedlings transferred to plates with 1 mM KNO₃ are rinsed thoroughly with sterile MS solution containing 1 mM KNO₃. There are ten plates per transfer. Root tissue was collected and frozen in 15 mL Falcon tubes at various time points which included 1 hour, 2 hours, 3 hours, 4 hours, 6 hours, 9 hours, 12 hours, 16 hours, and 24 hours.

[1145] Maize 35A19 Pioneer hybrid seeds are sown on flats containing sand and grown in a Conviron growth chamber at 25° C., 16 hr light/8 hr dark, ˜13,000 LUX and 80% relative humidity. Plants are watered every three days with double distilled deionized water. Germinated seedlings are allowed to grow for 10 days and are watered with high nitrate modified 1× MS liquid media (see above). On day 11, young corn seedlings are removed from the sand (with their roots intact) and rinsed briefly in high nitrate modified 1× MS liquid media. The equivalent of half a flat of seedlings is then submerged (up to their roots) in a beaker containing either 500 mL of high or low nitrate modified 1× MS liquid media (see above for details).

[1146] At appropriate time points, seedlings are removed from their respective liquid media, the roots separated from the shoots and each tissue type flash frozen in liquid nitrogen and stored at −80° C. This is repeated for each time point. Total RNA is isolated using the Trizol method (see above) with root tissues only.

[1147] Corn root tissues isolated at the 4 hr and 16 hr time points are used for the microarray experiments. Both the high and low nitrate modified 1× MS media are used.

(u) Osmotic Stress (PEG)

[1148] Seeds of Arabidopsis thaliana (ecotype Wassilewskija) are sown in trays and left at 4° C. for three days to vernalize before being transferred to a growth chamber having 16 hr light/8 hr dark, 12,000-14,000 LUX, 20° C., and 70% humidity. After 14 days, the aerial tissues are cut and placed on 3 MM Whatman paper in a petri-plate wetted with 20% PEG (polyethylene glycol-Mᵣ 8,000) in 1× Hoagland's solution. Aerial tissues on 3 MM Whatman paper containing 1× Hoagland's solution alone serve as the control. Aerial tissues are harvested at 1 hour and 6 hours after treatment, flash-frozen in liquid nitrogen and stored at −80° C.

[1149] Seeds of maize hybrid 35A (Pioneer) are sown in water-moistened sand in flats (10 rows, 5-6 seed/row) and covered with clear, plastic lids before being placed in a growth chamber having 16 hr light (25° C.)/8 hr dark (20° C.), 75% relative humidity and 13,000-14,000 LUX. Covered flats are watered every three days for 7 days. Seedlings are carefully removed from the sand and placed in 1 -liter beakers with 20% PEG (polyethylene glycol-Mᵣ 8,000) for treatment. Control plants are treated with water. After 1 hr and 6 hr aerial and root tissues are separated and flash frozen in liquid nitrogen prior to storage at −80° C.

[1150] Seeds of maize hybrid 35A (Pioneer) are sown in water-moistened sand in flats (10 rows, 5-6 seed/row) and covered with clear, plastic lids before being placed in a growth chamber having 16 hr light (25° C.)/8 hr dark (20° C.), 75% relative humidity and 13,000-14,000 LUX. Covered flats are watered every three days for 7 days. Seedlings are carefully removed from the sand and placed in 1-liter beakers with 150 mM NaCl for treatment. Control plants were treated with water. After 1 hr, 6hr, and 24 hr aerial and root tissues are separated and flash frozen in liquid nitrogen prior to storage at −80° C.

(v) Oxidative Stress-Hydrogen Peroxide Treatment (H₂O₂)

[1151] Seeds of Arabidopsis thaliana (ecotype Wassilewskija) are sown in trays and left at 4° C. for three days to vernalize before being transferred to a growth chamber having 16 hr light/8 hr dark, 12,000-14,000 LUX, 20° C. and 70% humidity. Fourteen day old plants are sprayed with 5 mM H₂O₂ (hydrogen peroxide) in a 0.02% Silwett L-77 solution. Control plants are sprayed with a 0.02% Silwett L-77 solution. Aerial tissues are harvested 1 hour and 6 hours after spraying, flash-frozen in liquid nitrogen and stored at −80° C.

[1152] Seeds of maize hybrid 35A (Pioneer) are sown in water-moistened sand in flats (10 rows, 5-6 seed/row) and covered with clear, plastic lids before being placed in a growth chamber having 16 hr light (25° C.)/8 hr dark (20° C.), 75% relative humidity and 13,000-14,000 LUX. Covered flats are watered every three days for 7 days. Seedlings are carefully removed from the sand and placed in 1-liter beakers with 5 mM H₂O₂ for treatment. Control plants are treated with water. After 1 hr, 6 hr and 24 hr, aerial and root tissues are separated and flash frozen in liquid nitrogen prior to storage at 80° C.

(w) Protein Degradation

[1153] Arabidopsis thaliana (ecotype Wassilewskija) wild-type and 13B12-1 (homozygous) mutant seed are sown in pots containing Metro-mix 350 soil and incubated at 4° C. for four days. Vernalized seeds are germinated in the greenhouse (16 hr light/8 hr dark) over a 7 day period. Mutant seedlings are sprayed with 0.02% (active ingredient) Finale to confirm their transgenic standing. Plants were grown until the mutant phenotype (either multiple pistils in a single flower and/or multiple branching per node) is apparent. Young inflorescences immediately forming from the multiple-branched stems are cut and flash frozen in liquid nitrogen. Young inflorescences from wild-type plants grown in parallel and under identical conditions are collected as controls. All collected tissue is stored at −80° C. until RNA isolation.

(x) Roots

[1154] Seeds of Arabidopsis thaliana (ecotype Wassilewskija) are sterilized in full strength bleach for less than 5 min., washed more than 3 times in sterile distilled deionized water and plated on MS agar plates. The plates are placed at 4° C. for 3 nights and then placed vertically into a growth chamber having 16 hr light/8 hr dark cycles, 23° C., 70% relative humidity and ˜11,000 LUX. After 2 weeks, the roots are cut from the agar, flash frozen in liquid nitrogen and stored at −80° C.

(y) Root Hairless Mutants

[1155] Plants mutant at the rhl gene locus lack root hairs. This mutation is maintained as a heterozygote.

[1156] Seeds of Arabidopsis thaliana (ecotype Landsberg erecta) mutated at the rhl gene locus are sterilized using 30% bleach with 1 ul/ml 20% Triton −X 100 and then vernalized at 4° C. for 3 days before being plated onto GM agar plates. Plates are placed in growth chamber with 16 hr light/8 hr. dark, 23° C., 14,500-15,900 LUX, and 70% relative humidity for germination and growth.

[1157] After 7 days, seedlings are inspected for root hairs using a dissecting microscope. Mutants are harvested and the cotyledons removed so that only root tissue remained. Tissue is then flash frozen in liquid nitrogen and stored at −80 C.

[1158] Arabidopsis thaliana (Landsberg erecta) seedlings grown and prepared as above are used as controls.

[1159] Alternatively, seeds of Arabidopsis thaliana (ecotype Landsberg erecta), heterozygous for the rhl1 (root hairless) mutation, are surface-sterilized in 30% bleach containing 0.1% Triton X-100 and further rinsed in sterile water. They are then vernalized at 4° C. for 4 days before being plated onto MS agar plates. The plates are maintained in a growth chamber at 24° C. with 16 hr light/8 hr dark for germination and growth. After 10 days, seedling roots that expressed the phenotype (i.e. lacking root hairs) are cut below the hypocotyl junction, frozen in liquid nitrogen and stored at −80° C. Those seedlings with the normal root phenotype (heterozygous or wt) are collected as described for the mutant and used as controls.

(z) Root Tips

[1160] Seeds of Arabidopsis thaliana (ecotype Wassilewskija) are placed on MS plates and vernalized at 4° C. for 3 days before being placed in a 25° C. growth chamber having 16 hr light/8 hr dark, 70% relative humidty and about 3 W/m². After 6 days, young seedlings are transferred to flasks containing B5 liquid medium, 1% sucrose and 0.05 mg/l indole-3-butyric acid. Flasks are incubated at room temperature with 100 rpm agitation. Media is replaced weekly. After three weeks, roots are harvested and incubated for 1 hr with 2% pectinase, 0.2% cellulase, pH 7 before straining through a #80 (Sigma) sieve. The root body material remaining on the sieve (used as the control) is flash frozen and stored at −80° C. until use. The material that passes through the #80 sieve is strained through a #200 (Sigma) sieve and the material remaining on the sieve (root tips) is flash frozen and stored at −80° C. until use. Approximately 10 mg of root tips are collected from one flask of root culture.

[1161] Seeds of maize hybrid 35A (Pioneer) are sown in water-moistened sand in flats (10 rows, 5-6 seed/row) and covered with clear, plastic lids before being placed in a growth chamber having 16 hr light (25° C.)/8 hr dark (20° C.), 75% relative humidity and 13,000-14,000 LUX. Covered flats are watered every three days for 8 days. Seedlings are carefully removed from the sand and the root tips (˜2 mm long) are removed and flash frozen in liquid nitrogen prior to storage at −80° C. The tissues above the root tips (˜1 cm long) are cut, treated as above and used as control tissue.

(aa) Rosette Leaves, Stems, and Siliques

[1162] Arabidopsis thaliana (ecotype Wassilewskija) seed was vernalized at 4° C. for 3 days before sowing in Metro-mix soil type 350. Flats are placed in a growth chamber having 16 hr light/8 hr dark, 80% relative humidity, 23° C. and 13,000 LUX for germination and growth. After 3 weeks, rosette leaves, stems, and siliques are harvested, flash frozen in liquid nitrogen and stored at −80° C. until use. After 4 weeks, siliques (<5 mm, 5-10 mm and >10 mm) are harvested, flash frozen in liquid nitrogen and stored at −80° C. until use. Five week old whole plants (used as controls) are harvested, flash frozen in liquid nitrogen and kept at −80° C. until RNA is isolated.

(bb) Rough Sheath2-R (rs2-R) Mutants (1400-6/S-17)

[1163] This experiment is conducted to identify abnormally expressed genes in the shoot apex of rough sheath2-R (rs2-R) mutant plants. rs2 encodes a myb domain DNA binding protein that functions in repression of several shoot apical meristem expressed homeobox genes. Two homeobox gene targets are known for rs2 repression, rough sheath1, liguleless 3. The recessive loss of function phenotype of rs2-R homozygous plants is described in Schneeberger et al. 1998, Development 125: 2857-2865.

[1164] The seed stock genetically segregates 1:1 for rs2-R/rs2-R : rs2-R/+

[1165] Preparation of tissue samples: 160 seedlings pooled from 2 and 3 week old plants grown in sand. Growth conditions; Conviron #107 at 12 hr days/12 hr night, 25° C., 75% humidity. Shoot apex was dissected to include leaf three and older.

[1166] 1) rough sheath2-R homozygous (mutant) shoot apex

[1167] 2) rough sheath2-R heterozygous (wild-type, control) shoot apex.

(cc) rt1

[1168] The rt1 allele is a variation of rt1 rootless1 and is recessive. Plants displaying the rt1 phenotype have few or no secondary roots.

[1169] Seed from plants segregating for rt1 are sown on sand and placed in a growth chamber having 16 hr light/8 hr dark, 13,000 LUX, 70% humidity and 20° C. temperature. Plants are watered every three days with tap water. Eleven (11) day old seedlings are carefully removed from the sand, keeping the roots intact. rt1-type seedlings are separated from their wild-type counterparts and the root tissue isolated. Root tissue from normal seedlings (control) and rtl1 mutants is flash frozen in liquid nitrogen and stored at −80° C. until use.

(dd) S4 Immature Buds, Inflorescence Meristem

[1170] Seeds of Arabidopsis thaliana (ecotype Wassilewskija) are sown in pots and left at 4° C. for two to three days to vernalize. They are then transferred to a growth chamber. Plants are grown under long-day (16 hr light: 8 hr dark) conditions, 7000-8000 LUX light intensity, 70% humidity, and 22° C. temperature. Inflorescences containing immature floral buds [stages 1-12; Smyth et al., 1990] as well as the inflorescence meristem are harvested and flash frozen in liquid nitrogen

(ee) S5 Flowers (Opened)

[1171] Seeds of Arabidopsis thaliana (ecotype Wassilewskija) are sown in pots and left at 4° C. for two to three days to vernalize. They are then transferred to a growth chamber. Plants are grown under long-day (16 hr light: 8 hr dark) conditions, 7000-8000 LUX light intensity, 70% humidity, and 22° C. temperature. Mature, unpollinated flowers [stages 12-14; Smyth et al. 1990] are harvested and flash frozen in liquid nitrogen.

(ff) S6 Siliques (All Stages)

[1172] Seeds of Arabidopsis thaliana (ecotype Wassilewskija) are sown in pots and left at 4° C. for two to three days to vernalize. They are then transferred to a growth chamber. Plants are grown under long-day (16 hr light: 8 hr dark) conditions, 7000-8000 LUX light intensity, 70% humidity, and 22° C. temperature. Siliques bearing developing seeds containing post fertilization through pre-heart stage [0-72 hours after fertilization (HAF)], heart-through early curled cotyledon stage [72-120 HAF] and late-curled cotyledon stage [>120 HAF] embryos are harvested separately and pooled prior to RNA isolation in a mass ratio of 1:1:1. The tissues are then flash frozen in liquid nitrogen. Bowman (1994) reviews and provides a description of the stages of Arabidopsis embryogenesis used.

(gg) Salicylic Acid (Sa)

[1173] Seeds of Arabidopsis thaliana (ecotype Wassilewskija) are sown in trays and left at 4° C. for 4 days to vernalize before being transferred to a growth chamber having 16 hr light/8 hr. dark, 13,000 LUX, 70% humidity, 20° C. temperature and watered twice a week with 1 L of a 1× Hoagland's solution. Approximately 1,000 14 day old plants are sprayed with 200-250 mls of 5 mM salicylic acid (solubilized in 70% ethanol) in a 0.02% solution of the detergent Silwet L-77. At 1 hr and 6 hrs after treatment, whole seedlings, including roots, are harvested within a 15 to 20 minute time period flash-frozen in liquid nitrogen and stored at −80° C.

[1174] Alternatively, seeds of wild-type Arabidopsis thaliana (ecotype Columbia) and mutant CS3726 are sown in soil type 200 mixed with osmocote fertilizer and Marathon insecticide and left at 4° C. for 3 days to vernalize. Flats are incubated at room temperature with continuous light. Sixteen days post germination plants are sprayed with 2 mM SA, 0.02% SilwettL-77 or control solution (0.02% SilwettL-77. Aerial parts or flowers were harvested 1 hr, 4 hr, 6 hr, 24 hr and 3 weeks post-treatment flash frozen and stored at −80° C.

[1175] Seeds of maize hybrid 35A (Pioneer) are sown in water-moistened sand in flats (10 rows, 5-6 seed/row) and covered with clear, plastic lids before being placed in a growth chamber having 16 hr light (25° C.)/8 hr dark (20° C.), 75% relative humidity and 13,000-14,000 LUX Covered flats are watered every three days for 7 days. Seedlings are carefully removed from the sand and placed in 1-liter beakers with 2 mM SA for treatment. Control plants are treated with water. After 12 hr and 24 hr, aerial and root tissues are separated and flash frozen in liquid nitrogen prior to storage at −80° C.

(hh) Shoot Apical Meristem (stm)

[1176] Arabidopsis thaliana (ecotype Landsberg erecta) plants mutant at the stm gene locus lack shoot meristems, produce aerial rosettes, have a reduced number of flowers per inflorescence, as well as a reduced number of petals, stamens and carpels, and is female sterile. This mutation is maintained as a heterozygote.

[1177] Seeds of Arabidopsis thaliana (ecotype Landsberg erecta) mutated at the stm locus are sterilized using 30% bleach with 1 ul/ml 20% Triton −X100. The seeds are vernalized at 4° C. for 3 days before being plated onto GM agar plates. Half are then put into a 22° C., 24 hr light growth chamber and half in a 24° C. 16 hr light/8 hr dark growth chamber having 14,500-15,900 LUX, and 70% relative humidity for germination and growth.

[1178] After 7 days, seedlings are examined for leaf primordia using a dissecting microscope. Presence of leaf primordia indicated a wild type phenotype. Mutants are selected based on lack of leaf primordia. Mutants are then harvested and hypocotyls removed leaving only tissue in the shoot region. Tissue is then flash frozen in liquid nitrogen and stored at −80° C.

[1179] Control tissue is isolated from 5 day old Landsberg erecta seedlings grown in the same manner as above. Tissue from the shoot region is harvested in the same manner as the stm tissue, but only contains material from the 24° C., 16 hr light/8 hr dark long day cycle growth chamber.

[1180] Seeds of maize hybrid 35A (Pioneer) are sown in water-moistened sand in flats (10 rows, 5-6 seed/row) and covered with clear, plastic lids before being placed in a growth chamber having 16 hr light (25° C.)/8 hr dark (20° C.), 75% relative humidity and 13,000-14,000 LUX. Covered flats are watered every three days for 8 days. Seedlings are carefully removed from the sand and the outer layers of leaf shealth removed. About 2 mm sections are cut and flash frozen in liquid nitrogen prior to storage at −80° C. The tissues above the shoot apices (˜1 cm long) are cut, treated as above and used as control tissue.

(ii) Trichomes

[1181] Arabidopsis thaliana (Colombia glabrous) inflorescences are used as a control and CS8143 (hairy inflorescence ecotype) inflorescences, having increased trichomes, are used as the experimental sample.

[1182] Approximately 10 μl of each type of seed is sown on a flat of 350 soil (containing 0.03% marathon) and vernalized at 4° C. for 3 days. Plants are then grown at room temperature under florescent lighting. Young inflorescences are collected at 30 days for the control plants and 37 days for the experimental plants. Each inflorescence is cut into one-half inch (½″) pieces, flash frozen in liquid nitrogen and stored at −80° C. until RNA is isolated.

(ii) Wounding

[1183] Seeds of Arabidopsis thaliana (Wassilewskija) are sown in trays and left at 4° C. for three days to vernalize before being transferred to a growth chamber having 16 hr light/8 hr dark, 12,000-14,000 LUX, 70% humidity and 20° C. After 14 days, the leaves are wounded with forceps. Aerial tissues are harvested 1 hour and 6 hours after wounding. Aerial tissues from unwounded plants serve as controls. Tissues are flash-frozen in liquid nitrogen and stored at −80° C.

[1184] Seeds of maize hybrid 35A (Pioneer) are sown in water-moistened sand in flats (10 rows, 5-6 seed/row) and covered with clear, plastic lids before being placed in a growth chamber having 16 hr light (25° C.)/8 hr dark (20° C.), 75% relative humidity and 13,000-14,000 LUX. Covered flats are watered every three days for 7 days. Seedlings are wounded (one leaf nicked by scissors) and placed in 1-liter beakers of water for treatment. Control plants are treated not wounded. After 1 hr and 6 hr aerial and root tissues are separated and flash frozen in liquid nitrogen prior to storage at −80° C.

2. Microarray Hybridization Procedures

[1185] Microarray technology provides the ability to monitor mRNA transcript levels of thousands of genes in a single experiment. These experiments simultaneously hybridize two differentially labeled fluorescent cDNA pools to glass slides that have been previously spotted with cDNA clones of the same species. Each arrayed cDNA spot will have a corresponding ratio of fluorescence that represents the level of disparity between the respective mRNA species in the two sample pools. Thousands of polynucleotides can be spotted on one slide, and each experiment generates a global expression pattern.

[1186] The microarray consists of a chemically coated microscope slide, referred herein as a “chip” with numerous polynucleotide samples arrayed at a high density. The poly-L-lysine coating allows for this spotting at high density by providing a hydrophobic surface, reducing the spreading of spots of DNA solution arrayed on the slides. Glass microscope slides (Gold Seal #3010 manufactured by Gold Seal Products, Portsmouth, N.H., USA) are coated with a 0.1% W/V solution of Poly-L-lysine (Sigma, St. Louis, Mo.).

[1187] Polynucleotides are amplified from Arabidopsis cDNA clones using insert specific probes. The resulting 100 uL PCR reactions are purified and PCR products from cDNA clones are spotted onto the poly-L-Lysine coated glass slides using an arrangement of quill-tip pins (ChipMaker 3 spotting pins; Telechem, International, Inc., Sunnyvale, Calif., USA) and a robotic arrayer (PixSys 3500, Cartesian Technologies, Irvine, Calif., USA). Slides containing maize sequences are purchased from Agilent Technology (Palo Alto, Calif. 94304).

[1188] After arraying, slides are processed through a series of steps—rehydration, UV cross-linking, blocking and denaturation—required prior to hybridization. Slides are rehydrated by placing them over a beaker of warm water (DNA face down), for 2-3 sec, to distribute the DNA more evenly within the spots, and then snap dried on a hot plate (DNA side, face up). The DNA is then cross-linked to the slides by UV irradiation (60-65 mJ; 2400 Stratalinker, Stratagene, La Jolla, Calif., USA).

[1189] The Hybridization process begins with the isolation of mRNA from the two tissues (see “Isolation of total RNA” and “Isolation of mRNA”, below) in question followed by their conversion to single stranded cDNA (see “Generation of probes for hybridization”, below). The cDNA from each tissue is independently labeled with a different fluorescent dye and then both samples are pooled together. This final differentially labeled cDNA pool is then placed on a processed microarray and allowed to hybridize (see “Hybridization and ish conditions”, below).

[1190] mRNA is isolated using the Qiagen Oligotex mRNA Spin-Column protocol (Qiagen, Valencia,Calif.) or using the Stratagene Poly(A) Quik mRNA Isolation Kit (Startagene, La Jolla, Calif.).

[1191] Plasmid DNA is isolated from the following yeast clones using Qiagen filtered maxiprep kits (Qiagen, Valencia, Calif.): YAL022c(Fun26), YAL031c(Fun21), YBR032w, YDL131w, YDL182w, YDL194w, YDL196w, YDR050c and YDR116c. Plasmid DNA is linearized with either BsrBI (YAL022c(Fun26), YAL031 c(Fun21), YDL131w, YDL182w, YDL194w, YDL196w, YDR050c) or AflIII (YBR032w, YDR116c) and isolated.

Generation of Probes for Hybridization

Generation of Labeled Probes for Hybridization from First-Strand cDNA

[1192] Hybridization probes are generated from isolated mRNA using an Atlas™ Glass Fluorescent Labeling Kit (Clontech Laboratories, Inc., Palo Alto, Calif., USA). This entails a two step labeling procedure that first incorporates primary aliphatic amino groups during cDNA synthesis and then couples fluorescent dye to the cDNA by reaction with the amino functional groups.

[1193] The probe is purified using a Qiagen PCR cleanup kit (Qiagen, Valencia, Calif., USA), and eluted with 100 ul EB (kit provided). The sample is loaded on a Microcon YM-30 (Millipore, Bedford, Mass., USA) spin column and concentrated to 4-5 ul in volume.

[1194] Probes for the maize microarrays are generated using the Fluorescent Linear Amplification Kit (cat. No. G2556A) from Agilent Technologies (Palo Alto, Calif.).

[1195] Maize microarrays are hybridized according to the instructions included Fluorescent Linear Amplification Kit (cat. No. G2556A) from Agilent Technologies (Palo Alto, Calif.).

[1196] The chips are scanned using a ScanArray 3000 or 5000 (General Scanning, Watertown, Mass., USA). The chips are scanned at 543 and 633 nm, at 10 um resolution to measure the intensity of the two fluorescent dyes incorporated into the samples hybridized to the chips.

[1197] The images generated by scanning slides consisted of two 16-bit TIFF images representing the fluorescent emissions of the two samples at each arrayed spot. These images are then quantified and processed for expression analysis using the data extraction software Imagene™ (Biodiscovery, Los Angeles, Calif., USA). Imagene output is subsequently analyzed using the analysis program Genespring™ (Silicon Genetics, San Carlos, Calif., USA). In Genespring, the data is imported using median pixel intensity measurements derived from Imagene output. Background subtraction, ratio calculation and normalization are all conducted in Genespring. Normalization is achieved by breaking the data in to 32 groups, each of which represented one of the 32 pin printing regions on the microarray. Groups consist of 360 to 550 spots. Each group is independently normalized by setting the median of ratios to one and multiplying ratios by the appropriate factor.

### Example 4

### AFLP Experiments and Results

Production of Samples

[1198] mRNA is prepared from 27 plant tissues. Based on preliminary cDNA-AFLP analysis with a few primer combinations, 11 plant tissues and/or pooled samples are selected. Samples are selected to give the greatest representation of unique band upon electrophoresis. The final 11 samples or pooled samples are used in the cDNA-AFLP analysis were:
[1199] S1 Dark adapted seedlings
[1200] S2 Roots/Etiolated Seedlings
[1201] S3 Mature leaves, soil grown
[1202] S4 Immature buds, inflorescence meristem
[1203] S5 Flowers opened
[1204] S6 Siliques, all stages
[1205] S7 Senescing leaves Oust beginning to yellow)
[1206] S8 Callus Inducing medium
   [1207] Callus shoot induction
   [1208] Callus root induction
[1209] S9 Wounding
   [1210] Methyl-jasmonate-treated
[1211] S10 Oxidative stress
   [1212] Drought stress
   [1213] Oxygen Stress-flooding
[1214] S11 Heat treated light grown seedling
   [1215] Cold treated light grown seedlings

[1216] cDNA from each of the 11 samples is digested with two restriction endonucleases, namely TaqI and MseI. TaqI and MseI adapters are then ligated to the restriction enzyme fragments. Using primers to these adapters that are specific in sequence (i.e. without extensions), the restriction fragments are subjected to cycles of non-radioactive pre-amplification.

Selective PCR

[1217] In order to limit the number of fragments or bands on each lane of the AFLP gel, fragments are subjected to another round of selective radioactive polymerase chain amplification. The TaqI primers used in this amplification are 5′-labelled with P³³. For these amplifications, the TaqI primers have two extra nucleotides at their 3′ end and the MseI primers have three extra nucleotides at their 3′ end. This results in 16 primer designs for the TaqI primer and 64 primer designs for the MseI primer. Altogether, this gives rise to a total of 1024 primer designs. Fragments generated in this selective amplification protocol are run with labeled molecular weight markers on polyacrylamide gels to separate fragments in the size range of 100-600 nucleotides.

[1218] Following gel electrophoresis, profiles are analyzed with a phosphoimager. From these images, electronic files, giving the mobilities of all bands on the gels and their intensities in each of the samples, are compiled.

[1219] All unique bands are cut out of the gels. The gel pieces are placed in 96 well plates for elution and their plate designation linked to their electrophoretic mobilities recorded in the electronic files. The eluted fragments are then subjected to another round of amplification, this time using reamplification primers (see below). After amplification, DNA fragments are sequenced.

[1220] A computer database is established linking the mobilities of all the bands observed on the cDNA-AFLP gels with the sequence of the correspondingly isolated fragment. The sequence allows for identification of the gene from which the cDNA-AFLP fragment is derived, allowing for a linkage of band mobility with the transcript of a specific gene. Also linked to the band mobilities are their intensities recorded for each of the eleven samples used in constructing the database.

[1221] This cDNA-AFLP analysis with TaqI/MseI and 1024 primer combinations is repeated using the enzymes NlaIII in place of TaqI, and Csp6I in place of MseI.

Using the Database for the Transcript Profiling of Experimental Samples

[1222] Experimental Samples are subjected to cDNA-AFLP as described above, resulting in electronic files recording band mobilities and intensities. Through use of the database established above, band mobilities are linked to specific cDNAs, and therefore genes. Furthermore, the linkage with the intensities in the respective samples allows for the quantification of specific cDNAs in these samples, and thus the relative concentration of specific transcripts in the samples, indicating the level to which specific genes are expressed.

[1223] Reamplification Primers

99G24
CGCCAGGGTTTTCCCAGTCACGAC|ACGACTCACT|
gatgagtcctgagtaa|
M13 forward +10 MseI+0
99G20
AGCGGATAACAATTTCACACAGGA|CACACTGGTA|
tagactgcgtaccga|
M13 reverse +10 TaqI+0

Purification of the Reamplifiction Reaction Before Sequencing
[1224] 5 μl reamplification reaction
[1225] 0.25 μl 10×PCR buffer
[1226] 0.33 μl Shrimp Alkaline Phosphatase (Amersham Life Science)
[1227] 0.033 μl Exonuclease I (USB)
[1228] 0.297 μI SAP dilution buffer
   1.59 μl MO
[1229] 7.5 μl total
[1230] 30′ 37° C.
[1231] 10′ 80° C.
[1232] 4° C.
   Sample Preparation
[1233] S1: Dark adapted seedlings: Seeds of Arabidopsis thaliana (wassilewskija) are sown in pots and left at 4° C. for two to three days to vernalize. They are transferred to a growth chamber after three days. The intensity of light in the growth chamber is 7000-8000 LUX, temperature is 22° C., with 16 h light and 8 h dark. After 8 days, the seedlings are foil-wrapped and harvested after two days.
[1234] S2: Roots/Etiolated seedlings: Seeds of Arabidopsis thaliana (wassilewskija) are germinated on solid germination media (1× MS salts, 1× MS vitamins, 20 g/L sucrose, 50 mg/L MES pH 5.8) in the dark. Tissues are harvested 14 days later.
[1235] S3: Mature leaves, soil grown: Seeds of Arabidopsis thaliana (wassilewskija) are sown in pots and left at 4° C. for two to three days to vernalize. They are transferred to a growth chamber after three days. The intensity of light in the growth chamber is 7000-8000 LUX, temperature is 22° C., with 16 h light and 8 h dark. Leaves are harvested 17 days later from plants that have not yet bolted.
[1236] S4: Immature buds, inflorescence meristem: Seeds of Arabidopsis thaliana (wassilewskija) are sown in pots and left at 4° C. for two to three days to vernalize. They are transferred to a growth chamber after three days. The intensity of light in the growth chamber is 7000-8000 LUX, temperature is 22° C., with 16 h light and 8 h dark.
[1237] S5: Flowers, opened: Seeds of Arabidopsis thaliana (wassilewskija) are sown in pots and left at 4° C. for two to three days to vernalize. They are transferred to a growth chamber after three days. The intensity of light in the growth chamber is 7000-8000 LUX, temperature is 22° C., with 16 h light and 8 h dark.
[1238] S6: Siliques, all stages: Seeds of Arabidopsis thaliana (wassilewskija) are sown in pots and left at 4° C. for two to three days to vernalize. They are transferred to a growth chamber after three days. The intensity of light in the growth chamber is 7000-8000 LUX, temperature is 22° C., with 16 h light and 8 h dark.
[1239] S7: Senescing leaves (just beginning to yellow): Seeds of Arabidopsis thaliana (wassilewskija) are sown in pots and left at 4° C. for two to three days to vernalize. They are transferred to a growth chamber after three days. The intensity of light in the growth chamber is 7000-8000 LUX, temperature is 22° C., with 16 h light and 8 h dark. When the plant has leaves that are less than 50% yellow, the leaves that are just beginning to yellow are harvested.
[1240] S8:

[1241] Callus Inducing Medium: Seeds of Arabidopsis thaliana (wassilewskija) are surface sterilized (1 min-75% Ethanol, 6 min-bleach 100%+Tween 20, rinse) and incubated on MS medium containing 2,4-Dichlorophenoxyacetic acid (2,4-D) 1 mg/l and Kinetin 1 mg/l in the dark for 3 weeks to generate primary callus.

[1242] Hypocotyls and roots of the seedling are swollen after a week after incubation in this callus induction medium and subsequently callus is initiated from these swollen areas.

[1243] Callus shoot induction: Primary calluses are transferred to the fresh callus induction medium for another 2 weeks growth to generate secondary callus. Secondary callus is transferred to shoot induction medium containing MS basal medium and Benzyladenine (BA) 2 mg/l and Naphthaleneacetic acid (NAA)). 1 mg/l for 2 weeks growth in the light before it is harvested and frozen and sent to Keygene. Many shoot meristems are observed under the microscope.

[1244] Callus root induction: Secondary calluses is transferred to root induction medium containing MS basal medium, sucrose 1% and Indolebutyric acid (IBA) 0.05 mg/l in the dark. Many root primordia are observed under microscope after 10 days in the root induction medium. Those callus tissue are harvested and frozen and sent to Keygene.
[1245] S9:

[1246] Wounding: Seeds of Arabidopsis thaliana (wassilewskija) are sown in pots and left at 4° C. for two to three days to vernalize. They are transferred to a growth chamber after three days. The intensity of light in the growth chamber is 7000-8000 LUX, temperature is 22° C., with 16 h light and 8 h dark. After 20 days, leaves of plants are wounded with pliers. Wounded leaves are harvested 1 hour and 4 hours after wounding.

[1247] Methyl iasmonate treatment: Seeds of Arabidopsis thaliana (wassilewskija) are sown in pots and left at 4° C. for two to three days to vernalize. They are transferred to a growth chamber after three days. The intensity of light in the growth chamber is 7000-8000 LUX, temperature is 22° C., with 16 h light and 8 h dark. After 13 days, plants are sprayed with 0.001% methyl jasmonate. Leaves are harvested 1.5 hours and 6 hours after spraying
[1248] S10:

[1249] Oxidative stress: Seeds of Arabidopsis thaliana (wassilewskija) are sown in pots and left at 4° C. for two to three days to vernalize. They are transferred to a growth chamber after three days. The intensity of light in the growth chamber is 7000-8000 LUX, temperature is 22° C., with 16 h light and 8 h dark. After 24 days, a few leaves are inoculated with a mixture of 2.5 mM D-glucose, 2.5 U/mL glucose oxidase in 20 mM sodium phosphate buffer pH 6.5. After an hour, 3 hours, or 5 hours after inoculation, whole plant, except for the inoculated leaves, is harvested. This sample is mixed with sample from plants that are sitting in full sun (152,000 LUX) for 2 hours or four hours.

[1250] Drought stress: Seeds of Arabidopsis thaliana (wassilewskija) are sown in pots and left at 4° C. for two to three days to vernalize. They are transferred to a growth chamber after three days. The intensity of light in the growth chamber is 7000-8000 LUX, temperature is 22° C., with 16 h light and 8 h dark. After 20 days, aerial tissues are harvested and left to dry in 3MM Whatman paper for 1 hour or 4 hours.

[1251] Oxygen stress: Seeds of Arabidopsis thaliana (wassilewskija) are sown in pots and left at 4° C. for two to three days to vernalize. They are transferred to a growth chamber after three days. The intensity of light in the growth chamber is 7000-8000 LUX, temperature is 22° C., with 16 h light and 8 h dark. After 21 days, the plant is flooded by immersing its pot in a beaker of tap water. After 6 days, the upper tissues are harvested.
[1252] S11: Heat-treated light grown seedlings: Seeds of Arabidopsis thaliana (wassilewskija) are sown in pots and left at 4° C. for two to three days to vernalize. They are transferred to a growth chamber after three days. The intensity of light in the growth chamber is 7000-8000 LUX, temperature is 22° C., with 16 h light and 8 h dark. Over a 5 hour period, the temperature is raised to 42° C. at the rate of approximately 4° C. per hour. After I hour at 42° C. . , the aerial tissues re collected. This sample is mixed with an equal volume of sample that has gone through a heat-recovery treatment namely bringing down the temperature to 22° C. from 42° C. over a 5 hour period at the rate of 4° C. per hour.

[1253] Cold-treated light grown seedlings: Seeds of Arabidopsis thaliana (wassilewskija) are sown in pots and left at 4° C. for two to three days to vernalize. They are transferred to a growth chamber after three days. The intensity of light in the growth chamber is 7000-8000 LUX, temperature is 22° C., with 16 h light and 8 h dark. After 18 days, the plant is transferred to 4° C. for an hour before the aerial tissues are harvested. This sample is mixed with aerial tissues from another plant that is transferred to 4° C. for 27 hours before being harvested.

Analysis of Data

[1254] Intensity: The intensity of the band corresponds to the value in each lane marked S1, S2 etc.
[1255] P-values: The data shows P-values of each of the samples 1-11. P-values are calculated using the following formula 2*(1-NORMDIST(ABS(Sx-AVERAGE(of S1 to S11, not including Sx))/STDEV(of S1 to S11 not including Sx),0,1,TRUE)) using Excel functions.

[1256] The equivalent mathematical formula of P-value is as follows:

∫φ(x) dx, integrated from a to ∞,

[1257] where φ(x) is a normal distribution:

where a=|Sx−μ|

[1258] σ(S1 . . . S11, not including Sx);

[1259] where μ=is the average of the intensities of all samples except Sx,

$$= \frac{( Σ S 1 … Sn ) - Sx}{n - 1}$$

[1260] where σ(S1 . . . S11, not including Sx)=the standard deviation of all sample intensities except Sx.

Results

[1261] The results are shown in the MA tables.

### Example 5

### Transformation of Carrot Cells

[1262] Transformation of plant cells can be accomplished by a number of methods, as described above. Similarly, a number of plant genera can be regenerated from tissue culture following transformation. Transformation and regeneration of carrot cells as described herein is illustrative.

[1263] Single cell suspension cultures of carrot (Daucus carota) cells are established from hypocotyls of cultivar Early Nantes in B₅ growth medium (O. L. Gamborg et al., Plant Physiol. 45:372 (1970)) plus 2,4-D and 15 mM CaCl₂ (B₅-44 medium) by methods known in the art. The suspension cultures are subcultured by adding 10 ml of the suspension culture to 40 ml of B₅-44 medium in 250 ml flasks every 7 days and are maintained in a shaker at 150 rpm at 27 ° C. in the dark.

[1264] The suspension culture cells are transformed with exogenous DNA as described by Z. Chen et al. Plant Mol. Bio. 36:163 (1998). Briefly, 4-days post-subculture cells are incubated with cell wall digestion solution containing 0.4 M sorbitol, 2% driselase, 5 mM MES (2-[N-Morpholino]ethanesulfonic acid) pH 5.0 for 5 hours. The digested cells are pelleted gently at 60×g for 5 min. and washed twice in W5 solution containing 154 mM NaCl, 5 mM KCl, 125 mM CaCl₂ and 5 mM glucose, pH 6.0. The protoplasts are suspended in MC solution containing 5 mM MES, 20 mM CaCl₂, 0.5 M mannitol, pH 5.7 and the protoplast density is adjusted to about 4×10⁶ protoplasts per ml.

[1265] 15-60 μg of plasmid DNA is mixed with 0.9 ml of protoplasts. The resulting suspension is mixed with 40% polyethylene glycol (MW 8000, PEG 8000), by gentle inversion a few times at room temperature for 5 to 25 min. Protoplast culture medium known in the art is added into the PEG-DNA-protoplast mixture. Protoplasts are incubated in the culture medium for 24 hour to 5 days and cell extracts can be used for assay of transient expression of the introduced gene. Alternatively, transformed cells can be used to produce transgenic callus, which in turn can be used to produce transgenic plants, by methods known in the art. See, for example, Nomura and Komamine, Plt. Phys. 79:988-991 (1985), Identification and Isolation of Single Cells that Produce Somatic Embryos in Carrot Suspension Cultures.

### Example 6

### Phenotype Screens and Results

A: Triparental Mating and Vacuum Infiltration Transformation of Plants

[1266] Standard laboratory techniques are as described in Sambrook et al. (1989) unless otherwise stated. Single colonies of Agrobacterium C58C2Rif, E. coli helper strain HB101 and the E. coli strain containing the transformation construct to be mobilized into Agrobacterium areseparately inoculated into appropriate growth media and stationary cultures produced. 100 μl of each of the three cultures are mixed gently, plated on YEB (5 g Gibco beef extract, 1 g Bacto yeast extract, 1 g Bacto peptone, 5 g sucrose, pH 7.4) solid growth media and incubated overnight at 28° C. The bacteria from the triparental mating are collected in 2 ml of lambda buffer (20 mM Tris (pH 7.5), 100 mM NaCl, 10 mM MgCl₂) and serial dilutions made. An aliquot of the each dilution is then plated and incubated for 2 days at 28° C. on YEB plates supplemented with 100 μg/ml rifampicin and 100 μg/ml carbenicillin for calculation of the number of acceptor cells and on YEB plates supplemented with 100 μg/ml rifampicin, 100 μg/ml carbenicillin and 100 μg/ml spectinomycin for selection of transconjugant cells. The cointegrate structure of purified transconjugants is verified via Southern blot hybridization.

[1267] A transconjugant culture is prepared for vacuum infiltration by innoculating 1 ml of a stationary culture arising from a single colony into liquid YEB media and incubating at 28° C. for approximately 20 hours with shaking (220 rpm) until the OD taken at 600 nm was 0.8-1.0. The culture is then pelleted (8000 rpm, 10 min, 4° C. in a Sorvall SLA 3000 rotor) and the bacteria resuspended in infiltration medium (0.5× MS salts, 5% w/v sucrose, 10 μg/l BAP, 200 μl/l Silwet L-77, pH 5.8) to a final OD₆₀₀ of 1.0. This prepared transconjugant culture is used within 20 minutes of preparation.

[1268] Wild-type plants for vacuum infiltration are grown in 4-inch pots containing Metromix 200 and Osmocote. Briefly, seeds of Arabidopsis thaliana (ecotype Wassilewskija) are sown in pots and left at 4° C. for two to four days to vernalize. They are then transferred to 22-25° C. and grown under long-day (16 hr light: 8 hr dark) conditions, sub-irrigated with water. After bolting, the primary inflorescence is removed and, after four to eight days, the pots containing the plants are inverted in the vacuum chamber to submerge all of the plants in the prepared transconjugant culture. Vacuum is drawn for two minutes before pots are removed, covered with plastic wrap and incubated in a cool room under darkness or very low light for one to two days. The plastic wrap is then removed, the plants returned to their previous growing conditions and subsequently produced (T1) seed collected.

B: Selection of T-DNA Insertion Lines

[1269] Approximately 10,750 seeds from the initial vacuum infiltrated plants are sown per flat of Metromix 350 soil. Flats are vernalized for four to five days at 4° C. before being transferred to 22-25° C. and grown under long-day (16 hr light: 8 hr dark) conditions, sub-irrigated with water. Approximately seven to ten days after germination, the (T1) seedlings are sprayed with 0.02% Finale herbicide (AgrEvo). After another five to seven days, herbicide treatment is repeated. Herbicide resistant T1 plants are allowed to self-pollinate and T2 seed are collected from each individual. In the few cases where the T1 plant produced few seed, the T2 seed is planted in bulk, the T2 plants allowed to self-pollinate and T3 seed collected.

C: Phenotype Screening

[1270] Approximately 40 seed from each T2 (or T3) line are planted in a 4-inch pot containing either Sunshine mix or Metromix 350 soil. Pots are vernalized for four to five days at 4° C. before being transferred to 22-25° C. and grown under long-day (16 hr light: 8 hr dark) conditions, sub-irrigated with water. A first phenotype screen is conducted by visually inspecting the seedlings five to seven days after germination and aberrant phenotypes noted. Plants are then sprayed with Finale herbicide within four days (i.e. about seven to nine days after germination). The second visual screen is conducted on surviving T2 (or T3) plants about sixteen to seventeen days after germination and the final screen was conducted after the plants have bolted and formed siliques. Here, the third and fourth green siliques are collected and aberrant phenotypes noted. The Knock-in Table contains descriptions of identified phenotypes.

[1271] Alternatively, seed are surface sterilized and transferred to agar solidified medium containing Murashige and Skoog salts (1×), 1% sucrose (wt/v) pH 5.7 before autoclaving. Seed re cold treated for 48 hours and transferred to long days [16 hours light and 8 hours dark], 25° C. Plants are screened at 5 and 10 days.

[1272] In another screen, seed are surface sterilized and transferred to agar solidified medium containing Murashige and Skoog salts (1×), and combinations of various nitrogen and sucrose amounts as specified below::

[1274] Medium 1: no sucrose, 20.6 mM NH₄NO₃, 18.8 mM KNO₃;

[1275] Medium 2: 0.5% sucrose, 20.6 mM NH₄NO3, 18.8 mM KNO₃;

[1276] Medium 3: 3% sucrose, 20.6 mM NH₄NO₃, 18.8 mM KNO₃;

[1277] Medium 4: no sucrose, 20.6 μM NH₄NO₃, 18.8 μM KNO₃;

[1278] Medium 5: 0.5% sucrose, 20.6 μM NH₄NO₃, 18.8 μM KNO₃; and

[1279] Medium 6: 3% sucrose, 20.6 μM NH₄NO₃b , 18.8 μM KNO₃.

[1280] The 0.5% sucrose is the control concentration for the sucrose. The low nitrogene, 20.6 μM NH₄NO₃, 18.8 μM KNO₃, is the control for the nitrogen. Seed are cold treated for 48 hours and transferred to long days [16 hours light and 8 hours dark], 25° C. Plants are screened at 2, 5, and 10 days.

D: TAIL-PCR and Fragment Sequencing

[1281] Rosette leaves are collected from each putative mutant and crushed between parafilm and FTA paper (Life Technologies). Two 2 mm² hole punches are isolated from each FTA sample and washed according to the manufacturer's instructions by vortexing with 200 ul of the provided FTA purification reagent. The FTA reagent is removed and the washing procedure repeated two more times. The sample is then washed twice with 200 ul of FTA TE (10 mM Tris, 0.1 mM EDTA, pH 8.0) and vortexing prior to PCR.

[1282] Primers used for TAIL-PCR are as follows:

AD2: 5′ NGTCGASWGANAWGAA 3′ (128-fold degeneracy)
S = G or C, W = A or T, and N = A, G, C, or T
LB1: 5′ GTTTAACTGCGGCTCAACTGTCT 3′
LB2: 5′ CCCATAGACCCTTACCGCTTTAGTT 3′
LB3: 5′ GAAAGAAAAAGAGGTATAACTGGTA 3′

[1283] The extent to which the left and right borders of the T-DNA insert are intact is measured for each line by PCR. The following components are mixed for PCR: 1 2 mm² FTA sample, 38.75 μl distilled water, 5 μl 10× Platinum PCR buffer (Life Technologies), 2 μl 50 mM MgCl₂, 1 μl 10 mM dNTPs, 1 μl 10 μM primer LB1 (or RB1 for analysis of the right border), 1 μl 10 μM primer LB3R (or RB3R for analysis of the right border) and 1.25 U Platinum Taq (Life Technologies). Cycling conditions are: 94° C., 10 sec.; thirty cycles of 94° C., 1 sec.—54° C., 1 sec.—72° C., 1 sec.; 72° C., 4 sec. The expected band size for an intact left border is bp, while an intact right border generates a bp band.

[1284] Fragments containing left or right border T-DNA sequence and adjacent genomic DNA sequence are obtained via PCR. First product PCR reactions use the following reaction mixture: 1 2 mm² FTA sample, 12.44 μl distilled water, 2 μl 10× Platinum PCR buffer (Life Technologies), 0.6 μl 50 mM MgCl₂, 0.4 μl 10 mM dNTPs, 0.4 μl 10 μM primer LB1 (or RB1 for analysis of the right border), 3 μl 20 μM primer AD2 and 0.8 U Platinum Taq (Life Technologies). Cycling conditions for these reactions are: 93° C., 1 min.; 95° C., 1 min.; three cycles of 94° C., 45 sec. −62° C., 1 min. −72° C., 2.5 min.; 94° C., 45 sec.; 25° C., 3 min.; ramp to 72° C. in 3 min.; 72° C., 2.5 min.; fourteen cycles of 94° C., 20 sec. −68° C., 1 min. −72° C., 2.5 min. −94° C., 20 sec.; −68° C., 1 min. −72° C., 2.5 min. −94° C., 20 sec. −44° C., 1 min. −72° C., 2.5 min.; 72° C., 5 min.; end; ˜4.5 hrs. For second product PCR reactions 1 μl of a 1:50 dilution of the first PCR product reaction is mixed with 13.44 μl distilled water, 2 μl 10× Platinum PCR buffer (Life Technologies), 0.6 μl 50 mM MgCl₂, 0.4 μl 10 mM dNTPs, 0.4 μl 10 μM primer LB2 (or RB2 for analysis of the right border), 2 μl 20 μM primer AD2 and 0.8 U Platinum Taq (Life Technologies). Second product cycling conditions are: eleven cycles of 94° C., 20 sec. −64° C., 1 min. −72° C., 2.5 min. −94° C., 20 sec. −64° C., 1 min. −72° C., 2.5 min. −94° C., 20 min. −44° C., 1 min.; 72° C., 5 min.; end; ˜3 hrs. Third product PCR reactions were prepared by first diluting 2 μl of the second PCR product with 98 μl of distilled water and then adding 1 μl of the dilution to 13.44 μl distilled water, 2 μl 10× Platinum PCR buffer (Life Technologies), 0.6 μl 50 mM MgCl₂, 0.4 μl 10 mM dNTPs, 0.4 μl 10 μM primer LB3 (or RB3 for analysis of the right border), 2 μl 20 μM primer AD2 and 0.8 U Platinum Taq (Life Technologies). Third product cycling conditions are: twenty cycles of 94° C., 38 sec. −44° C., 1 min. −72° C., 2.5 min.; 72° C., 2.5 min.; 72° C., 5 min.; end; ˜2 hrs. Aliquots of the first, second and third PCR products are electrophoresed on 1% TAE (40 mM Tris-acetate, 1 mM EDTA) to determine their size.

[1285] Reactions are purified prior to sequencing by conducting a final PCR reaction. Here, 0.25 μl Platinum PCR Buffer (Life Technologies), 0.1 μl 50 mM MgCl₂, 3.3 U SAP shrimp alkaline phosphatase, 0.33 U Exonuclease and 1.781 μl distilled water are added to a 5 μl third product and the reaction cycled at 37° C., 30 min.; 80° C., 10 min.; 4° C. indefinitely.

[1286] Di-deoxy “Big Dye” sequencing is conducted on Perkin-Elmer 3700 or 377 machines.

Knock-In Experiments

[1287] For the following examples, a two-component system is constructed in a plant to ectopically express the desired cDNA.

[1288] First, a plant is generated by inserting a sequence encoding a transcriptional activator downstream of a desired promoter, thereby creating a first component where the desired promoter facilitates expression of the activator generated a plant. The first component is also referred to as the activator line.

[1289] Next, the second component is constructed by linking a desired cDNA to a sequence that the transcriptional activator binds to and facilitate expression of the desired cDNA. The second component is inserted into the activator line by transformation. Alternatively, the second component is inserted into a separate plant, also referred to as the target line. Then, the target and activator lines are crossed to generate progeny that have both components.

[1290] Two component lines are generated by both means.

Part I—From Crosses

[1291] Target lines containing cDNA constructs are generated using the Agrobacterium-mediated transformation. Selected target lines are genetically crossed to activation lines (or promoter lines). Generally, the promoter lines used are as described above. Evaluation of phenotypes is done on the resulting F1 progenies.

Part II—From Type I Supertransformation

[1292] Promoter activation lines (generally Vascular/Ovule/Young Seed/Embryo line, Seed/Epidermis/Ovary/Fruit line, Roots/Shoots/Ovule line, and Vasculature/Meristem are transformed with cDNA constructs using the Agrobacterium mediated transformation. Selected transformants (and their progenies) are evaluated for changes in phenotypes. The table for the knock-in of the Type I supertransformation comprises the following information
[1293] Clone ID,
[1294] Pfam,
[1295] Gemini ID
[1296] Trans. Unique ID (which indicates what promoter activation line was transformed
[1297] S Ratio: segregation ratio after the transformed plants are selected for the marker.
[1298] Assay
[1299] Stage: phenotype was observed
[1300] Feature: Where the phenotype was observed
[1301] Phenotype
[1302] P Ratio: phenotype ratio
[1303] Comments
   Part III—From Type II Supertransformation

[1304] Target lines generated using the procedure mentioned in Part I are transformed with T-DNA construct containing constitutive promoter. Selected transformants (and their progenies) are evaluated for changes in phenotypes.

[1305] An additional deposit of an E. coli Library, E. coli LibA021800, was made at the American Type Culture Collection in Manassas, Va., USA on Feb. 22, 2000 to meet the requirements of Budapest Treaty for the international recognition of the deposit of microorganisms. This deposit was assigned ATCC accession no. PTA-1411. Additionaly, ATCC Library deposits; PTA-1161, PTA-1411 and PTA-2007 were made at the American Type Culture Collection in Manassas, Va., USA on; Jan. 7, 2000, Feb. 23, 2000 and Jun. 8, 2000 respectively, to meet the requirements of Budapest Treaty for the international recognition of the deposit of microorganisms.

[1306] The invention being thus described, it will be apparent to one of ordinary skill in the art that various modifications of the materials and methods for practicing the invention can be made. Such modifications are to be considered within the scope of the invention as defined by the following claims.

[1307] The scientific periodical and patent publications that follow are discussed in the Specification and are hereby incorporated by reference in their entirety:
[1308] Ahn et al. (1993) Molecular and General Genetics 241: 483-90
[1309] Albert et al. (1995) Plant J. 7:649
[1310] Alonso-Blanco et al. (c. 1998 ) Methods in Molecular Biology, vol. 82, “Arabidopsis Protocols”, pp. 137-146, J. M. Martinez-Zapater and J. Salinas, eds., Humana Press, Totowa, N.J.
[1311] Armaleo et al. (1990) Current Genetics 17:97
[1312] Ausubel et al. (1992) Current Protocols in Molecular Biology, Greene Publishing, New York).
[1313] Azpiroz-Leehan et al. (1997) Trends in Genetics 13:152
[1314] Binding (1988) Regeneration of Plants, Plant Protoplasts, pp. 21-73, CRC Press, Boca Raton,
[1315] Bonner et al. (1973) J. Mol. Biol. 81:123
[1316] Bradshaw et al. (1995) Nucl Acids Res 23: 4850-4856
[1317] Buchanan, Gruissem, and Russel (eds) 2000, Biochemistry and Molecular Biology of Plants, Amer. Soc. of Plant Physiologists, Rockville, Md.
[1318] Burke et al. (1987) Science 236:806-812
[1319] Burr (c. 1994 ) “Mapping Genes with Recombinant Inbreds”, pp. 249-254. In Freeling, M. and V. Walbot (Ed.), The Maize Handbook Springer-Verlag New York, Inc.: New York, N.Y., USA; Berlin Germany
[1320] Burr et al. (1998) Genetics 118: 519
[1321] Carels et al. (1998) J. Mol. Evol. 46: 45
[1322] Chang et al. (1993) Gene 127:95
[1323] Christou, (1995) Euphytica 85 (1-3):13-27
[1324] Chusacultanachai et al. (1999) J. Biol. Chem. 274:23591
[1325] Cox and Goldberg (c. 1988 ) “Plant Molecular Biology: A Practical Approach”, pp. 1-35, Shaw ed., IRL, Oxford
[1326] De Martinis et al. (1999) Plant Cell 11:1061
[1327] de Vicente and Tanksley (1993) Genetics 134:585
[1328] Dumas Milne Edwards J. B. (20 Dec. 1993) Doctoral Thesis of Paris VI University, Le clonage des ADNc complets: difficultés et perspectives nouvelles. Apports pour l'étude de la régulation de l'expression de la tryptophane hydroxylase de rat.
[1329] Escudero et al. (1996) Plant J. 10:355
[1330] Evans et al., (1 983) Protoplasts Isolation and Culture in “Handbook of Plant Cell Culture,” pp. 124-176, MacMillan Publishing Company, New York
[1331] Fennoy et al. (1993) Nucl. Acids Res. 21(23): 5294 (scientific periodical and patent publications incorporated by reference continued)
[1332] Frischauf et al. (1983) J. Mol Biol 170: 827-842
[1333] Fromm et al. (1985) Proc. Natl Acad. Sci. USA 82:5824
[1334] Fry et al. (1992) Biotechniques 13: 124
[1335] Gardiner, J. et al. (1993) Genetics 134: 917
[1336] Ghosh et al. (1994) J. Biotechnol. 32:1
[1337] Gleave (1992) Plant Mol. Biol. 20:1203
[1338] Golovkin et al. (1999) J. Biol. Chem. 274:36428
[1339] Gould et al. (1991) Plant Physiology 95:426
[1340] Graves and Goldman (1986) Plant Mol. Biol. 7:34
[1341] Hamilton et al (1990) Nature 346:284-287
[1342] Hamilton et al. (1996) Proc. Natl. Acad. Sci. USA 93: 9975-9979
[1343] Hamilton (1997) Gene 200:107
[1344] Haseloff et al. (1988) Nature, 334:585
[1345] Herrera-Estrella et al. (1983) EMBO J. 2:987
[1346] Hochstrasser (2000) Science 289: 563
[1347] Hosoyama et al. (1994) Biosci. Biotechnol. Biochem. 58:1500
[1348] Hu et al. (2000) Methods 20:80
[1349] Huynh et al., In: Glover NM (ed) DNA Cloning: A practical Approach, Vol. 1 Oxford: IRL Press (1985
[1350] Ichimura et al. (1998) Biochem. Biophys. Res. Comm. 253:532
[1351] Ishida et al. (1996) Nature Biotechnology 14:745
[1352] Joazeiro and Hunter (2001) Science 289: 2061;
[1353] Kaczor et al. (1994) Plant Physiol. 1-4: 1411-7
[1354] Kato et al. (1994) Gene 150:243-250
[1355] Keegstra and Cline (1999) The Plant Cell 11: 557-570
[1356] Keller and M. M. Manak (c. 1993 )“DNA Probes”, 2^{nd} Ed. pp. 1-25, by Stockton Press, New York, N.Y.
[1357] Klee et al. (1987) Ann. Rev. of Plant Phys. 38:467
[1358] Klein et al. (1987) Nature 327:773
[1359] Kohler and Milstein (1975) Nature 256: 495
[1360] Koltonow et al. (1990) Plant Cell 2:1201
[1361] Komari et al. (1996) Plant J. 10:165
[1362] Liljegren (1999) Plant Cell 11:1007
[1363] Lin et al. (1997) J. Biol. Chem. 272:27274
[1364] Luo et al. (1997) J. Mol. Biol. 266:479
[1365] Marra et al. (1997) Genomic Research 7:1072-1084
[1366] Mariani et al. (1992) Nature 357: 384-387
[1367] Martinez et al. (1999) Mol. Gen. Genet. 261:546
[1368] Maruyama et al. (1994) Gene 138:171
[1369] Marty (1999) The Plant Cell 11: 587-599
[1370] Matteucci etal. ( 1981) J. Am. Chem. Soc. 103:3185
[1371] May et al. (1995) Bio/Technology 13:486
[1372] McAlister-Henn et al. (1999) Methods 19:330
[1373] McCormac et al. (1997) Mol. Biotechnol. 8:199 (scientific periodical and patent publications incorporated by reference continued)
[1374] Michaels et al. (1999) Plant Cell 11:949
[1375] Morgante et al. (1993) The Plant Journal 3: 165
[1376] Müller et al. (1987) Mol. Gen. Genet. 207:171
[1377] Napoli et al. (1990) The Plant Cell 2:279
[1378] Oeller, et al (1991) Science 254:437-439
[1379] Panaud et al. (1995) Genome 38: 1170
[1380] Paszkowski et al. (1984) EMBO J. 3:2717
[1381] Pearson and Lipman (1988) Proc. Natl. Acad Sci. (USA) 85: 2444
[1382] Pierrou et al., (1995) Anal. Biochem. 229:99
[1383] Refseth et al. (1997) Electrophoresis 18: 1519
[1384] Sakamoto et al. (2001) PNAS Online 141230798
[1385] Salomon et al. (1984) EMBO J. 3:141
[1386] Sambrook et al. (1989) Molecular Cloning: A Laboratory Manual, 2^{nd} ed. Cold Spring Harbor Laboratory Press, New York)
[1387] Schneider (1976) Z. naturforsch. [C] 31: 55-63
[1388] Schwarz et al. (1992) Mol. Cell. Biol. 12:266
[1389] Seki et al. (1998) Plant Journal 15:707-720
[1390] Senior et al. (1996) Crop Science 36: 1676
[1391] Sheehy et al. (1988) Proc. Nat. Acad. Sci. USA, 85:8805
[1392] Shizuya et al. (1992) Proc. Natl. Acad. Sci. USA 89: 8794-8797
[1393] Smith (1988) Biochem. J. 249: 423-8
[1394] Smith and Waterman (1981) Add. APL. Math. 2:482
[1395] Spiker and Thompson (1996) Plant Physiol. 110: 15-21
[1396] Sternberg N. et al. (1990) Proc Natl Acad Sci USA. 87(1):103-7
[1397] Tanksley et al. (1997) Science 277:1063
[1398] Tanksley and McCouch (1997) Science 277:1063
[1399] Taramino et al. (1996) Genome 39: 277
[1400] Tijessen (c. 1993) “Hybridization with Nucleic Acid Probes” in Laboratory Techniques in Biochemistry and Molecular Biology, P. C. vand der Vliet, ed., Elsevier, Amsterdam.
[1401] Urdea et al. (1981) Proc. Natl. Acad. 80:7461
[1402] van der Krol et al. (1990) Plant Cell 2:291
[1403] Venkateswarlu et al. (1991) Biotechnology 9:1103
[1404] Vergunst et al. (1998) Nucleic Acids Res. 26:2729
[1405] Vergunst et al. (1998) Plant Mol. Biol. 38:393
[1406] Vitale and Denecke (1999) The Plant Cell 11: 615-628
[1407] Walden et al. (1990) Mol Cell Biol 1: 175-194
[1408] Weigel and Meyerowitz, (1993) In Molecular Basis of Morphogenesis (ed. M. Bernfield). 51st Annual Symposium of the Society for Developmental Biology, pp. 93-107, New York
[1409] Weising et al. (1988) Ann. Rev. Genet. 22:421
[1410] Wunsch (1970) J. Mol. Biol. 48:443
[1411] Xu et al. (1995) Plant Mol. Biol. 27:237
[1412] Yamamoto et al. (1991) Plant Cell 3:371
   (scientific periodical and patent publications incorporated by reference continued)
[1413] Bouckaert et al., U.S. Ser. No. 60/121,700 Atty. Dkt. No. 2750-117P, Client Dkt. No. 00010.001
[1414] EP0 625572
[1415] U.S. Pat. No. 4,801,340
[1416] U.S. Pat. No. 5,034,323
[1417] U.S. Pat. No. 5,231,020
[1418] U.S. Pat. No. 5,283,184
[1419] U.S. Pat. No. 5,410,270
[1420] U.S. Pat. No. 5,445,943
[1421] U.S. Pat. No. 5,766,847
[1422] U.S. Pat. No. 5,945,306
[1423] U.S. Pat. No. 5,945,287
[1424] U.S. Pat. No. 5,945,308
[1425] U.S. Pat. No. 5,919,686
[1426] U.S. Pat. No. 5,919,661
[1427] U.S. Pat. No. 5,919,627
[1428] U.S. Pat. No. 5,723,766
[1429] U.S. Pat. No. 5,859,330
[1430] U.S. Pat. No. 5,874,248
[1431] U.S. Pat. No. 5,871,973
[1432] U.S. Pat. No. 5,871,971
[1433] U.S. Pat. No. 5,871,930
[1434] U.S. Pat. No. 6,004,753
[1435] U.S. Pat. No. 6,004,804
[1436] U.S. Pat. No. 6,010,907
[1437] WO 95/35505
[1438] WO 96/34981
[1439] WO 98/07842
[1440] WO 98/10858
[1441] WO 98/58052
[1442] WO 99/06572
[1443] WO 99/07865
[1444] WO 99/15658
[1445] WO 99/31252
[1446] WO 99/33870
[1447] WO 99/33981
[1448] WO 99/46380
[1449] WO 99/58672
[1450] WO 99/58723

The application's sequence listing, which the Patent Office published only in electronic form, follows.

SEQUENCE LISTING (112047 sequences)

SEQ ID NO: 1 - DNA, 460 bp, Brassica napus
  misc_feature (1)..(460): Ceres Seq. ID no. 12556855
  misc_feature (266)..(266): n is a, c, t, g, unknown, or other
accgacaaaactccaaggtgccatataatctcaagtcaaatccagtctcgattccagttttgtttccactgcagtcccagctcaaatctcgaatctttgtaagaagcccagatctactcgtatggcgaagcacacggcggcgttgaaagccggactgactttgctggcgctgagcatgatcggttacatactcggtcctcctctctactggcacctcaccgaggcactggtcgcttccgcctcttcttgctctccttgcgtctgcnactgctcttccctgcctctcctcaccatccccaaaggactcagcaatggatcttttggagattgtgcaaagcatgacccagaggtgaacgaagacacagagaagaactatgctgagctcttaacagaggaactgaagcaacgcgaagcagcatcgatggagaaacacaaacgagtagacactggtctgctcgag

SEQ ID NO: 2 - protein, 113 aa, Brassica napus
  peptide (1)..(113): Ceres Seq. ID no. 12556856
  misc_feature (14)..(112): Homolog of NCBI NO: 18400504 NR Description: expressed protein
  misc_feature (1)..(112): Homolog of NCBI NO: 25407700 NR Description: hypothetical protein AT4g30990 [imported] -
  misc_feature (12)..(112): Homolog of NCBI NO: 18417716 NR Description: Expressed protein
  misc_feature (6)..(112): Homolog of NCBI NO: 34897026 NR Description: unknown protein [Oryza sativa (japonica
  misc_feature (8)..(112): Homolog of NCBI NO: 27922919 NR Description: unknown protein [Phytophthora sojae]
  misc_feature (1)..(112): Homolog of NCBI NO: 25364108 NR Description: hypothetical protein [imported] - Arabidopsis
  misc_feature (1)..(112): Homolog of NCBI NO: 18390477 NR Description: expressed protein
  misc_feature (1)..(112): Homolog of NCBI NO: 7487433 NR Description: hypothetical protein At2g32580 [imported] -
  misc_feature (1)..(112): Homolog of NCBI NO: 21553781 NR Description: unknown [Arabidopsis thaliana]
  misc_feature (1)..(112): Homolog of NCBI NO: 18403016 NR Description: expressed protein
  misc_feature (49)..(49): Xaa is any aa, unknown or other
MAKHTAALKAGLTLLALSMIGYILGPPLYWHLTEALVASASSCSPCVCXCSSLPLLTIPKGLSNGSFGDCAKHDPEVNEDTEKNYAELLTEELKQREAASMEKHKRVDTGLLE

SEQ ID NO: 3 - protein, 95 aa, Brassica napus
  peptide (1)..(95): Ceres Seq. ID no. 12556857
  misc_feature (1)..(94): Homolog of NCBI NO: 18400504 NR Description: expressed protein
  misc_feature (1)..(94): Homolog of NCBI NO: 25407700 NR Description: hypothetical protein AT4g30990 [imported] -
  misc_feature (1)..(94): Homolog of NCBI NO: 18417716 NR Description: Expressed protein
  misc_feature (1)..(94): Homolog of NCBI NO: 34897026 NR Description: unknown protein [Oryza sativa (japonica
  misc_feature (1)..(94): Homolog of NCBI NO: 27922919 NR Description: unknown protein [Phytophthora sojae]
  misc_feature (1)..(94): Homolog of NCBI NO: 25364108 NR Description: hypothetical protein [imported] - Arabidopsis
  misc_feature (1)..(94): Homolog of NCBI NO: 18390477 NR Description: expressed protein
  misc_feature (1)..(94): Homolog of NCBI NO: 7487433 NR Description: hypothetical protein At2g32580 [imported] -
  misc_feature (1)..(94): Homolog of NCBI NO: 21553781 NR Description: unknown [Arabidopsis thaliana]
  misc_feature (1)..(94): Homolog of NCBI NO: 18403016 NR Description: expressed protein
  misc_feature (31)..(31): Xaa is any aa, unknown or other
MIGYILGPPLYWHLTEALVASASSCSPCVCXCSSLPLLTIPKGLSNGSFGDCAKHDPEVNEDTEKNYAELLTEELKQREAASMEKHKRVDTGLLE

SEQ ID NO: 4 - DNA, 734 bp, Brassica napus
  misc_feature (1)..(734): Ceres Seq. ID no. 12557512
  misc_feature (484)..(484): n is a, c, t, g, unknown, or other
atacacaaaaaaatcatctcacagactcactcttcaagtctctccctctctccgatcatcaatggcggcgactatggcgacatcaaccagatgcatgtccctgaacccatctcctcctaaacccctaaaccaaaccaaacccatctcctcctcaaaacacttcatcaccctcccaactccaccaaaacccaccgtctctctcgccgtcacaagcaccgccctagccggagccgtcttctccgccctcagctactccgaacccgctctcgccgctcaccagatctcccagctcgccgccgccgccgtgtcggaaggcagcgacaaccgcggcctagctcttctcctcccgatcgtcccggccatcgggtgggtcctcttcaacatcctccagccagctctcaaccagatcaacaagatgcgcgcaagcaaaggagtcgtcgtgggtctcggcggcatcggtgatggtctcgccgcgtcagggctnttgacgccgccgccggaggcagtagctgcggcggaggcggcggagagagctggagataacaggggacagttgttgttgttcgtggttgcaccggcgctgctttgggttctttacaatatattgcagccggctttgaaccaactcaacaaaatgaggtctcagtgaaaactctttacaatatataaatattaatcatcgttcgtcctttgtttaagttttggacaattatccattgttatatatttcgctc

SEQ ID NO: 5 - protein, 215 aa, Brassica napus
  peptide (1)..(215): Ceres Seq. ID no. 12557513
  misc_feature (107)..(140): Pfam Name: Photosystem II protein Y (PsbY) Pfam Description: Photosystem II protein Y (PsbY)
  misc_feature (153)..(215): Homolog of NCBI NO: 6093830 NR Description: Photosystem II core complex proteins psbY,
  misc_feature (17)..(215): Homolog of NCBI NO: 6093830 NR Description: Photosystem II core complex proteins psbY,
  misc_feature (25)..(214): Homolog of NCBI NO: 21593330 NR Description: unknown [Arabidopsis thaliana]
  misc_feature (21)..(214): Homolog of NCBI NO: 15220530 NR Description: F12A21.13
  misc_feature (161)..(161): Xaa is any aa, unknown or other
YTKKSSHRLTLQVSPSLRSSMAATMATSTRCMSLNPSPPKPLNQTKPISSSKHFITLPTPPKPTVSLAVTSTALAGAVFSALSYSEPALAAHQISQLAAAAVSEGSDNRGLALLLPIVPAIGWVLFNILQPALNQINKMRASKGVVVGLGGIGDGLAASGXLTPPPEAVAAAEAAERAGDNRGQLLLFVVAPALLWVLYNILQPALNQLNKMRSQ

SEQ ID NO: 6 - protein, 195 aa, Brassica napus
  peptide (1)..(195): Ceres Seq. ID no. 12557514
  misc_feature (87)..(120): Pfam Name: Photosystem II protein Y (PsbY) Pfam Description: Photosystem II protein Y (PsbY)
  misc_feature (1)..(195): Homolog of NCBI NO: 6093830 NR Description: Photosystem II core complex proteins psbY,
  misc_feature (5)..(194): Homolog of NCBI NO: 21593330 NR Description: unknown [Arabidopsis thaliana]
  misc_feature (133)..(195): Homolog of NCBI NO: 6093830 NR Description: Photosystem II core complex proteins psbY,
  misc_feature (1)..(194): Homolog of NCBI NO: 15220530 NR Description: F12A21.13
  misc_feature (141)..(141): Xaa is any aa, unknown or other
MAATMATSTRCMSLNPSPPKPLNQTKPISSSKHFITLPTPPKPTVSLAVTSTALAGAVFSALSYSEPALAAHQISQLAAAAVSEGSDNRGLALLLPIVPAIGWVLFNILQPALNQINKMRASKGVVVGLGGIGDGLAASGXLTPPPEAVAAAEAAERAGDNRGQLLLFVVAPALLWVLYNILQPALNQLNKMRSQ

SEQ ID NO: 7 - protein, 191 aa, Brassica napus
  peptide (1)..(191): Ceres Seq. ID no. 12557515
  misc_feature (83)..(116): Pfam Name: Photosystem II protein Y (PsbY) Pfam Description: Photosystem II protein Y (PsbY)
  misc_feature (129)..(191): Homolog of NCBI NO: 6093830 NR Description: Photosystem II core complex proteins psbY,
  misc_feature (1)..(191): Homolog of NCBI NO: 6093830 NR Description: Photosystem II core complex proteins psbY,
  misc_feature (1)..(190): Homolog of NCBI NO: 21593330 NR Description: unknown [Arabidopsis thaliana]
  misc_feature (1)..(190): Homolog of NCBI NO: 15220530 NR Description: F12A21.13
  misc_feature (137)..(137): Xaa is any aa, unknown or other
MATSTRCMSLNPSPPKPLNQTKPISSSKHFITLPTPPKPTVSLAVTSTALAGAVFSALSYSEPALAAHQISQLAAAAVSEGSDNRGLALLLPIVPAIGWVLFNILQPALNQINKMRASKGVVVGLGGIGDGLAASGXLTPPPEAVAAAEAAERAGDNRGQLLLFVVAPALLWVLYNILQPALNQLNKMRSQ

SEQ ID NO: 8 - DNA, 767 bp, Brassica napus
  misc_feature (1)..(767): Ceres Seq. ID no. 12557607
  misc_feature (700)..(700): n is a, c, t, g, unknown, or other
atcatcatcatccactttcatctgtaatactaatatctaaatctcttccttcttcaccacccaaccaatcaagacctgactactcttgaagtttctgaaacaacagggcattttaatggcggccatgaactcgagtgttctcacctgcagctacgctatctctggtgctggctcagcagaactgaaccagaaagtgggtttggtcaattcatcagttggttttggtcaaaagaaacaaacgcttccagtgatcaaagcagctcaaagagttggtggtgatgatgttaatgaaagaagatccgcaatggtgttcttagctgctacactcttctcctctgctgctgtatctgcttccgctaatgctagcgtcttcgatgaatacctcgagaagagcaaagccaacaaagagctgaatgataagaagagattggcaacaagtggagcaaactttgcgagagcgtttactgtccagttcggaagctgcaagttccctgagaatttcactggctgccaagatcttgccaagcaaaagaaagttccatttatctcagaagatttggcgttggaatgtgaaggcaaagacaagttcaagtgtggttccaatgttttctggaaatggtgatcatcttttgtttctgttttaatccattcttgtataaactcaacaatgtatcaatccatctctctgttcatcaaagtntcatatccatttgaatttaaaagaaaccgaagaaactctgagtgtgtaatgaaacattattattcct

SEQ ID NO: 9 - protein, 168 aa, Brassica napus
  peptide (1)..(168): Ceres Seq. ID no. 12557608
  misc_feature (34)..(168): Pfam Name: Photosystem I reaction centre subunit N (PSAN or PSI-N) Pfam Description: Photosystem I reaction centre subunit N (PSAN
  misc_feature (85)..(133): Homolog of NCBI NO: 485082 NR Description: photosystem I 9K protein - rice (strain
  misc_feature (60)..(162): Homolog of NCBI NO: 12744797 NR Description: PsaN precursor [Chlamydomonas reinhardtii]
  misc_feature (71)..(162): Homolog of NCBI NO: 11134150 NR Description: Photosystem I reaction centre subunit N,
  misc_feature (78)..(168): Homolog of NCBI NO: 3914466 NR Description: Photosystem I reaction centre subunit N,
  misc_feature (48)..(168): Homolog of NCBI NO: 400879 NR Description: Photosystem I reaction centre subunit N,
  misc_feature (1)..(168): Homolog of NCBI NO: 28629385 NR Description: photosystem I-N subunit [Phaseolus vulgaris]
  misc_feature (1)..(168): Homolog of NCBI NO: 15237593 NR Description: photosystem I reaction center subunit PSI-N
MAAMNSSVLTCSYAISGAGSAELNQKVGLVNSSVGFGQKKQTLPVIKAAQRVGGDDVNERRSAMVFLAATLFSSAAVSASANASVFDEYLEKSKANKELNDKKRLATSGANFARAFTVQFGSCKFPENFTGCQDLAKQKKVPFISEDLALECEGKDKFKCGSNVFWKW

SEQ ID NO: 10 - protein, 165 aa, Brassica napus
  peptide (1)..(165): Ceres Seq. ID no. 12557609
  misc_feature (31)..(165): Pfam Name: Photosystem I reaction centre subunit N (PSAN or PSI-N) Pfam Description: Photosystem I reaction centre subunit N (PSAN
  misc_feature (82)..(130): Homolog of NCBI NO: 485082 NR Description: photosystem I 9K protein - rice (strain
  misc_feature (57)..(159): Homolog of NCBI NO: 12744797 NR Description: PsaN precursor [Chlamydomonas reinhardtii]
  misc_feature (68)..(159): Homolog of NCBI NO: 11134150 NR Description: Photosystem I reaction centre subunit N,
  misc_feature (75)..(165): Homolog of NCBI NO: 3914466 NR Description: Photosystem I reaction centre subunit N,
  misc_feature (45)..(165): Homolog of NCBI NO: 400879 NR Description: Photosystem I reaction centre subunit N,
  misc_feature (1)..(165): Homolog of NCBI NO: 28629385 NR Description: photosystem I-N subunit [Phaseolus vulgaris]
  misc_feature (1)..(165): Homolog of NCBI NO: 15237593 NR Description: photosystem I reaction center subunit PSI-N
MNSSVLTCSYAISGAGSAELNQKVGLVNSSVGFGQKKQTLPVIKAAQRVGGDDVNERRSAMVFLAATLFSSAAVSASANASVFDEYLEKSKANKELNDKKRLATSGANFARAFTVQFGSCKFPENFTGCQDLAKQKKVPFISEDLALECEGKDKFKCGSNVFWKW

SEQ ID NO: 11 - protein, 105 aa, Brassica napus
  peptide (1)..(105): Ceres Seq. ID no. 12557610
  misc_feature (1)..(105): Pfam Name: Photosystem I reaction centre subunit N (PSAN or PSI-N) Pfam Description: Photosystem I reaction centre subunit N (PSAN
  misc_feature (22)..(70): Homolog of NCBI NO: 485082 NR Description: photosystem I 9K protein - rice (strain
  misc_feature (1)..(99): Homolog of NCBI NO: 12744797 NR Description: PsaN precursor [Chlamydomonas reinhardtii]
  misc_feature (8)..(99): Homolog of NCBI NO: 11134150 NR Description: Photosystem I reaction centre subunit N,
  misc_feature (15)..(105): Homolog of NCBI NO: 3914466 NR Description: Photosystem I reaction centre subunit N,
  misc_feature (1)..(105): Homolog of NCBI NO: 400879 NR Description: Photosystem I reaction centre subunit N,
  misc_feature (1)..(105): Homolog of NCBI NO: 28629385 NR Description: photosystem I-N subunit [Phaseolus vulgaris]
  misc_feature (1)..(105): Homolog of NCBI NO: 15237593 NR Description: photosystem I reaction center subunit PSI-N
MVFLAATLFSSAAVSASANASVFDEYLEKSKANKELNDKKRLATSGANFARAFTVQFGSCKFPENFTGCQDLAKQKKVPFISEDLALECEGKDKFKCGSNVFWKW

SEQ ID NO: 12 - DNA, 763 bp, Brassica napus
  misc_feature (1)..(763): Ceres Seq. ID no. 12557654
cacttctttcctctctatcaccgaaccaacaaaagaaatctctgaaaattatctcagaatccctaaaattcactttgaaaaaatggcagaaaccgccgaaacaatcaacaccaccgtctcgcatccgcagcctgaatcagaagactccaacacattgtccgcgacggaagatcagacatcggatgaaacctcaaaagccgcagatctgaagaaggaagaatcagtggcggagacgaagccaggatccatctcgctccgcatctggccgccgacgcagaaaactcgcgacgccgtcttgaaccgcctgatcgagacgttatccaccgaatccatcctctccaagagatacggaacgctcaactccgacgaagcctccgccgtcgcgaaatccatcgaggaggaagcgttcggcgtcgcatcgagcgctgtgtccgatgacgacgatgggatcaagatccttgaggtttattccaaggagattagcaaaaggatgcttgagactgtgaaagatcgatntgcagccnccgccggaaacgggaacgacgaagcgacggacgctacgaaagacgacccggctcctgaggcggaaaagagtgaggcttgaggtctggcttactctgtctgattccgttatctattagcgttcgctttgattttgccagattcatatgaggttntgagaaatttatgacgacatctgttattgtaatgacttggttgtggattttggtatttgcttgtctgaagatggttccttcttcct

SEQ ID NO: 13 - protein, 200 aa, Brassica napus
  peptide (1)..(200): Ceres Seq. ID no. 12557655
  misc_feature (28)..(182): Homolog of NCBI NO: 21553983 NR Description: unknown [Arabidopsis thaliana]
  misc_feature (28)..(182): Homolog of NCBI NO: 18421176 NR Description: Expressed protein
  misc_feature (70)..(200): Homolog of NCBI NO: 7546725 NR Description: MFP1 attachment factor 1 [Lycopersicon esculentum]
  misc_feature (28)..(189): Homolog of NCBI NO: 21618109 NR Description: MFP1 attachment factor 1 [Arabidopsis thaliana]
  misc_feature (28)..(189): Homolog of NCBI NO: 15239170 NR Description: putative protein
  misc_feature (28)..(200): Homolog of NCBI NO: 21553809 NR Description: unknown [Arabidopsis thaliana]
  misc_feature (28)..(200): Homolog of NCBI NO: 18401618 NR Description: expressed protein
  misc_feature (172)..(172): Xaa is any aa, unknown or other
  misc_feature (175)..(175): Xaa is any aa, unknown or other
TSFLSITEPTKEISENYLRIPKIHFEKMAETAETINTTVSHPQPESEDSNTLSATEDQTSDETSKAADLKKEESVAETKPGSISLRIWPPTQKTRDAVLNRLIETLSTESILSKRYGTLNSDEASAVAKSIEEEAFGVASSAVSDDDDGIKILEVYSKEISKRMLETVKDRXAAXAGNGNDEATDATKDDPAPEAEKSEA

SEQ ID NO: 14 - protein, 173 aa, Brassica napus
  peptide (1)..(173): Ceres Seq. ID no. 12557656
  misc_feature (1)..(155): Homolog of NCBI NO: 21553983 NR Description: unknown [Arabidopsis thaliana]
  misc_feature (1)..(155): Homolog of NCBI NO: 18421176 NR Description: Expressed protein
  misc_feature (43)..(173): Homolog of NCBI NO: 7546725 NR Description: MFP1 attachment factor 1 [Lycopersicon esculentum]
  misc_feature (1)..(162): Homolog of NCBI NO: 21618109 NR Description: MFP1 attachment factor 1 [Arabidopsis thaliana]
  misc_feature (1)..(162): Homolog of NCBI NO: 15239170 NR Description: putative protein
  misc_feature (1)..(173): Homolog of NCBI NO: 21553809 NR Description: unknown [Arabidopsis thaliana]
  misc_feature (1)..(173): Homolog of NCBI NO: 18401618 NR Description: expressed protein
  misc_feature (145)..(145): Xaa is any aa, unknown or other
  misc_feature (148)..(148): Xaa is any aa, unknown or other
MAETAETINTTVSHPQPESEDSNTLSATEDQTSDETSKAADLKKEESVAETKPGSISLRIWPPTQKTRDAVLNRLIETLSTESILSKRYGTLNSDEASAVAKSIEEEAFGVASSAVSDDDDGIKILEVYSKEISKRMLETVKDRXAAXAGNGNDEATDATKDDPAPEAEKSEA

SEQ ID NO: 15 - DNA, 660 bp, Brassica napus
  misc_feature (1)..(660): Ceres Seq. ID no. 12557420
atctttttcttcagccgccgcttgtgtttctcctctctacgatcatggtggggtttaagaacaggttcatgttgatggaggtttatctcgacccagacaaggatctcttaggagaagggactcctgttatcctcacgaaactcaacctctccgaagcgatcaaagacagcatcctcgtcaatttcggcgagtgcggtctcgcctcttgtctcggatccttccacgtcgcgtatgtgaacccggtcacgaagctatgcattgtaagatcgtcgagagaggaacacagacgagtttggtcggcgatgacgctggtcagaagcgtcgggaactgtcccgtggtgtttaacttgctcgataacagcggttgcatcagagcgtgtcgagacgcggccttgaagtgcgagacggagaagtttaatcagtgtggaaaaggattgtctgaagaggagatccgagagatgaataggtgtttagataaactcaaactgttgtaataactcgattttttcgaatttgacccctaagttttcaaaatgtgcaatcctccccttgtcttatatactgttgcgatttgatctggatatttatggcttttttcgtgagactcggaaactcaaggggcacaagtgcaaagtcgtnttaattaataaactcaaaatt

SEQ ID NO: 16 - protein, 163 aa, Brassica napus
  peptide (1)..(163): Ceres Seq. ID no. 12557421
  misc_feature (21)..(111): Pfam Name: Rpp14 family Pfam Description: Rpp14 family
  misc_feature (15)..(127): Homolog of NCBI NO: 20270249 NR Description: RNase MRP/RNase P protein-like [Homo sapiens]
  misc_feature (15)..(132): Homolog of NCBI NO: 19075979 NR Description: putative pre-tRNA/pre-rRNA processing protein
  misc_feature (20)..(161): Homolog of NCBI NO: 38568007 NR Description: OSJNBb0068N06.26 [Oryza sativa (japonica
  misc_feature (15)..(161): Homolog of NCBI NO: 38343977 NR Description: OSJNBa0041M21.1 [Oryza sativa (japonica
  misc_feature (15)..(111): Homolog of NCBI NO: 3122357 NR Description: Probable lipoate-protein ligase (Lipoate
  misc_feature (15)..(163): Homolog of NCBI NO: 22329330 NR Description: similar to Probable lipoate-protein ligase B
LFLQPPLVFLLSTIMVGFKNRFMLMEVYLDPDKDLLGEGTPVILTKLNLSEAIKDSILVNFGECGLASCLGSFHVAYVNPVTKLCIVRSSREEHRRVWSAMTLVRSVGNCPVVFNLLDNSGCIRACRDAALKCETEKFNQCGKGLSEEEIREMNRCLDKLKLL

SEQ ID NO: 17 - protein, 149 aa, Brassica napus
  peptide (1)..(149): Ceres Seq. ID no. 12557422
  misc_feature (7)..(97): Pfam Name: Rpp14 family Pfam Description: Rpp14 family
  misc_feature (1)..(113): Homolog of NCBI NO: 20270249 NR Description: RNase MRP/RNase P protein-like [Homo sapiens]
  misc_feature (1)..(118): Homolog of NCBI NO: 19075979 NR Description: putative pre-tRNA/pre-rRNA processing protein
  misc_feature (6)..(147): Homolog of NCBI NO: 38568007 NR Description: OSJNBb0068N06.26 [Oryza sativa (japonica
  misc_feature (1)..(147): Homolog of NCBI NO: 38343977 NR Description: OSJNBa0041M21.1 [Oryza sativa (japonica
  misc_feature (1)..(97): Homolog of NCBI NO: 3122357 NR Description: Probable lipoate-protein ligase (Lipoate
  misc_feature (1)..(149): Homolog of NCBI NO: 22329330 NR Description: similar to Probable lipoate-protein ligase B
MVGFKNRFMLMEVYLDPDKDLLGEGTPVILTKLNLSEAIKDSILVNFGECGLASCLGSFHVAYVNPVTKLCIVRSSREEHRRVWSAMTLVRSVGNCPVVFNLLDNSGCIRACRDAALKCETEKFNQCGKGLSEEEIREMNRCLDKLKLL

SEQ ID NO: 18 - protein, 141 aa, Brassica napus
  peptide (1)..(141): Ceres Seq. ID no. 12557423
  misc_feature (1)..(89): Pfam Name: Rpp14 family Pfam Description: Rpp14 family
  misc_feature (1)..(105): Homolog of NCBI NO: 20270249 NR Description: RNase MRP/RNase P protein-like [Homo sapiens]
  misc_feature (1)..(110): Homolog of NCBI NO: 19075979 NR Description: putative pre-tRNA/pre-rRNA processing protein
  misc_feature (1)..(139): Homolog of NCBI NO: 38568007 NR Description: OSJNBb0068N06.26 [Oryza sativa (japonica
  misc_feature (1)..(139): Homolog of NCBI NO: 38343977 NR Description: OSJNBa0041M21.1 [Oryza sativa (japonica
  misc_feature (1)..(89): Homolog of NCBI NO: 3122357 NR Description: Probable lipoate-protein ligase (Lipoate
  misc_feature (1)..(141): Homolog of NCBI NO: 22329330 NR Description: similar to Probable lipoate-protein ligase B
MLMEVYLDPDKDLLGEGTPVILTKLNLSEAIKDSILVNFGECGLASCLGSFHVAYVNPVTKLCIVRSSREEHRRVWSAMTLVRSVGNCPVVFNLLDNSGCIRACRDAALKCETEKFNQCGKGLSEEEIREMNRCLDKLKLL

SEQ ID NO: 19 - DNA, 887 bp, Brassica napus
  misc_feature (1)..(887): Ceres Seq. ID no. 13574681
  misc_feature (728)..(728): n is a, c, t, g, unknown, or other
  misc_feature (740)..(740): n is a, c, t, g, unknown, or other
  misc_feature (761)..(761): n is a, c, t, g, unknown, or other
  misc_feature (795)..(795): n is a, c, t, g, unknown, or other
gatttcaatctgcgaatttctctttaaaccctacaaacccttttcccgatcaaacaatgacgctccacgccgcagtgatccagaagcttctcaacaccggctcccatctcggccgccgcgccgccgagcaccnnttcaaacagtacgcctacggaacccgcaacgggatgaccatcatcgactccgacaaaaccctgatctgcctccgcagcgccgccagcttcgtcgccaacctcgcgcacatgagggggaacatctacttcgtcaacacgaaccctctcttcgacgagatcgtcgagctcacttcccgccgcatccagggcgacgcgtacaaccacaaccgctcgatgaatctgtggaatatgggaggttttttgacgaacagttacagtcctaagaagtttcggtcgaggcncaagaagctttgctttggtccgacgacgatgcctgattgtgtcgttgtgtttgataccgagaggaagagctcggtgatactcgaggccgcgaagcttcagattcctgttgtggcgattgtggatccgaatgtgccgttggagttctttgagaagattacttatcctgtgccggcacgtgactcggttaagtttgtttatttgttttgtaatgtgatcactaagtgctttgtggctgagcagatgaagatggggatcaaagatgggggcaaggatgatgtgatgaaggatttagctgcatgatttggatattcncagcacacgttnttagtctcgaatcattgtttnttcagcattgtggtttttctctactttgaaattntgagtcttctttattacatttgggtgattttgttcatgtgattgttataaagcaacagcttttttcaaaggtagatacatcagagccaattt

SEQ ID NO: 20 - protein, 237 aa, Brassica napus
  peptide (1)..(237): Ceres Seq. ID no. 13574682
  misc_feature (29)..(218): Pfam Name: Ribosomal protein S2 Pfam Description: Ribosomal protein S2
  misc_feature (19)..(212): Homolog of NCBI NO: 40795002 NR Description: ribosomal protein S2 [Zea mays]
  misc_feature (19)..(218): Homolog of NCBI NO: 7489611 NR Description: hypothetical protein 483 - rice mitochondrion
  misc_feature (130)..(215): Homolog of NCBI NO: 11467163 NR Description: rps2 [Marchantia polymorpha]
  misc_feature (25)..(145): Homolog of NCBI NO: 11467163 NR Description: rps2 [Marchantia polymorpha]
  misc_feature (23)..(225): Homolog of NCBI NO: 40795007 NR Description: ribosomal protein S2 [Zea mays]
  misc_feature (19)..(212): Homolog of NCBI NO: 9944889 NR Description: ribosomal protein S2 [Zea mays]
  misc_feature (23)..(225): Homolog of NCBI NO: 9944891 NR Description: ribosomal protein S2 [Zea mays]
  misc_feature (19)..(218): Homolog of NCBI NO: 7440113 NR Description: ribosomal protein S2 homolog - wheat
  misc_feature (19)..(237): Homolog of NCBI NO: 21536611 NR Description: putative ribosomal protein S2 [Arabidopsis
  misc_feature (19)..(237): Homolog of NCBI NO: 15228593 NR Description: ribosomal protein S2p family [Arabidopsis
  misc_feature (44)..(44): Xaa is any aa, unknown or other
  misc_feature (138)..(138): Xaa is any aa, unknown or other
FQSANFSLNPTNPFPDQTMTLHAAVIQKLLNTGSHLGRRAAEHXFKQYAYGTRNGMTIIDSDKTLICLRSAASFVANLAHMRGNIYFVNTNPLFDEIVELTSRRIQGDAYNHNRSMNLWNMGGFLTNSYSPKKFRSRXKKLCFGPTTMPDCVVVFDTERKSSVILEAAKLQIPVVAIVDPNVPLEFFEKITYPVPARDSVKFVYLFCNVITKCFVAEQMKMGIKDGGKDDVMKDLAA

SEQ ID NO: 21 - protein, 219 aa, Brassica napus
  peptide (1)..(219): Ceres Seq. ID no. 13574683
  misc_feature (11)..(200): Pfam Name: Ribosomal protein S2 Pfam Description: Ribosomal protein S2
  misc_feature (1)..(194): Homolog of NCBI NO: 40795002 NR Description: ribosomal protein S2 [Zea mays]
  misc_feature (1)..(200): Homolog of NCBI NO: 7489611 NR Description: hypothetical protein 483 - rice mitochondrion
  misc_feature (112)..(197): Homolog of NCBI NO: 11467163 NR Description: rps2 [Marchantia polymorpha]
  misc_feature (7)..(127): Homolog of NCBI NO: 11467163 NR Description: rps2 [Marchantia polymorpha]
  misc_feature (5)..(207): Homolog of NCBI NO: 40795007 NR Description: ribosomal protein S2 [Zea mays]
  misc_feature (1)..(194): Homolog of NCBI NO: 9944889 NR Description: ribosomal protein S2 [Zea mays]
  misc_feature (5)..(207): Homolog of NCBI NO: 9944891 NR Description: ribosomal protein S2 [Zea mays]
  misc_feature (1)..(200): Homolog of NCBI NO: 7440113 NR Description: ribosomal protein S2 homolog - wheat
  misc_feature (1)..(219): Homolog of NCBI NO: 21536611 NR Description: putative ribosomal protein S2 [Arabidopsis
  misc_feature (1)..(219): Homolog of NCBI NO: 15228593 NR Description: ribosomal protein S2p family [Arabidopsis
  misc_feature (26)..(26): Xaa is any aa, unknown or other
  misc_feature (120)..(120): Xaa is any aa, unknown or other
MTLHAAVIQKLLNTGSHLGRRAAEHXFKQYAYGTRNGMTIIDSDKTLICLRSAASFVANLAHMRGNIYFVNTNPLFDEIVELTSRRIQGDAYNHNRSMNLWNMGGFLTNSYSPKKFRSRXKKLCFGPTTMPDCVVVFDTERKSSVILEAAKLQIPVVAIVDPNVPLEFFEKITYPVPARDSVKFVYLFCNVITKCFVAEQMKMGIKDGGKDDVMKDLAA

SEQ ID NO: 22 - protein, 182 aa, Brassica napus
  peptide (1)..(182): Ceres Seq. ID no. 13574684
  misc_feature (1)..(163): Pfam Name: Ribosomal protein S2 Pfam Description: Ribosomal protein S2
  misc_feature (1)..(170): Homolog of NCBI NO: 9944891 NR Description: ribosomal protein S2 [Zea mays]
  misc_feature (1)..(163): Homolog of NCBI NO: 7440113 NR Description: ribosomal protein S2 homolog - wheat
  misc_feature (1)..(157): Homolog of NCBI NO: 40795002 NR Description: ribosomal protein S2 [Zea mays]
  misc_feature (75)..(160): Homolog of NCBI NO: 11467163 NR Description: rps2 [Marchantia polymorpha]
  misc_feature (1)..(170): Homolog of NCBI NO: 40795007 NR Description: ribosomal protein S2 [Zea mays]
  misc_feature (1)..(157): Homolog of NCBI NO: 9944889 NR Description: ribosomal protein S2 [Zea mays]
  misc_feature (1)..(90): Homolog of NCBI NO: 11467163 NR Description: rps2 [Marchantia polymorpha]
  misc_feature (1)..(163): Homolog of NCBI NO: 7489611 NR Description: hypothetical protein 483 - rice mitochondrion
  misc_feature (1)..(182): Homolog of NCBI NO: 21536611 NR Description: putative ribosomal protein S2 [Arabidopsis
  misc_feature (1)..(182): Homolog of NCBI NO: 15228593 NR Description: ribosomal protein S2p family [Arabidopsis
  misc_feature (83)..(83): Xaa is any aa, unknown or other
MTIIDSDKTLICLRSAASFVANLAHMRGNIYFVNTNPLFDEIVELTSRRIQGDAYNHNRSMNLWNMGGFLTNSYSPKKFRSRXKKLCFGPTTMPDCVVVFDTERKSSVILEAAKLQIPVVAIVDPNVPLEFFEKITYPVPARDSVKFVYLFCNVITKCFVAEQMKMGIKDGGKDDVMKDLAA

SEQ ID NO: 23 - DNA, 420 bp, Brassica napus
  misc_feature (1)..(420): Ceres Seq. ID no. 12556794
acacaaacacaagaccagaaaaaaaaaacagaaagtaaacatgagatctctcttcttactagccttgttcctagttcttgcttttcaccatggtgaagcagccgtgacttgcaacaacgtggttggtgatctttacccttgcctctcctacgtgatgcaaggcggaaactccccatcaactaactgctgcagcggtgtcagaacgctcaacagtcaggctcaaaccactgcggatcgtcagagcgtctgccgttgcatcaaaaatgctattggaggagcctcttactcttcaagcaaccttaaaaatgctctgtctttgcctgctaagtgtggtgttaatctccctttcagtatcagcccttccaccaactgcaacagtatccactgaaataagcagaagatcctaaaggaagctactac

SEQ ID NO: 24 - protein, 128 aa, Brassica napus
  peptide (1)..(128): Ceres Seq. ID no. 12556795
  misc_feature (37)..(124): Pfam Name: Protease inhibitor/seed storage/LTP family Pfam Description: Protease inhibitor/seed storage/LTP family
  misc_feature (21)..(127): Homolog of NCBI NO: 2497756 NR Description: NONSPECIFIC LIPID-TRANSFER PROTEIN 2 PRECURSOR
  misc_feature (17)..(128): Homolog of NCBI NO: 7438279 NR Description: phospholipid transfer protein - rice
  misc_feature (24)..(127): Homolog of NCBI NO: 16903206 NR Description: lipid transfer protein precursor [Davidia
  misc_feature (8)..(128): Homolog of NCBI NO: 128388 NR Description: Nonspecific lipid-transfer protein precursor
  misc_feature (19)..(128): Homolog of NCBI NO: 7438275 NR Description: lipid transfer protein LPT II - rice
  misc_feature (11)..(127): Homolog of NCBI NO: 6782436 NR Description: lipid-transfer protein [Nicotiana glauca]
  misc_feature (19)..(128): Homolog of NCBI NO: 2497746 NR Description: NONSPECIFIC LIPID-TRANSFER PROTEIN 2 PRECURSOR
  misc_feature (33)..(127): Homolog of NCBI NO: 2497753 NR Description: NONSPECIFIC LIPID-TRANSFER PROTEIN 3 PRECURSOR
  misc_feature (14)..(127): Homolog of NCBI NO: 15241086 NR Description: lipid-transfer protein-like; protein id:
  misc_feature (14)..(127): Homolog of NCBI NO: 15231964 NR Description: putative nonspecific lipid-transfer protein
HKHKTRKKKQKVNMRSLFLLALFLVLAFHHGEAAVTCNNVVGDLYPCLSYVMQGGNSPSTNCCSGVRTLNSQAQTTADRQSVCRCIKNAIGGASYSSSNLKNALSLPAKCGVNLPFSISPSTNCNSIH

SEQ ID NO: 25 - protein, 115 aa, Brassica napus
  peptide (1)..(115): Ceres Seq. ID no. 12556796
  misc_feature (24)..(111): Pfam Name: Protease inhibitor/seed storage/LTP family Pfam Description: Protease inhibitor/seed storage/LTP family
  misc_feature (8)..(114): Homolog of NCBI NO: 2497756 NR Description: NONSPECIFIC LIPID-TRANSFER PROTEIN 2 PRECURSOR
  misc_feature (4)..(115): Homolog of NCBI NO: 7438279 NR Description: phospholipid transfer protein - rice
  misc_feature (11)..(114): Homolog of NCBI NO: 16903206 NR Description: lipid transfer protein precursor [Davidia
  misc_feature (1)..(115): Homolog of NCBI NO: 128388 NR Description: Nonspecific lipid-transfer protein precursor
  misc_feature (6)..(115): Homolog of NCBI NO: 7438275 NR Description: lipid transfer protein LPT II - rice
  misc_feature (1)..(114): Homolog of NCBI NO: 6782436 NR Description: lipid-transfer protein [Nicotiana glauca]
  misc_feature (6)..(115): Homolog of NCBI NO: 2497746 NR Description: NONSPECIFIC LIPID-TRANSFER PROTEIN 2 PRECURSOR
  misc_feature (20)..(114): Homolog of NCBI NO: 2497753 NR Description: NONSPECIFIC LIPID-TRANSFER PROTEIN 3 PRECURSOR
  misc_feature (1)..(114): Homolog of NCBI NO: 15241086 NR Description: lipid-transfer protein-like; protein id:
  misc_feature (1)..(114): Homolog of NCBI NO: 15231964 NR Description: putative nonspecific lipid-transfer protein
MRSLFLLALFLVLAFHHGEAAVTCNNVVGDLYPCLSYVMQGGNSPSTNCCSGVRTLNSQAQTTADRQSVCRCIKNAIGGASYSSSNLKNALSLPAKCGVNLPFSISPSTNCNSIH

SEQ ID NO: 26 - protein, 77 aa, Brassica napus
  peptide (1)..(77): Ceres Seq. ID no. 12556797
  misc_feature (1)..(73): Pfam Name: Protease inhibitor/seed storage/LTP family Pfam Description: Protease inhibitor/seed storage/LTP family
  misc_feature (1)..(76): Homolog of NCBI NO: 2497756 NR Description: NONSPECIFIC LIPID-TRANSFER PROTEIN 2 PRECURSOR
  misc_feature (1)..(77): Homolog of NCBI NO: 7438279 NR Description: phospholipid transfer protein - rice
  misc_feature (1)..(76): Homolog of NCBI NO: 16903206 NR Description: lipid transfer protein precursor [Davidia
  misc_feature (1)..(77): Homolog of NCBI NO: 128388 NR Description: Nonspecific lipid-transfer protein precursor
  misc_feature (1)..(77): Homolog of NCBI NO: 7438275 NR Description: lipid transfer protein LPT II - rice
  misc_feature (1)..(76): Homolog of NCBI NO: 6782436 NR Description: lipid-transfer protein [Nicotiana glauca]
  misc_feature (1)..(77): Homolog of NCBI NO: 2497746 NR Description: NONSPECIFIC LIPID-TRANSFER PROTEIN 2 PRECURSOR
  misc_feature (1)..(76): Homolog of NCBI NO: 2497753 NR Description: NONSPECIFIC LIPID-TRANSFER PROTEIN 3 PRECURSOR
  misc_feature (1)..(76): Homolog of NCBI NO: 15241086 NR Description: lipid-transfer protein-like; protein id:
  misc_feature (1)..(76): Homolog of NCBI NO: 15231964 NR Description: putative nonspecific lipid-transfer protein
MQGGNSPSTNCCSGVRTLNSQAQTTADRQSVCRCIKNAIGGASYSSSNLKNALSLPAKCGVNLPFSISPSTNCNSIH

SEQ ID NO: 27 - DNA, 792 bp, Brassica napus
  misc_feature (1)..(792): Ceres Seq. ID no. 12578688
aaatcctctggttatggcgtctccgacttctctaaactcaacccctacagatctcgttcgaagaaagaagagacaatccgcttcctcctccgccgcatcgcctcggagaaacaacgcagcttccgcaaccgccggagacggcgagagccacgcgcgatggagatcggagaagcagcagcgtaactactccgcaaagctggtccaggcgctgcaacaggtccgcctcagctcctccgccgccgaaacaccatctccgacggcgaagaagcgagggaaagccgtccgggaagccgccgaccgcgctctcgccgtctccgctcgcgggaggacgctctggagcagagcgatcctcgctaaccggatcaagctcaaattccggaaacagaaacggccgcgaccggcggcgatcccggccgtgatcacgacgggaagtagcagcagcagcaatagcggaagatggaagaaacggagagtgacggttgtgaaactgaataagaagagtataccgacggttaaccggaaagtacgtgtactcggccggttagttccgggttgcaagaaagaatcagtaccggttattntagaagaagcgaccgattacatccaggctttggagatgcaagtcagagccatgaagtctctagctgagcttctctccggctcaaactcagctcctccgccgatttgatgaggttaaaatcgtcattttaagttctgccaatctctgtgtctctctgtgtacaccaaaacacttttcatattaatatatgtaaacataatacgtttgagtgt

SEQ ID NO: 28 - protein, 228 aa, Brassica napus
  peptide (1)..(228): Ceres Seq. ID no. 12578689
  misc_feature (19)..(147): Homolog of NCBI NO: 18397368 NR Description: bHLH protein; protein id: At3g05800.1, supported
  misc_feature (88)..(225): Homolog of NCBI NO: 34912942 NR Description: OSJNBb0035I14.10 [Oryza sativa (japonica
  misc_feature (39)..(225): Homolog of NCBI NO: 34904544 NR Description: B1066G12.17 [Oryza sativa (japonica
  misc_feature (52)..(219): Homolog of NCBI NO: 18397368 NR Description: bHLH protein; protein id: At3g05800.1, supported
  misc_feature (28)..(221): Homolog of NCBI NO: 18390998 NR Description: bHLH protein; protein id: At1g09250.1, supported
  misc_feature (166)..(227): Homolog of NCBI NO: 34898122 NR Description: bHLH protein-like [Oryza sativa (japonica
  misc_feature (26)..(138): Homolog of NCBI NO: 34898122 NR Description: bHLH protein-like [Oryza sativa (japonica
  misc_feature (1)..(227): Homolog of NCBI NO: 18401374 NR Description: bHLH protein
  misc_feature (13)..(228): Homolog of NCBI NO: 21618012 NR Description: unknown [Arabidopsis thaliana]
  misc_feature (13)..(228): Homolog of NCBI NO: 18397627 NR Description: bHLH protein
  misc_feature (194)..(194): Xaa is any aa, unknown or other
NPLVMASPTSLNSTPTDLVRRKKRQSASSSAASPRRNNAASATAGDGESHARWRSEKQQRNYSAKLVQALQQVRLSSSAAETPSPTAKKRGKAVREAADRALAVSARGRTLWSRAILANRIKLKFRKQKRPRPAAIPAVITTGSSSSSNSGRWKKRRVTVVKLNKKSIPTVNRKVRVLGRLVPGCKKESVPVIXEEATDYIQALEMQVRAMKSLAELLSGSNSAPPPI

SEQ ID NO: 29 - protein, 224 aa, Brassica napus
  peptide (1)..(224): Ceres Seq. ID no. 12578690
  misc_feature (15)..(143): Homolog of NCBI NO: 18397368 NR Description: bHLH protein; protein id: At3g05800.1, supported
  misc_feature (84)..(221): Homolog of NCBI NO: 34912942 NR Description: OSJNBb0035I14.10 [Oryza sativa (japonica
  misc_feature (35)..(221): Homolog of NCBI NO: 34904544 NR Description: B1066G12.17 [Oryza sativa (japonica
  misc_feature (48)..(215): Homolog of NCBI NO: 18397368 NR Description: bHLH protein; protein id: At3g05800.1, supported
  misc_feature (24)..(217): Homolog of NCBI NO: 18390998 NR Description: bHLH protein; protein id: At1g09250.1, supported
  misc_feature (162)..(223): Homolog of NCBI NO: 34898122 NR Description: bHLH protein-like [Oryza sativa (japonica
  misc_feature (22)..(134): Homolog of NCBI NO: 34898122 NR Description: bHLH protein-like [Oryza sativa (japonica
  misc_feature (1)..(223): Homolog of NCBI NO: 18401374 NR Description: bHLH protein
  misc_feature (9)..(224): Homolog of NCBI NO: 21618012 NR Description: unknown [Arabidopsis thaliana]
  misc_feature (9)..(224): Homolog of NCBI NO: 18397627 NR Description: bHLH protein
  misc_feature (190)..(190): Xaa is any aa, unknown or other
MASPTSLNSTPTDLVRRKKRQSASSSAASPRRNNAASATAGDGESHARWRSEKQQRNYSAKLVQALQQVRLSSSAAETPSPTAKKRGKAVREAADRALAVSARGRTLWSRAILANRIKLKFRKQKRPRPAAIPAVITTGSSSSSNSGRWKKRRVTVVKLNKKSIPTVNRKVRVLGRLVPGCKKESVPVIXEEATDYIQALEMQVRAMKSLAELLSGSNSAPPPI

SEQ ID NO: 30 - DNA, 809 bp, Brassica napus
  misc_feature (1)..(809): Ceres Seq. ID no. 12556893
acacttcggtatatccgccttcttcttcttcaacaacaattctctctcagagcctatactaaatctcccggagctctacttctccggccgaaactatgtctcagtctatccaattctcaactccttcacgcactcctcaccttctccacctccctaactcacgcttccaccgtcctctcacttccttatccttccgccaattccctctcaagtacacctcaatcagagcctcctcctctccagatctcggctcctcctcatcctcccaggtccttcactctcctaacggcactggcgctgccaaaccggaagagcgatccgtcgtagccaccgcggtctccacggatacggcagcgatagacgtagataccgtgacggaagcggagctgaaggagaatggattcaggagcacgaggaggacgaagctgatctgcacgatcgggcctgccacgtgcgggttcgagcaactggaagcgctcgcggagggaggcatgaacgtggcgaggctcaacatgtgccncggcacgcgcgagtggcnccgcgatgtgatacgcagcgttagaaagcttaacgaggagaaaggattcgcggttgctatcatgatggacnctgaaggcagtgagattcacatgggagatcttggcggtgaatcttntgctaaatctgaggttttgtcttctcttttctccatctcaatcagagcttgagcttgacattattgctctgtataattagatgattggtaggcctgagcattgtaactgaatcggtcagtgttntaataattggtatagcctgcgcttactcgg

SEQ ID NO: 31 - protein, 203 aa, Brassica napus
  peptide (1)..(203): Ceres Seq. ID no. 12556894
  misc_feature (108)..(182): Homolog of NCBI NO: 29840433 NR Description: pyruvate kinase [Chlamydophila caviae GPIC]
  misc_feature (107)..(182): Homolog of NCBI NO: 24217414 NR Description: pyruvate kinase [Leptospira interrogans serovar
  misc_feature (133)..(203): Homolog of NCBI NO: 34393488 NR Description: putative Pyruvate kinase isozyme A, chloroplast
  misc_feature (131)..(203): Homolog of NCBI NO: 7434450 NR Description: pyruvate kinase (EC 2.7.1.40) isoform beta -
  misc_feature (46)..(191): Homolog of NCBI NO: 29788835 NR Description: putative pyruvate kinase [Oryza sativa (japonica
  misc_feature (1)..(203): Homolog of NCBI NO: 2129963 NR Description: pyruvate kinase (EC 2.7.1.40) A, chloroplast -
  misc_feature (1)..(203): Homolog of NCBI NO: 2497541 NR Description: Pyruvate kinase isozyme A, chloroplast precursor
  misc_feature (1)..(203): Homolog of NCBI NO: 2497539 NR Description: Pyruvate kinase isozyme A, chloroplast precursor
  misc_feature (1)..(203): Homolog of NCBI NO: 21537361 NR Description: pyruvate kinase, putative [Arabidopsis thaliana]
  misc_feature (1)..(203): Homolog of NCBI NO: 18403597 NR Description: pyruvate kinase, putative
  misc_feature (142)..(142): Xaa is any aa, unknown or other
  misc_feature (148)..(148): Xaa is any aa, unknown or other
  misc_feature (172)..(172): Xaa is any aa, unknown or other
  misc_feature (187)..(187): Xaa is any aa, unknown or other
MSQSIQFSTPSRTPHLLHLPNSRFHRPLTSLSFRQFPLKYTSIRASSSPDLGSSSSSQVLHSPNGTGAAKPEERSVVATAVSTDTAAIDVDTVTEAELKENGFRSTRRTKLICTIGPATCGFEQLEALAEGGMNVARLNMCXGTREWXRDVIRSVRKLNEEKGFAVAIMMDXEGSEIHMGDLGGESXAKSEVLSSLFSISIRA

SEQ ID NO: 32 - protein, 108 aa, Brassica napus
  peptide (1)..(108): Ceres Seq. ID no. 12556895
TLRYIRLLLLQQQFSLRAYTKSPGALLLRPKLCLSLSNSQLLHALLTFSTSLTHASTVLSLPYPSANSLSSTPQSEPPPLQISAPPHPPRSFTLLTALALPNRKSDPS

SEQ ID NO: 33 - DNA, 935 bp, Brassica napus
  misc_feature (1)..(935): Ceres Seq. ID no. 13574766
  misc_feature (817)..(817): n is a, c, t, g, unknown, or other
atagatttgatttcttctacaaacatcgatcgaaagagagacgatcctttaagatggcgaccgtagacnagagttcttcagctaagagatggcttccacttgaagctaacccagatgttatgaatcagtttctgtgggggcttggacttgccccagatgcagctgagtgtaatgatgtgtttggtttagatgacgagcttcttgagatggttccaaagcctgtccttgctgttctcttcctttaccctatcaccaaaaagagtgaagaagagagaattgagcaagacaaggagatcaaggagaaggtgcatattgataaagtttactttatgaaacaaactgttggtaatgcttgtggaaccattggtcttcttcatgctattggcaacattacctctgaaatcaagctttctgagggatccttcttagataagtttttcaaaaccaccagcaatatgactcctatggagcgtggaaggtttntagagaatgatagtcaaatagaagatgctcattctgcagctgttacagctggtgaaacnccggcttntgatgacgtgaacacgcatttcatctgtctagcttgtgtagatggtgagctctatgaacttgatggaaggaaagcaggaccaatttcacatggngcttcctctccagctaccctgttgaaggattcgacgaaagtgataaagaagattatcgaaaagaatccggacacgctcaacttcaatgttatggccatctntaagagaacctgaggatgttnttaagaagcgaagctcatttcatttagtcttgcgtttttgagtttgtgacncaatgaaccaaccacacagattgtttatctaggtggattctgttttactgctttctgaatcttctttttcttgtttctgaaacttttaagagtttatgatctcaaggttttttttttt

SEQ ID NO: 34 - protein, 251 aa, Brassica napus
  peptide (1)..(251): Ceres Seq. ID no. 13574767
  misc_feature (29)..(247): Homolog of NCBI NO: 7522621 NR Description: ubiquitin carboxy-terminal hydrolase-6 (EC
  misc_feature (28)..(247): Homolog of NCBI NO: 27705170 NR Description: similar to ubiqutin carboxyl-terminal hydrolase
  misc_feature (28)..(247): Homolog of NCBI NO: 17380334 NR Description: Ubiquitin carboxyl-terminal hydrolase isozyme L3
  misc_feature (28)..(247): Homolog of NCBI NO: 7710106 NR Description: ubiquitin carboxyl-terminal esterase L3
  misc_feature (28)..(247): Homolog of NCBI NO: 5174741 NR Description: ubiquitin carboxyl-terminal esterase L3
  misc_feature (28)..(250): Homolog of NCBI NO: 38346164 NR Description: OSJNBa0079A21.11 [Oryza sativa (japonica
  misc_feature (28)..(249): Homolog of NCBI NO: 14140139 NR Description: putative protein [Oryza sativa]
  misc_feature (18)..(192): Homolog of NCBI NO: 7488069 NR Description: probable carboxyl-terminal proteinase -
  misc_feature (18)..(251): Homolog of NCBI NO: 15236549 NR Description: carboxyl-terminal proteinase like protein
  misc_feature (28)..(247): Homolog of NCBI NO: 15809026 NR Description: ubiquitin carboxyl-terminal esterase L4 [Mus
  misc_feature (23)..(23): Xaa is any aa, unknown or other
  misc_feature (161)..(161): Xaa is any aa, unknown or other
  misc_feature (180)..(180): Xaa is any aa, unknown or other
  misc_feature (183)..(183): Xaa is any aa, unknown or other
  misc_feature (214)..(214): Xaa is any aa, unknown or other
  misc_feature (248)..(248): Xaa is any aa, unknown or other
RFDFFYKHRSKERRSFKMATVDXSSSAKRWLPLEANPDVMNQFLWGLGLAPDAAECNDVFGLDDELLEMVPKPVLAVLFLYPITKKSEEERIEQDKEIKEKVHIDKVYFMKQTVGNACGTIGLLHAIGNITSEIKLSEGSFLDKFFKTTSNMTPMERGRFXENDSQIEDAHSAAVTAGEXPAXDDVNTHFICLACVDGELYELDGRKAGPISHXASSPATLLKDSTKVIKKIIEKNPDTLNFNVMAIXKRT

SEQ ID NO: 35 - protein, 234 aa, Brassica napus
  peptide (1)..(234): Ceres Seq. ID no. 13574768
  misc_feature (11)..(230): Homolog of NCBI NO: 15809026 NR Description: ubiquitin carboxyl-terminal esterase L4 [Mus
  misc_feature (12)..(230): Homolog of NCBI NO: 7522621 NR Description: ubiquitin carboxy-terminal hydrolase-6 (EC
  misc_feature (11)..(230): Homolog of NCBI NO: 27705170 NR Description: similar to ubiqutin carboxyl-terminal hydrolase
  misc_feature (11)..(230): Homolog of NCBI NO: 17380334 NR Description: Ubiquitin carboxyl-terminal hydrolase isozyme L3
  misc_feature (11)..(230): Homolog of NCBI NO: 7710106 NR Description: ubiquitin carboxyl-terminal esterase L3
  misc_feature (11)..(230): Homolog of NCBI NO: 5174741 NR Description: ubiquitin carboxyl-terminal esterase L3
  misc_feature (11)..(233): Homolog of NCBI NO: 38346164 NR Description: OSJNBa0079A21.11 [Oryza sativa (japonica
  misc_feature (11)..(232): Homolog of NCBI NO: 14140139 NR Description: putative protein [Oryza sativa]
  misc_feature (1)..(175): Homolog of NCBI NO: 7488069 NR Description: probable carboxyl-terminal proteinase -
  misc_feature (1)..(234): Homolog of NCBI NO: 15236549 NR Description: carboxyl-terminal proteinase like protein
  misc_feature (6)..(6): Xaa is any aa, unknown or other
  misc_feature (144)..(144): Xaa is any aa, unknown or other
  misc_feature (163)..(163): Xaa is any aa, unknown or other
  misc_feature (166)..(166): Xaa is any aa, unknown or other
  misc_feature (197)..(197): Xaa is any aa, unknown or other
  misc_feature (231)..(231): Xaa is any aa, unknown or other
MATVDXSSSAKRWLPLEANPDVMNQFLWGLGLAPDAAECNDVFGLDDELLEMVPKPVLAVLFLYPITKKSEEERIEQDKEIKEKVHIDKVYFMKQTVGNACGTIGLLHAIGNITSEIKLSEGSFLDKFFKTTSNMTPMERGRFXENDSQIEDAHSAAVTAGEXPAXDDVNTHFICLACVDGELYELDGRKAGPISHXASSPATLLKDSTKVIKKIIEKNPDTLNFNVMAIXKRT

SEQ ID NO: 36 - protein, 212 aa, Brassica napus
  peptide (1)..(212): Ceres Seq. ID no. 13574769
  misc_feature (1)..(208): Homolog of NCBI NO: 15809026 NR Description: ubiquitin carboxyl-terminal esterase L4 [Mus
  misc_feature (1)..(208): Homolog of NCBI NO: 7522621 NR Description: ubiquitin carboxy-terminal hydrolase-6 (EC
  misc_feature (1)..(208): Homolog of NCBI NO: 27705170 NR Description: similar to ubiqutin carboxyl-terminal hydrolase
  misc_feature (1)..(208): Homolog of NCBI NO: 17380334 NR Description: Ubiquitin carboxyl-terminal hydrolase isozyme L3
  misc_feature (1)..(208): Homolog of NCBI NO: 7710106 NR Description: ubiquitin carboxyl-terminal esterase L3
  misc_feature (1)..(208): Homolog of NCBI NO: 5174741 NR Description: ubiquitin carboxyl-terminal esterase L3
  misc_feature (1)..(211): Homolog of NCBI NO: 38346164 NR Description: OSJNBa0079A21.11 [Oryza sativa (japonica
  misc_feature (1)..(210): Homolog of NCBI NO: 14140139 NR Description: putative protein [Oryza sativa]
  misc_feature (1)..(153): Homolog of NCBI NO: 7488069 NR Description: probable carboxyl-terminal proteinase -
  misc_feature (1)..(212): Homolog of NCBI NO: 15236549 NR Description: carboxyl-terminal proteinase like protein
  misc_feature (122)..(122): Xaa is any aa, unknown or other
  misc_feature (141)..(141): Xaa is any aa, unknown or other
  misc_feature (144)..(144): Xaa is any aa, unknown or other
  misc_feature (175)..(175): Xaa is any aa, unknown or other
  misc_feature (209)..(209): Xaa is any aa, unknown or other
MNQFLWGLGLAPDAAECNDVFGLDDELLEMVPKPVLAVLFLYPITKKSEEERIEQDKEIKEKVHIDKVYFMKQTVGNACGTIGLLHAIGNITSEIKLSEGSFLDKFFKTTSNMTPMERGRFXENDSQIEDAHSAAVTAGEXPAXDDVNTHFICLACVDGELYELDGRKAGPISHXASSPATLLKDSTKVIKKIIEKNPDTLNFNVMAIXKRT

SEQ ID NO: 37 - DNA, 570 bp, Brassica napus
  misc_feature (1)..(570): Ceres Seq. ID no. 12556792
gggcctgttgttagtctcgtttatccactacatgcctcagtcagagcaattgaaactcaatctcacgctgatgacaaacaatggctcacttactgggtcctttactccttacttacactcttcgagctcacattcgccaaactcatcgaatgggtaccaatatggtcgtacttgaagctgatcttgacttgctggcttgtgattccttacttcagcggcgctgcttatgtctacgaacattttgtgagacctgtgtttgttaacccacagagcattaacatttggtatgtgccaaagaagatggatatnttcagaaagccagatgatgtgttaacagctgctgagaagtacattgcagagaatggacctgatgctttccagaagatcttaagccgatctgataaatcaagaagatatgagcagcgtgagaccatgtatggtgaagagtatcagtaccaagggcactacaaaagcttttagtactagacttgtgaagcaagcttcatgttgtttgttttgcttctttgtaaaagaagtttataaataaactttattgaaacttgttcagct

SEQ ID NO: 38 - protein, 159 aa, Brassica napus
  peptide (1)..(159): Ceres Seq. ID no. 12556793
  misc_feature (1)..(86): Pfam Name: TB2/DP1, HVA22 family Pfam Description: TB2/DP1, HVA22 family
  misc_feature (1)..(83): Homolog of NCBI NO: 1076715 NR Description: abscisic acid-induced protein HVA22 - barley
  misc_feature (6)..(86): Homolog of NCBI NO: 7484787 NR Description: abscisic acid-induced protein homolog F13M23.100
  misc_feature (6)..(86): Homolog of NCBI NO: 8777395 NR Description: gene_id:MFB16.12~pir||T05517~similar to unknown
  misc_feature (1)..(86): Homolog of NCBI NO: 18416458 NR Description: abscisic acid-induced - like protein
  misc_feature (1)..(86): Homolog of NCBI NO: 18423191 NR Description: putative protein
  misc_feature (14)..(138): Homolog of NCBI NO: 34910810 NR Description: P0042A10.34 [Oryza sativa (japonica
  misc_feature (1)..(152): Homolog of NCBI NO: 4884934 NR Description: AtHVA22b [Arabidopsis thaliana]
  misc_feature (1)..(152): Homolog of NCBI NO: 15241840 NR Description: AtHVA22b-like protein
  misc_feature (2)..(152): Homolog of NCBI NO: 15222421 NR Description: AtHVA22c
  misc_feature (1)..(152): Homolog of NCBI NO: 15221266 NR Description: AtHVA22a; protein id: At1g74520.1, supported by
  misc_feature (103)..(103): Xaa is any aa, unknown or other
GPVVSLVYPLHASVRAIETQSHADDKQWLTYWVLYSLLTLFELTFAKLIEWVPIWSYLKLILTCWLVIPYFSGAAYVYEHFVRPVFVNPQSINIWYVPKKMDXFRKPDDVLTAAEKYIAENGPDAFQKILSRSDKSRRYEQRETMYGEEYQYQGHYKSF

SEQ ID NO: 39 - DNA, 762 bp, Brassica napus
  misc_feature (1)..(762): Ceres Seq. ID no. 12556910
atacgaaaccttgtctagtcaaaaagcgcagctgaaaagaaaaacgagtgtggagaaattaaagaagaagaagaagaagaagaagaatagattatctggtgtgtttcgatggcgatgacagtagcagcttcgtcctctgtggcagtgatgattccacgtgttacctccgtctccgccagcttctccgccgttccttaccttcctccgctgcctcctcgctcatttggccgatcctctttcactgttccgccgaagctagtttcaggtaatggttcgcagaagggtgaattgatgaagatgagagcttcttcatcagatgagacctcaacgtccattgacaccaacgaactcttcacagacttgaaggaaaagtgggatggtnttgagaacaagtcgactgtaataatatattgaggaggagccattgttgctgtttggttatcttccattgttgttggtgccatcaactctgttcctctgcttcccaaagttatggaacttattggtntcggctacacaggatggttcgtctaccgatacctcctcttcaagtcaagcagaaaggaactggctgaggatattgattccttgaagaagaagatcgctgggaccgaatagattctttttaaaataataaaataaaccatctttatatctggaattttcttgtaatgtgattattgtacaatctccctgtttcaacaatgtatcttgtgtagtctgaaactattatcttagatccactggcaatgaaatctattt

SEQ ID NO: 40 - protein, 101 aa, Brassica napus
  peptide (1)..(101): Ceres Seq. ID no. 12556911
  misc_feature (9)..(101): Homolog of NCBI NO: 18403896 NR Description: expressed protein
  misc_feature (2)..(101): Homolog of NCBI NO: 37536446 NR Description: hypothetical protein [Oryza sativa (japonica
  misc_feature (18)..(101): Homolog of NCBI NO: 34393236 NR Description: unknown protein [Oryza sativa (japonica
  misc_feature (2)..(101): Homolog of NCBI NO: 21555057 NR Description: unknown [Arabidopsis thaliana]
  misc_feature (68)..(101): Homolog of NCBI NO: 18420175 NR Description: expressed protein
  misc_feature (68)..(101): Homolog of NCBI NO: 7485852 NR Description: hypothetical protein F20D10.220 - Arabidopsis
  misc_feature (2)..(101): Homolog of NCBI NO: 18407178 NR Description: expressed protein
  misc_feature (27)..(101): Homolog of NCBI NO: 38175474 NR Description: unknown protein [Oryza sativa (japonica
  misc_feature (1)..(101): Homolog of NCBI NO: 687677 NR Description: unknown
  misc_feature (1)..(101): Homolog of NCBI NO: 18411555 NR Description: expressed protein
  misc_feature (92)..(92): Xaa is any aa, unknown or other
MAMTVAASSSVAVMIPRVTSVSASFSAVPYLPPLPPRSFGRSSFTVPPKLVSGNGSQKGELMKMRASSSDETSTSIDTNELFTDLKEKWDGXENKSTVIIY

SEQ ID NO: 41 - protein, 99 aa, Brassica napus
  peptide (1)..(99): Ceres Seq. ID no. 12556912
  misc_feature (7)..(99): Homolog of NCBI NO: 18403896 NR Description: expressed protein
  misc_feature (1)..(99): Homolog of NCBI NO: 37536446 NR Description: hypothetical protein [Oryza sativa (japonica
  misc_feature (16)..(99): Homolog of NCBI NO: 34393236 NR Description: unknown protein [Oryza sativa (japonica
  misc_feature (1)..(99): Homolog of NCBI NO: 21555057 NR Description: unknown [Arabidopsis thaliana]
  misc_feature (66)..(99): Homolog of NCBI NO: 18420175 NR Description: expressed protein
  misc_feature (66)..(99): Homolog of NCBI NO: 7485852 NR Description: hypothetical protein F20D10.220 - Arabidopsis
  misc_feature (1)..(99): Homolog of NCBI NO: 18407178 NR Description: expressed protein
  misc_feature (25)..(99): Homolog of NCBI NO: 38175474 NR Description: unknown protein [Oryza sativa (japonica
  misc_feature (1)..(99): Homolog of NCBI NO: 687677 NR Description: unknown
  misc_feature (1)..(99): Homolog of NCBI NO: 18411555 NR Description: expressed protein
  misc_feature (90)..(90): Xaa is any aa, unknown or other
MTVAASSSVAVMIPRVTSVSASFSAVPYLPPLPPRSFGRSSFTVPPKLVSGNGSQKGELMKMRASSSDETSTSIDTNELFTDLKEKWDGXENKSTVIIY

SEQ ID NO: 42 - protein, 88 aa, Brassica napus
  peptide (1)..(88): Ceres Seq. ID no. 12556913
  misc_feature (1)..(88): Homolog of NCBI NO: 18403896 NR Description: expressed protein
  misc_feature (1)..(88): Homolog of NCBI NO: 37536446 NR Description: hypothetical protein [Oryza sativa (japonica
  misc_feature (5)..(88): Homolog of NCBI NO: 34393236 NR Description: unknown protein [Oryza sativa (japonica
  misc_feature (1)..(88): Homolog of NCBI NO: 21555057 NR Description: unknown [Arabidopsis thaliana]
  misc_feature (55)..(88): Homolog of NCBI NO: 18420175 NR Description: expressed protein
  misc_feature (55)..(88): Homolog of NCBI NO: 7485852 NR Description: hypothetical protein F20D10.220 - Arabidopsis
  misc_feature (1)..(88): Homolog of NCBI NO: 18407178 NR Description: expressed protein
  misc_feature (14)..(88): Homolog of NCBI NO: 38175474 NR Description: unknown protein [Oryza sativa (japonica
  misc_feature (1)..(88): Homolog of NCBI NO: 687677 NR Description: unknown
  misc_feature (1)..(88): Homolog of NCBI NO: 18411555 NR Description: expressed protein
  misc_feature (79)..(79): Xaa is any aa, unknown or other
MIPRVTSVSASFSAVPYLPPLPPRSFGRSSFTVPPKLVSGNGSQKGELMKMRASSSDETSTSIDTNELFTDLKEKWDGXENKSTVIIY

SEQ ID NO: 43 - DNA, 879 bp, Brassica napus
  misc_feature (1)..(879): Ceres Seq. ID no. 12557497
  misc_feature (856)..(856): n is a, c, t, g, unknown, or other
  misc_feature (872)..(872): n is a, c, t, g, unknown, or other
aaaaacacctctctctcgttcacatctttcttctttgtggtaaacagaaagggagttagagagagagagagaaaacaatggcgtctaactcgctcatgagctgcggcatcgccgccgtctacccttctcttctctcttcttcaaagtctaagttcgtctccgccggagttcctctccccaacgccgggaacgttggccgtgtcagaatggctgctcactggatgcccggcgagccacgaccagcttacctcgacggttctgctcctggggactttgggtttgacccacttggacttggagaggttccagagaaccttgagaggtacaaagaatcagagctcattcactgtagatgggctatgctcgctgttccagggattttggtaccagaggctttgggatatggaaactgggttaaggcacaagaatgggcagcagtacctggaggacaagccacttacttggggacctcagtcccttggggtactttgcccncaatnttggctatagagttnttagctattgcctttgttgagcnccaaaggagtatggagaaggaccctgagaaaaanaagtacccgggaggngcatttgaccctntcggatactccaaagacccaaanaagttcgaggagttgaaagttaaagagatcaagaacgggcggcttgcactgttggcgtttgtaggcttntgtgtgcaacaatcggcctacccaggcacaggaccattggagaacttggctactcacttggccgatccatggcacaaaaacattggcgatattgttatccctttgaactgatgacttgtaaaaaagatagtaatatatcctatgagctttgtgtatcaaaactntgtgttatgaaagacncattgtg

SEQ ID NO: 44 - protein, 241 aa, Brassica napus
  peptide (1)..(241): Ceres Seq. ID no. 12557498
  misc_feature (53)..(210): Pfam Name: Chlorophyll A-B binding protein Pfam Description: Chlorophyll A-B binding protein
  misc_feature (1)..(239): Homolog of NCBI NO: 3789954 NR Description: chlorophyll a/b-binding protein precursor [Oryza
  misc_feature (1)..(241): Homolog of NCBI NO: 6685157 NR Description: chlorophyll a/b binding protein precursor
  misc_feature (186)..(241): Homolog of NCBI NO: 30694146 NR Description: light-harvesting chlorophyll a/b binding protein
  misc_feature (1)..(151): Homolog of NCBI NO: 30694146 NR Description: light-harvesting chlorophyll a/b binding protein
  misc_feature (1)..(239): Homolog of NCBI NO: 115764 NR Description: Chlorophyll A-B binding protein 6A, chloroplast
  misc_feature (1)..(239): Homolog of NCBI NO: 82079 NR Description: chlorophyll a/b-binding protein type I precursor
  misc_feature (1)..(239): Homolog of NCBI NO: 82078 NR Description: chlorophyll a/b-binding protein type I precursor
  misc_feature (1)..(238): Homolog of NCBI NO: 625547 NR Description: chlorophyll a/b-binding protein type I - common
  misc_feature (1)..(241): Homolog of NCBI NO: 13265501 NR Description: AT3g54890 [Arabidopsis thaliana]
  misc_feature (1)..(241): Homolog of NCBI NO: 15233115 NR Description: light-harvesting chlorophyll a/b binding protein
  misc_feature (140)..(140): Xaa is any aa, unknown or other
  misc_feature (141)..(141): Xaa is any aa, unknown or other
  misc_feature (146)..(146): Xaa is any aa, unknown or other
  misc_feature (154)..(154): Xaa is any aa, unknown or other
  misc_feature (165)..(165): Xaa is any aa, unknown or other
  misc_feature (170)..(170): Xaa is any aa, unknown or other
  misc_feature (175)..(175): Xaa is any aa, unknown or other
  misc_feature (182)..(182): Xaa is any aa, unknown or other
  misc_feature (205)..(205): Xaa is any aa, unknown or other
MASNSLMSCGIAAVYPSLLSSSKSKFVSAGVPLPNAGNVGRVRMAAHWMPGEPRPAYLDGSAPGDFGFDPLGLGEVPENLERYKESELIHCRWAMLAVPGILVPEALGYGNWVKAQEWAAVPGGQATYLGTSVPWGTLPXXLAIEXLAIAFVEXQRSMEKDPEKXKYPGXAFDPXGYSKDPXKFEELKVKEIKNGRLALLAFVGXCVQQSAYPGTGPLENLATHLADPWHKNIGDIVIPLN

SEQ ID NO: 45 - protein, 235 aa, Brassica napus
  peptide (1)..(235): Ceres Seq. ID no. 12557499
  misc_feature (47)..(204): Pfam Name: Chlorophyll A-B binding protein Pfam Description: Chlorophyll A-B binding protein
  misc_feature (1)..(233): Homolog of NCBI NO: 82079 NR Description: chlorophyll a/b-binding protein type I precursor
  misc_feature (1)..(233): Homolog of NCBI NO: 82078 NR Description: chlorophyll a/b-binding protein type I precursor
  misc_feature (1)..(232): Homolog of NCBI NO: 625547 NR Description: chlorophyll a/b-binding protein type I - common
  misc_feature (1)..(235): Homolog of NCBI NO: 6685157 NR Description: chlorophyll a/b binding protein precursor
  misc_feature (1)..(145): Homolog of NCBI NO: 30694146 NR Description: light-harvesting chlorophyll a/b binding protein
  misc_feature (1)..(233): Homolog of NCBI NO: 115764 NR Description: Chlorophyll A-B binding protein 6A, chloroplast
  misc_feature (180)..(235): Homolog of NCBI NO: 30694146 NR Description: light-harvesting chlorophyll a/b binding protein
  misc_feature (1)..(233): Homolog of NCBI NO: 3789954 NR Description: chlorophyll a/b-binding protein precursor [Oryza
  misc_feature (1)..(235): Homolog of NCBI NO: 13265501 NR Description: AT3g54890 [Arabidopsis thaliana]
  misc_feature (1)..(235): Homolog of NCBI NO: 15233115 NR Description: light-harvesting chlorophyll a/b binding protein
  misc_feature (134)..(134): Xaa is any aa, unknown or other
  misc_feature (135)..(135): Xaa is any aa, unknown or other
  misc_feature (140)..(140): Xaa is any aa, unknown or other
  misc_feature (148)..(148): Xaa is any aa, unknown or other
  misc_feature (159)..(159): Xaa is any aa, unknown or other
  misc_feature (164)..(164): Xaa is any aa, unknown or other
  misc_feature (169)..(169): Xaa is any aa, unknown or other
  misc_feature (176)..(176): Xaa is any aa, unknown or other
  misc_feature (199)..(199): Xaa is any aa, unknown or other
MSCGIAAVYPSLLSSSKSKFVSAGVPLPNAGNVGRVRMAAHWMPGEPRPAYLDGSAPGDFGFDPLGLGEVPENLERYKESELIHCRWAMLAVPGILVPEALGYGNWVKAQEWAAVPGGQATYLGTSVPWGTLPXXLAIEXLAIAFVEXQRSMEKDPEKXKYPGXAFDPXGYSKDPXKFEELKVKEIKNGRLALLAFVGXCVQQSAYPGTGPLENLATHLADPWHKNIGDIVIPLN

SEQ ID NO: 46 - protein, 198 aa, Brassica napus
  peptide (1)..(198): Ceres Seq. ID no. 12557500
  misc_feature (10)..(167): Pfam Name: Chlorophyll A-B binding protein Pfam Description: Chlorophyll A-B binding protein
  misc_feature (1)..(196): Homolog of NCBI NO: 3789954 NR Description: chlorophyll a/b-binding protein precursor [Oryza
  misc_feature (1)..(198): Homolog of NCBI NO: 6685157 NR Description: chlorophyll a/b binding protein precursor
  misc_feature (143)..(198): Homolog of NCBI NO: 30694146 NR Description: light-harvesting chlorophyll a/b binding protein
  misc_feature (1)..(108): Homolog of NCBI NO: 30694146 NR Description: light-harvesting chlorophyll a/b binding protein
  misc_feature (1)..(196): Homolog of NCBI NO: 115764 NR Description: Chlorophyll A-B binding protein 6A, chloroplast
  misc_feature (1)..(196): Homolog of NCBI NO: 82079 NR Description: chlorophyll a/b-binding protein type I precursor
  misc_feature (1)..(196): Homolog of NCBI NO: 82078 NR Description: chlorophyll a/b-binding protein type I precursor
  misc_feature (1)..(195): Homolog of NCBI NO: 625547 NR Description: chlorophyll a/b-binding protein type I - common
  misc_feature (1)..(198): Homolog of NCBI NO: 13265501 NR Description: AT3g54890 [Arabidopsis thaliana]
  misc_feature (1)..(198): Homolog of NCBI NO: 15233115 NR Description: light-harvesting chlorophyll a/b binding protein
  misc_feature (97)..(97): Xaa is any aa, unknown or other
  misc_feature (98)..(98): Xaa is any aa, unknown or other
  misc_feature (103)..(103): Xaa is any aa, unknown or other
  misc_feature (111)..(111): Xaa is any aa, unknown or other
  misc_feature (122)..(122): Xaa is any aa, unknown or other
  misc_feature (127)..(127): Xaa is any aa, unknown or other
  misc_feature (132)..(132): Xaa is any aa, unknown or other
  misc_feature (139)..(139): Xaa is any aa, unknown or other
  misc_feature (162)..(162): Xaa is any aa, unknown or other
MAAHWMPGEPRPAYLDGSAPGDFGFDPLGLGEVPENLERYKESELIHCRWAMLAVPGILVPEALGYGNWVKAQEWAAVPGGQATYLGTSVPWGTLPXXLAIEXLAIAFVEXQRSMEKDPEKXKYPGXAFDPXGYSKDPXKFEELKVKEIKNGRLALLAFVGXCVQQSAYPGTGPLENLATHLADPWHKNIGDIVIPLN

SEQ ID NO: 47 - DNA, 1081 bp, Brassica napus
  misc_feature (1)..(1081): Ceres Seq. ID no. 13574576
acctcacattcaacatcacagcaggaggagagagagaaagagagagagagagagcagagttcttcagtccatggcttccttagcttcatccaccacacttatctcttcatccaccgttcttcttccctcaaagccttctcctttttctcccgccgcctccttcctccgaactcttccttctaccgctgcatcaccgtcttctctccgttccggtttctccagcattggctccctcacctgcatcccctcttcctctcgccgtagcttcgccgtcaaggcccaggccgatgatttgccactggttggtaacaaagcgcctgattttgaggcagaggctgtttttgatcaagagttcatcaaggtgaagctctcagagtacattggtaaaaagtatgtgattctctttttctaccctttggacttcacttttgtctgccctacagagattactgcctttagtgaccgttatgaagwatttgagaagctaaacacggaagtgttaggtgtctcagtggacagtgtgttctcgcatcttgsgtgggtccaaacagagagaaagtcaggagggctcggtgatytgaactacccacttgtctctgatatcactaaatccatttcaaaatcttttggtgtgctcatccctgatcagggcattgcactgagagggcttttcatcattgacaaggaaggagtcatccagcattccaccatcaacaacctcggtattggccgaagcgttgatgagacaatgagaaccctccaggcattacagtatgttcaagaaaaccctgatgaggtytgccccgcgggatggaagcctggggagaaatcgatgaagcctgaccccaagctgagcaaagagtatttttcagctatttaaaggcttttttaaaacaaatgattggtgaaaagcagaggcatttttttttttcctatgttggagtctttgagtgctgagtttaatatgttttttgccaaattaacatttgcttgaatatctttgctttgtcttcattagttatgtttytgctgtgtgtgttttcctcaaaatttaataaaaaacaatggaatttatgtgttt

SEQ ID NO: 48 - protein, 292 aa, Brassica napus
  peptide (1)..(292): Ceres Seq. ID no. 15222598
  misc_feature (101)..(252): Pfam Name: AhpC/TSA family Pfam Description: AhpC/TSA family
  misc_feature (24)..(292): Homolog of NCBI NO: 1498198 NR Description: 2-Cys peroxiredoxin bas1 [Arabidopsis thaliana]
  misc_feature (24)..(292): Homolog of NCBI NO: 7242491 NR Description: 2-Cys peroxiredoxin [Arabidopsis thaliana]
  misc_feature (24)..(292): Homolog of NCBI NO: 3121825 NR Description: 2-cys peroxiredoxin BAS1, chloroplast precursor
  misc_feature (24)..(292): Homolog of NCBI NO: 21592588 NR Description: putative 2-cys peroxiredoxin BAS1 precursor
  misc_feature (24)..(292): Homolog of NCBI NO: 15229806 NR Description: 2-cys peroxiredoxin BAS1 precursor
  misc_feature (24)..(292): Homolog of NCBI NO: 21553667 NR Description: 2-cys peroxiredoxin-like protein [Arabidopsis
  misc_feature (24)..(292): Homolog of NCBI NO: 13265490 NR Description: AT5g06290 [Arabidopsis thaliana]
  misc_feature (24)..(292): Homolog of NCBI NO: 9758409 NR Description: 2-cys peroxiredoxin-like protein [Arabidopsis
  misc_feature (23)..(292): Homolog of NCBI NO: 18415155 NR Description: 2-cys peroxiredoxin-related protein [Arabidopsis
  misc_feature (24)..(292): Homolog of NCBI NO: 11119229 NR Description: 2-Cys peroxiredoxin [Brassica napus]
  misc_feature (158)..(158): Xaa is any aa, unknown or other
  misc_feature (179)..(179): Xaa is any aa, unknown or other
  misc_feature (193)..(193): Xaa is any aa, unknown or other
  misc_feature (266)..(266): Xaa is any aa, unknown or other
PHIQHHSRRRERKRERESRVLQSMASLASSTTLISSSTVLLPSKPSPFSPAASFLRTLPSTAASPSSLRSGFSSIGSLTCIPSSSRRSFAVKAQADDLPLVGNKAPDFEAEAVFDQEFIKVKLSEYIGKKYVILFFYPLDFTFVCPTEITAFSDRYEXFEKLNTEVLGVSVDSVFSHLXWVQTERKSGGLGDXNYPLVSDITKSISKSFGVLIPDQGIALRGLFIIDKEGVIQHSTINNLGIGRSVDETMRTLQALQYVQENPDEXCPAGWKPGEKSMKPDPKLSKEYFSAI

SEQ ID NO: 49 - protein, 269 aa, Brassica napus
  peptide (1)..(269): Ceres Seq. ID no. 15222599
  misc_feature (78)..(229): Pfam Name: AhpC/TSA family Pfam Description: AhpC/TSA family
  misc_feature (1)..(269): Homolog of NCBI NO: 1498198 NR Description: 2-Cys peroxiredoxin bas1 [Arabidopsis thaliana]
  misc_feature (1)..(269): Homolog of NCBI NO: 7242491 NR Description: 2-Cys peroxiredoxin [Arabidopsis thaliana]
  misc_feature (1)..(269): Homolog of NCBI NO: 3121825 NR Description: 2-cys peroxiredoxin BAS1, chloroplast precursor
  misc_feature (1)..(269): Homolog of NCBI NO: 21592588 NR Description: putative 2-cys peroxiredoxin BAS1 precursor
  misc_feature (1)..(269): Homolog of NCBI NO: 15229806 NR Description: 2-cys peroxiredoxin BAS1 precursor
  misc_feature (1)..(269): Homolog of NCBI NO: 21553667 NR Description: 2-cys peroxiredoxin-like protein [Arabidopsis
  misc_feature (1)..(269): Homolog of NCBI NO: 13265490 NR Description: AT5g06290 [Arabidopsis thaliana]
  misc_feature (1)..(269): Homolog of NCBI NO: 9758409 NR Description: 2-cys peroxiredoxin-like protein [Arabidopsis
  misc_feature (1)..(269): Homolog of NCBI NO: 18415155 NR Description: 2-cys peroxiredoxin-related protein [Arabidopsis
  misc_feature (1)..(269): Homolog of NCBI NO: 11119229 NR Description: 2-Cys peroxiredoxin [Brassica napus]
  misc_feature (135)..(135): Xaa is any aa, unknown or other
  misc_feature (156)..(156): Xaa is any aa, unknown or other
  misc_feature (170)..(170): Xaa is any aa, unknown or other
  misc_feature (243)..(243): Xaa is any aa, unknown or other
MASLASSTTLISSSTVLLPSKPSPFSPAASFLRTLPSTAASPSSLRSGFSSIGSLTCIPSSSRRSFAVKAQADDLPLVGNKAPDFEAEAVFDQEFIKVKLSEYIGKKYVILFFYPLDFTFVCPTEITAFSDRYEXFEKLNTEVLGVSVDSVFSHLXWVQTERKSGGLGDXNYPLVSDITKSISKSFGVLIPDQGIALRGLFIIDKEGVIQHSTINNLGIGRSVDETMRTLQALQYVQENPDEXCPAGWKPGEKSMKPDPKLSKEYFSAI

SEQ ID NO: 50 - DNA, 491 bp, Brassica napus
  misc_feature (1)..(491): Ceres Seq. ID no. 12557827
aatctgcagcgactctctcagacaactttcgatcttcttcttcatctcaatctcgtcgtttcgatcgatcaaaagaatcggagatggcatcgacagcggcggttccgttntggagagcggcggggatgacgtatataacgtactcaaacatctgcgcgaatctggtcaggaactgtctgaaagaaccattcaaggctgaatccatgagccgcgagaaggttcacttctccctctccaaatgggccgatggaaagccccagaaaccagttttgcggtcagacgcacctcaagtttgaggcttttgatcaagatatggttttctgaatgggataaaagggatgctgtaacgtctctctctctttggatattttgtttcctttttgttgtattcgatgaaagattgatactttgccnatcaataatgcaaaaacatggagcttnttctgtttctttnttaagacgaattagttttttgtggatttnttgagttg

SEQ ID NO: 51 - protein, 97 aa, Brassica napus
  peptide (1)..(97): Ceres Seq. ID no. 12557828
  misc_feature (35)..(83): Pfam Name: Mitochondrial ATP synthase epsilon chain Pfam Description: Mitochondrial ATP synthase epsilon chain
  misc_feature (37)..(85): Homolog of NCBI NO: 24642319 NR Description: stunted CG9032-PB
  misc_feature (37)..(94): Homolog of NCBI NO: 17864256 NR Description: stunted CG9032-PA [Drosophila melanogaster]
  misc_feature (37)..(90): Homolog of NCBI NO: 21070596 NR Description: hypothetical protein [Dictyostelium discoideum]
  misc_feature (29)..(92): Homolog of NCBI NO: 40253921 NR Description: putative ATP synthase epsilon chain,
  misc_feature (29)..(94): Homolog of NCBI NO: 2493053 NR Description: ATP synthase epsilon chain, mitochondrial
  misc_feature (32)..(95): Homolog of NCBI NO: 25044815 NR Description: ATP synthase epsilon subunit [Ananas comosus]
  misc_feature (28)..(93): Homolog of NCBI NO: 21068676 NR Description: putative epsilon subunit of mitochondrial
  misc_feature (28)..(93): Homolog of NCBI NO: 543868 NR Description: ATP synthase epsilon chain, mitochondrial
  misc_feature (28)..(97): Homolog of NCBI NO: 15217996 NR Description: epsilon subunit of mitochondrial F1-ATPase
  misc_feature (36)..(36): Xaa is any aa, unknown or other
SAATLSDNFRSSSSSQSRRFDRSKESEMASTAAVPXWRAAGMTYITYSNICANLVRNCLKEPFKAESMSREKVHFSLSKWADGKPQKPVLRSDAPQV

SEQ ID NO: 52 - protein, 82 aa, Brassica napus
  peptide (1)..(82): Ceres Seq. ID no. 12557829
  misc_feature (59)..(59): Xaa is any aa, unknown or other
  misc_feature (68)..(68): Xaa is any aa, unknown or other
  misc_feature (72)..(72): Xaa is any aa, unknown or other
  misc_feature (82)..(82): Xaa is any aa, unknown or other
MGRWKAPETSFAVRRTSSLRLLIKIWFSEWDKRDAVTSLSLWIFCFLFVVFDERLILCXSIMQKHGAXSVSXLRRISFLWIX

SEQ ID NO: 53 - protein, 70 aa, Brassica napus
  peptide (1)..(70): Ceres Seq. ID no. 12557830
  misc_feature (8)..(56): Pfam Name: Mitochondrial ATP synthase epsilon chain Pfam Description: Mitochondrial ATP synthase epsilon chain
  misc_feature (10)..(58): Homolog of NCBI NO: 24642319 NR Description: stunted CG9032-PB
  misc_feature (10)..(67): Homolog of NCBI NO: 17864256 NR Description: stunted CG9032-PA [Drosophila melanogaster]
  misc_feature (10)..(63): Homolog of NCBI NO: 21070596 NR Description: hypothetical protein [Dictyostelium discoideum]
  misc_feature (2)..(65): Homolog of NCBI NO: 40253921 NR Description: putative ATP synthase epsilon chain,
  misc_feature (2)..(67): Homolog of NCBI NO: 2493053 NR Description: ATP synthase epsilon chain, mitochondrial
  misc_feature (5)..(68): Homolog of NCBI NO: 25044815 NR Description: ATP synthase epsilon subunit [Ananas comosus]
  misc_feature (1)..(66): Homolog of NCBI NO: 21068676 NR Description: putative epsilon subunit of mitochondrial
  misc_feature (1)..(66): Homolog of NCBI NO: 543868 NR Description: ATP synthase epsilon chain, mitochondrial
  misc_feature (1)..(70): Homolog of NCBI NO: 15217996 NR Description: epsilon subunit of mitochondrial F1-ATPase
  misc_feature (9)..(9): Xaa is any aa, unknown or other
MASTAAVPXWRAAGMTYITYSNICANLVRNCLKEPFKAESMSREKVHFSLSKWADGKPQKPVLRSDAPQV

SEQ ID NO: 54 - DNA, 646 bp, Brassica napus
  misc_feature (1)..(646): Ceres Seq. ID no. 12556948
agagttaaattctatcaatctctaaaccaactggtttaacatgcaagaactagcaacttgggagttgtaaagcagagatcaccacatctacaaaaaatctcccacaccgacatgtcgagatccttagctttcgtttacttatccatacttttccttcagacccatctctcgatctccgtcgaggttccggtttcgtcggtgaacggagaaatagacgcaatgcttgaccggaaaggcgtagtcggggaagaaggagaagagatgatgccgtcggatataagccggagagtgatgatgatgcggaaacagtacataagctacgcaacgctaaggagagacatggttccttgtcagaggccaggcgcttcctactacgcttgtcgctcaggacaggccaattcttacagcagaggatgcaacatcattactaggtgtgctcgagacactagcgacatcaagacctgaaacatttttatccggttttnttttaaatgcggatnttgataatgcgattaaaatgctctctntccaaggatgaggcaagtaaaatctttaattcattttgtaatgttgttgtttacattagaataaggcttatgtagtttatatgtaatcaatattgatataattgatatntgtattgttg

SEQ ID NO: 55 - protein, 117 aa, Brassica napus
  peptide (1)..(117): Ceres Seq. ID no. 12556949
  misc_feature (46)..(110): Pfam Name: Rapid ALkalinization Factor (RALF) Pfam Description: Rapid ALkalinization Factor (RALF)
  misc_feature (44)..(108): Homolog of NCBI NO: 15218637 NR Description: hypothetical protein; protein id: At1g02900.1
  misc_feature (44)..(108): Homolog of NCBI NO: 28628203 NR Description: rapid alkalinization factor 1 precursor
  misc_feature (10)..(113): Homolog of NCBI NO: 30685837 NR Description: expressed protein [Arabidopsis thaliana]
  misc_feature (5)..(110): Homolog of NCBI NO: 18414528 NR Description: Expressed protein
  misc_feature (44)..(110): Homolog of NCBI NO: 18397246 NR Description: expressed protein
  misc_feature (1)..(66): Homolog of NCBI NO: 7459901 NR Description: hypothetical protein DL3015C - Arabidopsis
  misc_feature (24)..(110): Homolog of NCBI NO: 18401177 NR Description: expressed protein
  misc_feature (1)..(117): Homolog of NCBI NO: 18414108 NR Description: expressed protein
  misc_feature (1)..(117): Homolog of NCBI NO: 21553907 NR Description: unknown [Arabidopsis thaliana]
  misc_feature (1)..(117): Homolog of NCBI NO: 18403901 NR Description: Expressed protein
MSRSLAFVYLSILFLQTHLSISVEVPVSSVNGEIDAMLDRKGVVGEEGEEMMPSDISRRVMMMRKQYISYATLRRDMVPCQRPGASYYACRSGQANSYSRGCNIITRCARDTSDIKT

SEQ ID NO: 56 - protein, 81 aa, Brassica napus
  peptide (1)..(81): Ceres Seq. ID no. 12556950
  misc_feature (10)..(74): Pfam Name: Rapid ALkalinization Factor (RALF) Pfam Description: Rapid ALkalinization Factor (RALF)
  misc_feature (8)..(72): Homolog of NCBI NO: 15218637 NR Description: hypothetical protein; protein id: At1g02900.1
  misc_feature (8)..(72): Homolog of NCBI NO: 28628203 NR Description: rapid alkalinization factor 1 precursor
  misc_feature (1)..(77): Homolog of NCBI NO: 30685837 NR Description: expressed protein [Arabidopsis thaliana]
  misc_feature (1)..(74): Homolog of NCBI NO: 18414528 NR Description: Expressed protein
  misc_feature (8)..(74): Homolog of NCBI NO: 18397246 NR Description: expressed protein
  misc_feature (1)..(30): Homolog of NCBI NO: 7459901 NR Description: hypothetical protein DL3015C - Arabidopsis
  misc_feature (1)..(74): Homolog of NCBI NO: 18401177 NR Description: expressed protein
  misc_feature (1)..(81): Homolog of NCBI NO: 18414108 NR Description: expressed protein
  misc_feature (1)..(81): Homolog of NCBI NO: 21553907 NR Description: unknown [Arabidopsis thaliana]
  misc_feature (1)..(81): Homolog of NCBI NO: 18403901 NR Description: Expressed protein
MLDRKGVVGEEGEEMMPSDISRRVMMMRKQYISYATLRRDMVPCQRPGASYYACRSGQANSYSRGCNIITRCARDTSDIKT

SEQ ID NO: 57 - protein, 67 aa, Brassica napus
  peptide (1)..(67): Ceres Seq. ID no. 12556951
  misc_feature (1)..(60): Pfam Name: Rapid ALkalinization Factor (RALF) Pfam Description: Rapid ALkalinization Factor (RALF)
  misc_feature (1)..(58): Homolog of NCBI NO: 15218637 NR Description: hypothetical protein; protein id: At1g02900.1
  misc_feature (1)..(58): Homolog of NCBI NO: 28628203 NR Description: rapid alkalinization factor 1 precursor
  misc_feature (1)..(63): Homolog of NCBI NO: 30685837 NR Description: expressed protein [Arabidopsis thaliana]
  misc_feature (1)..(60): Homolog of NCBI NO: 18414528 NR Description: Expressed protein
  misc_feature (1)..(60): Homolog of NCBI NO: 18397246 NR Description: expressed protein
  misc_feature (1)..(16): Homolog of NCBI NO: 7459901 NR Description: hypothetical protein DL3015C - Arabidopsis
  misc_feature (1)..(60): Homolog of NCBI NO: 18401177 NR Description: expressed protein
  misc_feature (1)..(67): Homolog of NCBI NO: 18414108 NR Description: expressed protein
  misc_feature (1)..(67): Homolog of NCBI NO: 21553907 NR Description: unknown [Arabidopsis thaliana]
  misc_feature (1)..(67): Homolog of NCBI NO: 18403901 NR Description: Expressed protein
MMPSDISRRVMMMRKQYISYATLRRDMVPCQRPGASYYACRSGQANSYSRGCNIITRCARDTSDIKT

SEQ ID NO: 58 - DNA, 782 bp, Brassica napus
  misc_feature (1)..(782): Ceres Seq. ID no. 12557831
atcaaacaaaatccttggctccccccgaatctagctttctccctctctctctcgatggagaagaatcaagcaagccttcttctccagcaacagctcaaacatctgtgcaagaacccggttgatggtttctctgctggtntcgtcgacgagagtaacgtctttcagtggagcgtctcgatcatgggtcctcccgatactttgtatgaagggggattctttaatgcaattatgacatttccagagcaatatcctaacctcccaccaactgtgaggttcacctcggagatgtggcatcccaatgtttattctgatgggaaagtttgcatatcgattcttcatcatcctggcgatgatcctaatggatacgagcttgcctctgaacgttggacacctgtccatacggtagaaaccattatgttgagtatcatatccatgctctcgagtccaaacgatgagtcaccagcgaacgtggaagctgcaaaagagtggagagagaacagagcagggtttaggaagaaagtgagtcgctgtgttagaaaatcgcaagagatgctatgagccatctcttcttggcgtttttatgtgttgtagaaatttcgatcctaagctaagagagagagaacgtaagtagcatcaatcatcaagtagcaggcggatgaatctgtgtgctcaaaagcttgttttctttttatggttttggagatggctttaaggtttggaatattgtggtggaatcaaatcaactccnccttttaggattataatcttactctcgttaatgg

SEQ ID NO: 59 - protein, 185 aa, Brassica napus
  peptide (1)..(185): Ceres Seq. ID no. 12557832
  misc_feature (39)..(185): Homolog of NCBI NO: 136647 NR Description: Ubiquitin-conjugating enzyme E2-20 kDa
  misc_feature (52)..(184): Homolog of NCBI NO: 18424219 NR Description: E2, ubiquitin-conjugating enzyme 7 (UBC7)
  misc_feature (23)..(184): Homolog of NCBI NO: 7437988 NR Description: ubiquitin-conjugating enzyme - maize
  misc_feature (22)..(185): Homolog of NCBI NO: 34908132 NR Description: putative Ubiquitin carrier protein UBC7
  misc_feature (22)..(184): Homolog of NCBI NO: 18408206 NR Description: E2, ubiquitin-conjugating enzyme 13 (UBC13)
  misc_feature (17)..(185): Homolog of NCBI NO: 7437989 NR Description: ubiquitin-conjugating enzyme E2 - maize
  misc_feature (22)..(184): Homolog of NCBI NO: 31088843 NR Description: Ubiquitin-conjugating enzyme E2 7
  misc_feature (11)..(184): Homolog of NCBI NO: 28973769 NR Description: putative E2, ubiquitin-conjugating enzyme UBC7
  misc_feature (11)..(184): Homolog of NCBI NO: 19347846 NR Description: putative E2, ubiquitin-conjugating enzyme UBC7
  misc_feature (19)..(185): Homolog of NCBI NO: 18410268 NR Description: E2, ubiquitin-conjugating enzyme 14 (UBC14)
  misc_feature (47)..(47): Xaa is any aa, unknown or other
IKQNPWLPPNLAFSLSLSMEKNQASLLLQQQLKHLCKNPVDGFSAGXVDESNVFQWSVSIMGPPDTLYEGGFFNAIMTFPEQYPNLPPTVRFTSEMWHPNVYSDGKVCISILHHPGDDPNGYELASERWTPVHTVETIMLSIISMLSSPNDESPANVEAAKEWRENRAGFRKKVSRCVRKSQEML

SEQ ID NO: 60 - protein, 167 aa, Brassica napus
  peptide (1)..(167): Ceres Seq. ID no. 12557833
  misc_feature (21)..(167): Homolog of NCBI NO: 136647 NR Description: Ubiquitin-conjugating enzyme E2-20 kDa
  misc_feature (34)..(166): Homolog of NCBI NO: 18424219 NR Description: E2, ubiquitin-conjugating enzyme 7 (UBC7)
  misc_feature (5)..(166): Homolog of NCBI NO: 7437988 NR Description: ubiquitin-conjugating enzyme - maize
  misc_feature (4)..(167): Homolog of NCBI NO: 34908132 NR Description: putative Ubiquitin carrier protein UBC7
  misc_feature (4)..(166): Homolog of NCBI NO: 18408206 NR Description: E2, ubiquitin-conjugating enzyme 13 (UBC13)
  misc_feature (1)..(167): Homolog of NCBI NO: 7437989 NR Description: ubiquitin-conjugating enzyme E2 - maize
  misc_feature (4)..(166): Homolog of NCBI NO: 31088843 NR Description: Ubiquitin-conjugating enzyme E2 7
  misc_feature (1)..(166): Homolog of NCBI NO: 28973769 NR Description: putative E2, ubiquitin-conjugating enzyme UBC7
  misc_feature (1)..(166): Homolog of NCBI NO: 19347846 NR Description: putative E2, ubiquitin-conjugating enzyme UBC7
  misc_feature (1)..(167): Homolog of NCBI NO: 18410268 NR Description: E2, ubiquitin-conjugating enzyme 14 (UBC14)
  misc_feature (29)..(29): Xaa is any aa, unknown or other
MEKNQASLLLQQQLKHLCKNPVDGFSAGXVDESNVFQWSVSIMGPPDTLYEGGFFNAIMTFPEQYPNLPPTVRFTSEMWHPNVYSDGKVCISILHHPGDDPNGYELASERWTPVHTVETIMLSIISMLSSPNDESPANVEAAKEWRENRAGFRKKVSRCVRKSQEML

SEQ ID NO: 61 - protein, 125 aa, Brassica napus
  peptide (1)..(125): Ceres Seq. ID no. 12557834
  misc_feature (1)..(125): Homolog of NCBI NO: 136647 NR Description: Ubiquitin-conjugating enzyme E2-20 kDa
  misc_feature (1)..(124): Homolog of NCBI NO: 18424219 NR Description: E2, ubiquitin-conjugating enzyme 7 (UBC7)
  misc_feature (1)..(124): Homolog of NCBI NO: 7437988 NR Description: ubiquitin-conjugating enzyme - maize
  misc_feature (1)..(125): Homolog of NCBI NO: 34908132 NR Description: putative Ubiquitin carrier protein UBC7
  misc_feature (1)..(124): Homolog of NCBI NO: 18408206 NR Description: E2, ubiquitin-conjugating enzyme 13 (UBC13)
  misc_feature (1)..(125): Homolog of NCBI NO: 7437989 NR Description: ubiquitin-conjugating enzyme E2 - maize
  misc_feature (1)..(124): Homolog of NCBI NO: 31088843 NR Description: Ubiquitin-conjugating enzyme E2 7
  misc_feature (1)..(124): Homolog of NCBI NO: 28973769 NR Description: putative E2, ubiquitin-conjugating enzyme UBC7
  misc_feature (1)..(124): Homolog of NCBI NO: 19347846 NR Description: putative E2, ubiquitin-conjugating enzyme UBC7
  misc_feature (1)..(125): Homolog of NCBI NO: 18410268 NR Description: E2, ubiquitin-conjugating enzyme 14 (UBC14)
MGPPDTLYEGGFFNAIMTFPEQYPNLPPTVRFTSEMWHPNVYSDGKVCISILHHPGDDPNGYELASERWTPVHTVETIMLSIISMLSSPNDESPANVEAAKEWRENRAGFRKKVSRCVRKSQEML

SEQ ID NO: 62 - DNA, 577 bp, Brassica napus
  misc_feature (1)..(577): Ceres Seq. ID no. 12557915
ggggagcctcccttcgcaaagcctataccttcgacaccgtccaaaacttctggggtttgcacgagactatattcatccctagcaaactgacgccgaatgctgaaattcacatgttcaaagctggtgttgagcctaagtgggaagatcctgagtgtgctaatggcggaaagtggacttttgttgttacctccaaccgcaagcctgctttagacaaggcttggcttgaaactatgggtattgggaagaagtggaaggagatacttgatgtcaccgacaagataactttcactaaccatgatgattctagaagaactcggttcactgtctgaagagaagacacaagtgtggtgagacctgaggaagatgcaatctagctttgtcttgcattattctgtcggtttactcatagctgagagagcctgagacctttagggacactcactttgaggtgtaactctacaaagttttatttttcactggaaagaagttatttaatattaagttcggttatatctttttggaagcatcaaattttggacacactttctcttaaatcaaatgtctgatttttaatgct

SEQ ID NO: 63 - protein, 108 aa, Brassica napus
  peptide (1)..(108): Ceres Seq. ID no. 12557916
  misc_feature (1)..(85): Pfam Name: Eukaryotic initiation factor 4E Pfam Description: Eukaryotic initiation factor 4E
  misc_feature (77)..(104): Homolog of NCBI NO: 32698526 NR Description: eukaryotic translation initiation factor iso4E
  misc_feature (1)..(85): Homolog of NCBI NO: 32698526 NR Description: eukaryotic translation initiation factor iso4E
  misc_feature (77)..(105): Homolog of NCBI NO: 1352442 NR Description: EUKARYOTIC TRANSLATION INITIATION FACTOR 4E (EIF4E) (MRNA CAP-BINDING PROTEIN) (EIF-(ISO)4F 25 KD SUBUNIT)
  misc_feature (1)..(85): Homolog of NCBI NO: 1352442 NR Description: EUKARYOTIC TRANSLATION INITIATION FACTOR 4E (EIF4E) (MRNA CAP-BINDING PROTEIN) (EIF-(ISO)4F 25 KD SUBUNIT)
  misc_feature (77)..(105): Homolog of NCBI NO: 37535224 NR Description: cap-binding protein p28 [Oryza sativa (japonica
  misc_feature (1)..(85): Homolog of NCBI NO: 37535224 NR Description: cap-binding protein p28 [Oryza sativa (japonica
  misc_feature (77)..(108): Homolog of NCBI NO: 15238558 NR Description: eIF4Eiso protein (emb|CAA71579.1)
  misc_feature (77)..(108): Homolog of NCBI NO: 2209274 NR Description: eukaryotic initiation factor (iso)-4F p28 subunit
  misc_feature (1)..(85): Homolog of NCBI NO: 15238558 NR Description: eIF4Eiso protein (emb|CAA71579.1)
  misc_feature (1)..(85): Homolog of NCBI NO: 2209274 NR Description: eukaryotic initiation factor (iso)-4F p28 subunit
GASLRKAYTFDTVQNFWGLHETIFIPSKLTPNAEIHMFKAGVEPKWEDPECANGGKWTFVVTSNRKPALDKAWLETMGIGKKWKEILDVTDKITFTNHDDSRRTRFTV

SEQ ID NO: 64 - protein, 72 aa, Brassica napus
  peptide (1)..(72): Ceres Seq. ID no. 12557917
  misc_feature (41)..(68): Homolog of NCBI NO: 32698526 NR Description: eukaryotic translation initiation factor iso4E
  misc_feature (1)..(49): Homolog of NCBI NO: 32698526 NR Description: eukaryotic translation initiation factor iso4E
  misc_feature (41)..(69): Homolog of NCBI NO: 1352442 NR Description: EUKARYOTIC TRANSLATION INITIATION FACTOR 4E (EIF4E) (MRNA CAP-BINDING PROTEIN) (EIF-(ISO)4F 25 KD SUBUNIT)
  misc_feature (1)..(49): Homolog of NCBI NO: 1352442 NR Description: EUKARYOTIC TRANSLATION INITIATION FACTOR 4E (EIF4E) (MRNA CAP-BINDING PROTEIN) (EIF-(ISO)4F 25 KD SUBUNIT)
  misc_feature (41)..(69): Homolog of NCBI NO: 37535224 NR Description: cap-binding protein p28 [Oryza sativa (japonica
  misc_feature (1)..(49): Homolog of NCBI NO: 37535224 NR Description: cap-binding protein p28 [Oryza sativa (japonica
  misc_feature (41)..(72): Homolog of NCBI NO: 15238558 NR Description: eIF4Eiso protein (emb|CAA71579.1)
  misc_feature (41)..(72): Homolog of NCBI NO: 2209274 NR Description: eukaryotic initiation factor (iso)-4F p28 subunit
  misc_feature (1)..(49): Homolog of NCBI NO: 15238558 NR Description: eIF4Eiso protein (emb|CAA71579.1)
  misc_feature (1)..(49): Homolog of NCBI NO: 2209274 NR Description: eukaryotic initiation factor (iso)-4F p28 subunit
MFKAGVEPKWEDPECANGGKWTFVVTSNRKPALDKAWLETMGIGKKWKEILDVTDKITFTNHDDSRRTRFTV

SEQ ID NO: 65 - DNA, 811 bp, Brassica napus
  misc_feature (1)..(811): Ceres Seq. ID no. 12557850
aaaaacctgattttaccactaaactgctgtcttgtaagaagaagccgcaaaactcttaggactcttcttcgtggtacgttcaaaaggtttctccttcggtttcaaagattctgtgaagatgttctccgctcagaacaagatcaagaaggacaagaatgccgagccgacagaatgcgacgtgcaagttgctcaggctttgtttgatttggagaacactaaccaggagctgaaaagcgagctgaaagatctctacatcaaccaagctgttaacatggacatctgtggaaaccgcaaggctattgtgatttacgtcccattcagattgaggaaagctttccgcaagatccacccccgtctcgttagagagctcgagaagaagttcagtggaaaggatgttatctttgttgccacaagaaggatcatgcgtcctcccaagaagggtgcagctgttcagaggccacgcaacagaactntaacctctgttcacgaagcaatgctcgaggacgtcgcttaccccgctgagatcgttggaaaacgtactcgataccgtcttgatggatccaaagtcatgaaggtgtatttggaggccaaggaaaggaacaacncagagtacaagctcgagactatggttggtgtgtaccgtaaacttactggaaaggatgtcacttttgagtacccggtcgaagcttgaaagtaagacgatgctgaagaatcatcaggatagaggagagattttcaattatgtattttggtatttgatgtaatgaataccctttgtgcttttcaattttgaaacctatgttataatttc

SEQ ID NO: 66 - protein, 190 aa, Brassica napus
  peptide (1)..(190): Ceres Seq. ID no. 12557851
  misc_feature (4)..(190): Pfam Name: Ribosomal protein S7e Pfam Description: Ribosomal protein S7e
  misc_feature (1)..(187): Homolog of NCBI NO: 15294025 NR Description: 40S ribosomal protein S7 [Ictalurus punctatus]
  misc_feature (1)..(188): Homolog of NCBI NO: 22671664 NR Description: ribosomal protein S7 [Oryza sativa (japonica
  misc_feature (1)..(188): Homolog of NCBI NO: 4588906 NR Description: ribosomal protein S7 [Secale cereale]
  misc_feature (1)..(188): Homolog of NCBI NO: 14787424 NR Description: Ribosomal protein S7 [Hordeum vulgare subsp.
  misc_feature (1)..(188): Homolog of NCBI NO: 20139964 NR Description: 40S ribosomal protein S7
  misc_feature (1)..(188): Homolog of NCBI NO: 15221972 NR Description: 40S ribosomal protein S7 homolog, putative
  misc_feature (1)..(188): Homolog of NCBI NO: 15232926 NR Description: putative 40S ribosomal protein
  misc_feature (1)..(188): Homolog of NCBI NO: 20139962 NR Description: 40S ribosomal protein S7
  misc_feature (1)..(190): Homolog of NCBI NO: 21592413 NR Description: 40S ribosomal protein S7-like [Arabidopsis
  misc_feature (1)..(190): Homolog of NCBI NO: 15237278 NR Description: 40S ribosomal protein S7-like
  misc_feature (119)..(119): Xaa is any aa, unknown or other
  misc_feature (163)..(163): Xaa is any aa, unknown or other
MFSAQNKIKKDKNAEPTECDVQVAQALFDLENTNQELKSELKDLYINQAVNMDICGNRKAIVIYVPFRLRKAFRKIHPRLVRELEKKFSGKDVIFVATRRIMRPPKKGAAVQRPRNRTXTSVHEAMLEDVAYPAEIVGKRTRYRLDGSKVMKVYLEAKERNNXEYKLETMVGVYRKLTGKDVTFEYPVEA

SEQ ID NO: 67 - protein, 139 aa, Brassica napus
  peptide (1)..(139): Ceres Seq. ID no. 12557852
  misc_feature (1)..(139): Pfam Name: Ribosomal protein S7e Pfam Description: Ribosomal protein S7e
  misc_feature (1)..(136): Homolog of NCBI NO: 15294025 NR Description: 40S ribosomal protein S7 [Ictalurus punctatus]
  misc_feature (1)..(137): Homolog of NCBI NO: 22671664 NR Description: ribosomal protein S7 [Oryza sativa (japonica
  misc_feature (1)..(137): Homolog of NCBI NO: 4588906 NR Description: ribosomal protein S7 [Secale cereale]
  misc_feature (1)..(137): Homolog of NCBI NO: 14787424 NR Description: Ribosomal protein S7 [Hordeum vulgare subsp.
  misc_feature (1)..(137): Homolog of NCBI NO: 20139964 NR Description: 40S ribosomal protein S7
  misc_feature (1)..(137): Homolog of NCBI NO: 15221972 NR Description: 40S ribosomal protein S7 homolog, putative
  misc_feature (1)..(137): Homolog of NCBI NO: 15232926 NR Description: putative 40S ribosomal protein
  misc_feature (1)..(137): Homolog of NCBI NO: 20139962 NR Description: 40S ribosomal protein S7
  misc_feature (1)..(139): Homolog of NCBI NO: 21592413 NR Description: 40S ribosomal protein S7-like [Arabidopsis
  misc_feature (1)..(139): Homolog of NCBI NO: 15237278 NR Description: 40S ribosomal protein S7-like
  misc_feature (68)..(68): Xaa is any aa, unknown or other
  misc_feature (112)..(112): Xaa is any aa, unknown or other
MDICGNRKAIVIYVPFRLRKAFRKIHPRLVRELEKKFSGKDVIFVATRRIMRPPKKGAAVQRPRNRTXTSVHEAMLEDVAYPAEIVGKRTRYRLDGSKVMKVYLEAKERNNXEYKLETMVGVYRKLTGKDVTFEYPVEA

SEQ ID NO: 68 - DNA, 834 bp, Brassica napus
  misc_feature (1)..(834): Ceres Seq. ID no. 13574788
ataatttctgcaagatcatcaaaagctgatacaccaagctggttataaactctactttctcagtttcagacatacaaaaacaacagaaaaatgggaacagagatggtcatggttcacgaggttccttttcctccacagatcatcacttccaagcccctctctcttcttggccaaggcatcactgacatagagatccatttccttcaagtgaagttcacggccataggagtttacttagatccttcagatgttaaaacccatcttgacaaatggaaaggcaagaccggaaaggatcttgccggcgatgacgacttcttcgacgccctggcctccggggagattgagaaagttataagggtggtggttataaaggaaataaaaggagctcagtacggagtgcagctagagaattcggtgagagatcgtttggctgctgaggataagtacgaggaggaagaagaaaccgagctcgagaaagttgtgggattttttcagtytaagtacttcaaaactcattccatcatcacttaccgtttytcagccaaagatggaatttgcgagatcggatttgagacggaaggtaaagaagaggagaaactgaaggtagagaatgcgaatgtggtcggtatgatgcagaagtggtacttgtytggaagtcgaggagtttcmccgtccaccatcgtctccctcgccgattctctgtcggcagttttaacctaaaactccttatatagccatctatcatctatggtgtgttttatgttgttgtattatgtcgttcttaagtgagacatcgtgtttggttatctttataaaatctttaatggttgtctt

SEQ ID NO: 69 - protein, 209 aa, Brassica napus
  peptide (1)..(209): Ceres Seq. ID no. 15222606
  misc_feature (1)..(209): Pfam Name: Chalcone-flavanone isomerase Pfam Description: Chalcone-flavanone isomerase
  misc_feature (1)..(208): Homolog of NCBI NO: 20152986 NR Description: chalcone isomerase [Hordeum vulgare subsp.
  misc_feature (6)..(208): Homolog of NCBI NO: 3041652 NR Description: CHALCONE--FLAVONONE ISOMERASE (CHALCONE
  misc_feature (1)..(209): Homolog of NCBI NO: 5921722 NR Description: Chalcone--flavonone isomerase (Chalcone
  misc_feature (3)..(208): Homolog of NCBI NO: 4126399 NR Description: chalcone isomerase [Citrus sinensis]
  misc_feature (5)..(209): Homolog of NCBI NO: 10176739 NR Description: contains similarity to chalcone-flavonone
  misc_feature (1)..(209): Homolog of NCBI NO: 18414838 NR Description: chalcone-flavanone isomerase family [Arabidopsis
  misc_feature (136)..(136): Xaa is any aa, unknown or other
  misc_feature (149)..(149): Xaa is any aa, unknown or other
  misc_feature (187)..(187): Xaa is any aa, unknown or other
  misc_feature (193)..(193): Xaa is any aa, unknown or other
MGTEMVMVHEVPFPPQIITSKPLSLLGQGITDIEIHFLQVKFTAIGVYLDPSDVKTHLDKWKGKTGKDLAGDDDFFDALASGEIEKVIRVVVIKEIKGAQYGVQLENSVRDRLAAEDKYEEEEETELEKVVGFFQXKYFKTHSIITYRXSAKDGICEIGFETEGKEEEKLKVENANVVGMMQKWYLXGSRGVXPSTIVSLADSLSAVLT

SEQ ID NO: 70 - protein, 205 aa, Brassica napus
  peptide (1)..(205): Ceres Seq. ID no. 15222607
  misc_feature (1)..(205): Pfam Name: Chalcone-flavanone isomerase Pfam Description: Chalcone-flavanone isomerase
  misc_feature (1)..(205): Homolog of NCBI NO: 18414838 NR Description: chalcone-flavanone isomerase family [Arabidopsis
  misc_feature (1)..(204): Homolog of NCBI NO: 20152986 NR Description: chalcone isomerase [Hordeum vulgare subsp.
  misc_feature (2)..(204): Homolog of NCBI NO: 3041652 NR Description: CHALCONE--FLAVONONE ISOMERASE (CHALCONE
  misc_feature (1)..(205): Homolog of NCBI NO: 5921722 NR Description: Chalcone--flavonone isomerase (Chalcone
  misc_feature (1)..(204): Homolog of NCBI NO: 4126399 NR Description: chalcone isomerase [Citrus sinensis]
  misc_feature (1)..(205): Homolog of NCBI NO: 10176739 NR Description: contains similarity to chalcone-flavonone
  misc_feature (132)..(132): Xaa is any aa, unknown or other
  misc_feature (145)..(145): Xaa is any aa, unknown or other
  misc_feature (183)..(183): Xaa is any aa, unknown or other
  misc_feature (189)..(189): Xaa is any aa, unknown or other
MVMVHEVPFPPQIITSKPLSLLGQGITDIEIHFLQVKFTAIGVYLDPSDVKTHLDKWKGKTGKDLAGDDDFFDALASGEIEKVIRVVVIKEIKGAQYGVQLENSVRDRLAAEDKYEEEEETELEKVVGFFQXKYFKTHSIITYRXSAKDGICEIGFETEGKEEEKLKVENANVVGMMQKWYLXGSRGVXPSTIVSLADSLSAVLT

SEQ ID NO: 71 - protein, 203 aa, Brassica napus
  peptide (1)..(203): Ceres Seq. ID no. 15222608
  misc_feature (1)..(203): Pfam Name: Chalcone-flavanone isomerase Pfam Description: Chalcone-flavanone isomerase
  misc_feature (1)..(202): Homolog of NCBI NO: 20152986 NR Description: chalcone isomerase [Hordeum vulgare subsp.
  misc_feature (1)..(202): Homolog of NCBI NO: 3041652 NR Description: CHALCONE--FLAVONONE ISOMERASE (CHALCONE
  misc_feature (1)..(203): Homolog of NCBI NO: 5921722 NR Description: Chalcone--flavonone isomerase (Chalcone
  misc_feature (1)..(202): Homolog of NCBI NO: 4126399 NR Description: chalcone isomerase [Citrus sinensis]
  misc_feature (1)..(203): Homolog of NCBI NO: 10176739 NR Description: contains similarity to chalcone-flavonone
  misc_feature (1)..(203): Homolog of NCBI NO: 18414838 NR Description: chalcone-flavanone isomerase family [Arabidopsis
  misc_feature (130)..(130): Xaa is any aa, unknown or other
  misc_feature (143)..(143): Xaa is any aa, unknown or other
  misc_feature (181)..(181): Xaa is any aa, unknown or other
  misc_feature (187)..(187): Xaa is any aa, unknown or other
MVHEVPFPPQIITSKPLSLLGQGITDIEIHFLQVKFTAIGVYLDPSDVKTHLDKWKGKTGKDLAGDDDFFDALASGEIEKVIRVVVIKEIKGAQYGVQLENSVRDRLAAEDKYEEEEETELEKVVGFFQXKYFKTHSIITYRXSAKDGICEIGFETEGKEEEKLKVENANVVGMMQKWYLXGSRGVXPSTIVSLADSLSAVLT

SEQ ID NO: 72 - DNA, 880 bp, Brassica napus
  misc_feature (1)..(880): Ceres Seq. ID no. 12557361
gatcggatctgaaaccgacgaagatcggagatgacggaatcgagcctggatctgcaggaatccggctgggaggagctccggagagaagctcgcaaaatcgaaggcgatctcgacgtcaagctctcctcttacgccaagctcggcgccagattcaatcaaggcggttatggtgttgatggtggatcacctggaggatcatggaagtcgatggagattgagattcagtcttcgcttgagaagctgttggatattaatgattccatgagtagatgtgctgcctctgctgcacctacaacctctgttactcagaagcttgctaggcacagagacattcttcatgaatacactcaggagtttcggaggataaaaggaaacataagctcgatgagggaacatgctgagctcttgagttctgtcagggatgacataagtgaatataaggcttctggtagtatgtcaccaggtgtgcaagtgttaagggagagagcttcaatccatggaagtatatcccatattgatgaagtcattggccaagctcaagcgacaagagcagttcttggctctcaacggtctctgttttctgatgttcaagggaaagtgaaaattctcggagacaagttcccagtgattcgtggcttacttggctcaattagaagaagacgttctcgggacacacttatcctctccgctgtcatcgctgcttgtaccttgtttataatcatctactggctctcgaaataaacagtatgttcatacgcctcaagcccattaagacgatcctctatccgaattttccaagtttaatttttgtattttgccattttgttgagttgtgtttgtagtaatgttacactcttaatcataaaaatcttaaaattcc

SEQ ID NO: 73 - protein, 236 aa, Brassica napus
  peptide (1)..(236): Ceres Seq. ID no. 12557362
  misc_feature (64)..(214): Pfam Name: Vesicle transport v-SNARE protein Pfam Description: Vesicle transport v-SNARE protein
  misc_feature (48)..(232): Homolog of NCBI NO: 11132038 NR Description: 28 kDa Golgi SNARE protein (Golgi SNAP receptor
  misc_feature (48)..(232): Homolog of NCBI NO: 4758456 NR Description: golgi SNAP receptor complex member 1; Golgi SNARE
  misc_feature (48)..(232): Homolog of NCBI NO: 30388705 NR Description: Gosr1 protein [Mus musculus]
  misc_feature (48)..(232): Homolog of NCBI NO: 31542904 NR Description: golgi SNAP receptor complex member 1; cis-Golgi
  misc_feature (48)..(232): Homolog of NCBI NO: 11132188 NR Description: 28 kDa Golgi SNARE protein (Golgi SNAP receptor
  misc_feature (13)..(232): Homolog of NCBI NO: 31207049 NR Description: ENSANGP00000022012 [Anopheles gambiae]
  misc_feature (48)..(232): Homolog of NCBI NO: 3335132 NR Description: GOS28/P28 protein [Homo sapiens]
  misc_feature (48)..(232): Homolog of NCBI NO: 28280046 NR Description: Similar to golgi SNAP receptor complex member 1
  misc_feature (11)..(236): Homolog of NCBI NO: 18394296 NR Description: cis-Golgi SNARE protein, putative
  misc_feature (1)..(236): Homolog of NCBI NO: 15225431 NR Description: cis-Golgi SNARE protein, putative
MTESSLDLQESGWEELRREARKIEGDLDVKLSSYAKLGARFNQGGYGVDGGSPGGSWKSMEIEIQSSLEKLLDINDSMSRCAASAAPTTSVTQKLARHRDILHEYTQEFRRIKGNISSMREHAELLSSVRDDISEYKASGSMSPGVQVLRERASIHGSISHIDEVIGQAQATRAVLGSQRSLFSDVQGKVKILGDKFPVIRGLLGSIRRRRSRDTLILSAVIAACTLFIIIYWLSK

SEQ ID NO: 74 - protein, 177 aa, Brassica napus
  peptide (1)..(177): Ceres Seq. ID no. 12557363
  misc_feature (5)..(155): Pfam Name: Vesicle transport v-SNARE protein Pfam Description: Vesicle transport v-SNARE protein
  misc_feature (1)..(173): Homolog of NCBI NO: 11132038 NR Description: 28 kDa Golgi SNARE protein (Golgi SNAP receptor
  misc_feature (1)..(173): Homolog of NCBI NO: 4758456 NR Description: golgi SNAP receptor complex member 1; Golgi SNARE
  misc_feature (1)..(173): Homolog of NCBI NO: 31542904 NR Description: golgi SNAP receptor complex member 1; cis-Golgi
  misc_feature (1)..(173): Homolog of NCBI NO: 30388705 NR Description: Gosr1 protein [Mus musculus]
  misc_feature (1)..(173): Homolog of NCBI NO: 11132188 NR Description: 28 kDa Golgi SNARE protein (Golgi SNAP receptor
  misc_feature (1)..(173): Homolog of NCBI NO: 31207049 NR Description: ENSANGP00000022012 [Anopheles gambiae]
  misc_feature (1)..(173): Homolog of NCBI NO: 3335132 NR Description: GOS28/P28 protein [Homo sapiens]
  misc_feature (1)..(173): Homolog of NCBI NO: 28280046 NR Description: Similar to golgi SNAP receptor complex member 1
  misc_feature (1)..(177): Homolog of NCBI NO: 18394296 NR Description: cis-Golgi SNARE protein, putative
  misc_feature (1)..(177): Homolog of NCBI NO: 15225431 NR Description: cis-Golgi SNARE protein, putative
MEIEIQSSLEKLLDINDSMSRCAASAAPTTSVTQKLARHRDILHEYTQEFRRIKGNISSMREHAELLSSVRDDISEYKASGSMSPGVQVLRERASIHGSISHIDEVIGQAQATRAVLGSQRSLFSDVQGKVKILGDKFPVIRGLLGSIRRRRSRDTLILSAVIAACTLFIIIYWLSK

SEQ ID NO: 75 - protein, 159 aa, Brassica napus
  peptide (1)..(159): Ceres Seq. ID no. 12557364
  misc_feature (1)..(137): Pfam Name: Vesicle transport v-SNARE protein Pfam Description: Vesicle transport v-SNARE protein
  misc_feature (1)..(155): Homolog of NCBI NO: 11132038 NR Description: 28 kDa Golgi SNARE protein (Golgi SNAP receptor
  misc_feature (1)..(155): Homolog of NCBI NO: 4758456 NR Description: golgi SNAP receptor complex member 1; Golgi SNARE
  misc_feature (1)..(155): Homolog of NCBI NO: 31542904 NR Description: golgi SNAP receptor complex member 1; cis-Golgi
  misc_feature (1)..(155): Homolog of NCBI NO: 30388705 NR Description: Gosr1 protein [Mus musculus]
  misc_feature (1)..(155): Homolog of NCBI NO: 11132188 NR Description: 28 kDa Golgi SNARE protein (Golgi SNAP receptor
  misc_feature (1)..(155): Homolog of NCBI NO: 31207049 NR Description: ENSANGP00000022012 [Anopheles gambiae]
  misc_feature (1)..(155): Homolog of NCBI NO: 3335132 NR Description: GOS28/P28 protein [Homo sapiens]
  misc_feature (1)..(155): Homolog of NCBI NO: 28280046 NR Description: Similar to golgi SNAP receptor complex member 1
  misc_feature (1)..(159): Homolog of NCBI NO: 18394296 NR Description: cis-Golgi SNARE protein, putative
  misc_feature (1)..(159): Homolog of NCBI NO: 15225431 NR Description: cis-Golgi SNARE protein, putative
MSRCAASAAPTTSVTQKLARHRDILHEYTQEFRRIKGNISSMREHAELLSSVRDDISEYKASGSMSPGVQVLRERASIHGSISHIDEVIGQAQATRAVLGSQRSLFSDVQGKVKILGDKFPVIRGLLGSIRRRRSRDTLILSAVIAACTLFIIIYWLSK

SEQ ID NO: 76 - DNA, 731 bp, Brassica napus
  misc_feature (1)..(731): Ceres Seq. ID no. 12557888
agttgtcctcttctctaaaacattttcaacaaagaaaacggtaataagagagaagaggtggtagtaaacaagatcagaatctttaacattttcaaaacaaatggcgaccaaagccatcttcttcttctttgtctcggccgtgtgcctgtcctctctcgccggcgttgccaacgctgacgccgacgactttgacagtttccaaatccagggatcggtttactgtgacacttgccgtgtccaattcgttacccgcctcagccaattccttgaaggtgcgaaagtgaagctagagtgcaggagtagaacaaacggaactgtaacgttgactaaagaagccgtgacggacaaatcaggaagctacaaaatggaagtcaccggtgaccacgaggaggaagtctgcgagctcgttctcctccaatcaccagacagtggttgcagcgacgtcagcacagaggcttacctacgtaacgccgctaaggttagtctgaccgcgaatgacggtatcgtntcacacgagacacgtatcgttaacccccttggtttcatggttaagacgccgttagctgattgtcccgccgcatttaaggagcttggaatcgtccctgacgtcatcttctaaatatgatgacgacttgtaccaattcaagatcgttatttaactgtcatctattatttgctttcttgtatacagaaaacgtaatttgataaaaatacaaaaaagcggcaattct

SEQ ID NO: 77 - protein, 172 aa, Brassica napus
  peptide (1)..(172): Ceres Seq. ID no. 12557889
  misc_feature (35)..(159): Pfam Name: Pollen proteins Ole e I family Pfam Description: Pollen proteins Ole e I family
  misc_feature (4)..(168): Homolog of NCBI NO: 125887 NR Description: Anther specific LAT52 protein precursor
  misc_feature (13)..(169): Homolog of NCBI NO: 28380096 NR Description: Olee1-like protein precursor
  misc_feature (1)..(166): Homolog of NCBI NO: 22074346 NR Description: Che a 1 allergen precursor [Chenopodium album]
  misc_feature (58)..(172): Homolog of NCBI NO: 28393099 NR Description: unknown protein [Arabidopsis thaliana]
  misc_feature (5)..(172): Homolog of NCBI NO: 15218844 NR Description: hypothetical protein; protein id: At1g29140.1
  misc_feature (16)..(172): Homolog of NCBI NO: 9758935 NR Description: Ole e I (main olive allergen)-like protein
  misc_feature (1)..(172): Homolog of NCBI NO: 21593871 NR Description: Ole e I (main olive allergen)-like protein
  misc_feature (1)..(172): Homolog of NCBI NO: 18422603 NR Description: Ole e I (main olive allergen)-like protein
  misc_feature (1)..(172): Homolog of NCBI NO: 18415132 NR Description: similar to Ole e I (main olive allergen)-like
  misc_feature (1)..(169): Homolog of NCBI NO: 7486300 NR Description: hypothetical protein F28J12.250 - Arabidopsis
  misc_feature (136)..(136): Xaa is any aa, unknown or other
MATKAIFFFFVSAVCLSSLAGVANADADDFDSFQIQGSVYCDTCRVQFVTRLSQFLEGAKVKLECRSRTNGTVTLTKEAVTDKSGSYKMEVTGDHEEEVCELVLLQSPDSGCSDVSTEAYLRNAAKVSLTANDGIXSHETRIVNPLGFMVKTPLADCPAAFKELGIVPDVIF

SEQ ID NO: 78 - DNA, 551 bp, Brassica napus
  misc_feature (1)..(551): Ceres Seq. ID no. 12556956
aataatcgtatccggacttcgccgtactccgacactgaaatcgccggcggtaaatcctccgacgctcttcacctccgtgcctagattcttccactcaagctcccctcgtttcagcgacagtagaatcgcgatgaacagcgttgagaaaaccggatcgaacacgggggcgatcgagaatcgggcgagcaggattaaggagaagctggagaaggagctggagccggtggagctagtgatcgaggacgtctcgtaccagcacgcgggtcacgcggggatgaaaggtagaggaaccgacgaagagacgcatttcaatgtgaagatcgtatcgaaaggattcgaagggatgaatctggtgaagaggcacaggctattgtacgatctgctcagggaggagcttgatagtggattgcacgcgctttccatcgtctccaagactccctccgagtccactcgctagatctgttttatgtttctcttatgagagagtttgttttttgatttggaacaaaatgccaacctgctttttaaattaattcgagttctggttttct

SEQ ID NO: 79 - protein, 151 aa, Brassica napus
  peptide (1)..(151): Ceres Seq. ID no. 12556957
  misc_feature (67)..(149): Pfam Name: BolA-like protein Pfam Description: BolA-like protein
  misc_feature (1)..(94): Homolog of NCBI NO: 8778331 NR Description: F14J16.3 [Arabidopsis thaliana]
  misc_feature (49)..(148): Homolog of NCBI NO: 28393578 NR Description: unknown protein [Arabidopsis thaliana]
  misc_feature (49)..(148): Homolog of NCBI NO: 15236742 NR Description: putative protein
  misc_feature (1)..(122): Homolog of NCBI NO: 8778492 NR Description: F20N2.18 [Arabidopsis thaliana]
  misc_feature (44)..(149): Homolog of NCBI NO: 18405543 NR Description: Expressed protein
IIVSGLRRTPTLKSPAVNPPTLFTSVPRFFHSSSPRFSDSRIAMNSVEKTGSNTGAIENRASRIKEKLEKELEPVELVIEDVSYQHAGHAGMKGRGTDEETHFNVKIVSKGFEGMNLVKRHRLLYDLLREELDSGLHALSIVSKTPSESTR

SEQ ID NO: 80 - protein, 108 aa, Brassica napus
  peptide (1)..(108): Ceres Seq. ID no. 12556958
  misc_feature (24)..(106): Pfam Name: BolA-like protein Pfam Description: BolA-like protein
  misc_feature (1)..(51): Homolog of NCBI NO: 8778331 NR Description: F14J16.3 [Arabidopsis thaliana]
  misc_feature (6)..(105): Homolog of NCBI NO: 28393578 NR Description: unknown protein [Arabidopsis thaliana]
  misc_feature (6)..(105): Homolog of NCBI NO: 15236742 NR Description: putative protein
  misc_feature (1)..(79): Homolog of NCBI NO: 8778492 NR Description: F20N2.18 [Arabidopsis thaliana]
  misc_feature (1)..(106): Homolog of NCBI NO: 18405543 NR Description: Expressed protein
MNSVEKTGSNTGAIENRASRIKEKLEKELEPVELVIEDVSYQHAGHAGMKGRGTDEETHFNVKIVSKGFEGMNLVKRHRLLYDLLREELDSGLHALSIVSKTPSESTR

SEQ ID NO: 81 - DNA, 663 bp, Brassica napus
  misc_feature (1)..(663): Ceres Seq. ID no. 12557737
caaaaaattttttgcattagggttttcacttcggctgctgctagtgagtgagcaacgaatctttaaccccaaccatggcgacgaaacaagccaaagcgtccgtgcaatgcttcggaaggaagaagacggccgtcgccgtcacccactgcaagcccggctgcggtctgatcaagctcaacggctccccgatcgagctgttcaacccagagatcctccggttcaagatcttcgagccggtgctcctcctcggaaagcaccgtttcgccggcgtcgacatgaggatccgcgtcaacggcggtggtcacacttctcaggtctacgcgattcgtcagagcatagccaaggcgctcgtggctttctaccagaagtatgttgatgagcagtcgaagaaggaggtgaaggatattttgataaggtacgataggactctgctcgtggcggatccgaggaggtgcgagccgaanaagtttggtgggcgtggtgctcgttctcgtttccagaagagttaccgttaaaaacataatctggtttgtgttttttttttctgatctcaaccgttttgagacattatttatctttttgagttttgtctttttggttattggataatgttttgacaatgtcttgatcgtttattgttgaagaacttntcaagttttagtt

SEQ ID NO: 82 - protein, 146 aa, Brassica napus
  peptide (1)..(146): Ceres Seq. ID no. 12557738
  misc_feature (14)..(146): Pfam Name: Ribosomal protein S9/S16 Pfam Description: Ribosomal protein S9/S16
  misc_feature (1)..(146): Homolog of NCBI NO: 39850096 NR Description: Unknown (protein for IMAGE:6887619) [Rattus
  misc_feature (1)..(146): Homolog of NCBI NO: 4506691 NR Description: ribosomal protein S16; 40S ribosomal protein S16
  misc_feature (3)..(146): Homolog of NCBI NO: 1172818 NR Description: 40S RIBOSOMAL PROTEIN S16
  misc_feature (6)..(146): Homolog of NCBI NO: 17369864 NR Description: 40S ribosomal protein S16
  misc_feature (1)..(146): Homolog of NCBI NO: 1173209 NR Description: 40S RIBOSOMAL PROTEIN S16
  misc_feature (9)..(146): Homolog of NCBI NO: 6984222 NR Description: 40S ribosomal protein S16 [Euphorbia esula]
  misc_feature (1)..(146): Homolog of NCBI NO: 3122800 NR Description: 40S RIBOSOMAL PROTEIN S16
  misc_feature (1)..(146): Homolog of NCBI NO: 15229252 NR Description: putative 40S ribosomal protein S16; protein id:
  misc_feature (1)..(146): Homolog of NCBI NO: 15226676 NR Description: 40S ribosomal protein S16
  misc_feature (1)..(146): Homolog of NCBI NO: 15238809 NR Description: 40S RIBOSOMAL PROTEIN S16
  misc_feature (130)..(130): Xaa is any aa, unknown or other
MATKQAKASVQCFGRKKTAVAVTHCKPGCGLIKLNGSPIELFNPEILRFKIFEPVLLLGKHRFAGVDMRIRVNGGGHTSQVYAIRQSIAKALVAFYQKYVDEQSKKEVKDILIRYDRTLLVADPRRCEPXKFGGRGARSRFQKSYR

SEQ ID NO: 83 - protein, 124 aa, Brassica napus
  peptide (1)..(124): Ceres Seq. ID no. 12557739
KKFFALGFSLRLLLVSEQRIFNPNHGDETSQSVRAMLRKEEDGRRRHPLQARLRSDQAQRLPDRAVQPRDPPVQDLRAGAPPRKAPFRRRRHEDPRQRRWSHFSGLRDSSEHSQGARGFLPEVC

SEQ ID NO: 84 - protein, 89 aa, Brassica napus
  peptide (1)..(89): Ceres Seq. ID no. 12557740
MLRKEEDGRRRHPLQARLRSDQAQRLPDRAVQPRDPPVQDLRAGAPPRKAPFRRRRHEDPRQRRWSHFSGLRDSSEHSQGARGFLPEVC

SEQ ID NO: 85 - DNA, 852 bp, Brassica napus
  misc_feature (1)..(852): Ceres Seq. ID no. 13504265
atcatcatctctctatcaacaatagcgattcgttccgtagccagcagaaaaaccctagcgggcctaaaggagacatcttcgaggcttcttggtctccgatcaatccagaccttcacgcttcctgatctcccctatgattacagcgccttggagccggcgatcagcggcgagatcatgcagatccatcaccagaagcatcaccaggcgtacgtcactaattacaacaatgccctcgagcagctggatcaggccgtcaacaagggagacgcttccggcgtcgttaagttgcagagcgccatcaagttcaacggcggaggtcatgtgaaccactctattttctggaagaatcttgctcctgtcaaggaaggtgggggagagccaccaaagggagctcttggctacgccattgacactcattttggctcccttgaaggtttggtgaagaagatgagtgctgaaggtgctgctctgcaagggtcaggatgggtgtggctcggtttagacaaagagcttaagaagcttgtggttgacacaaccgccaatcaggatccacttgtgacaaaaggaggaagcttggttcctctggtgggtattgatgtttgggagcacgcctactatttacagtacaagaatgtgaggccggagtatttgaagaacgtgtggaaagtggtcaactggaaatatgcaagcgaagtttataaggagtgcaagtgagttcgttacataaagagaggaaccagttcccagctcggctttgtttttataagtttgtttgaaacaaacgtataatgtctctttggtctttgagttagctcgaaatgaccatgtggttgcaataatacacgttgtttt

SEQ ID NO: 86 - protein, 237 aa, Brassica napus
  peptide (1)..(237): Ceres Seq. ID no. 13504266
  misc_feature (19)..(227): Homolog of NCBI NO: 30841303 NR Description: manganese-containing superoxide dismutase [Homo
  misc_feature (8)..(236): Homolog of NCBI NO: 3915002 NR Description: Superoxide dismutase [Mn], mitochondrial
  misc_feature (9)..(236): Homolog of NCBI NO: 9929159 NR Description: manganese superoxide dismutase [Digitalis lanata]
  misc_feature (8)..(236): Homolog of NCBI NO: 464775 NR Description: Superoxide dismutase [Mn], mitochondrial
  misc_feature (8)..(236): Homolog of NCBI NO: 134672 NR Description: Superoxide dismutase [Mn], mitochondrial
  misc_feature (8)..(235): Homolog of NCBI NO: 11256334 NR Description: superoxide dismutase (EC 1.15.1.1) (Mn)
  misc_feature (8)..(235): Homolog of NCBI NO: 21553457 NR Description: putative (Mn) superoxide dismutase [Arabidopsis
  misc_feature (8)..(235): Homolog of NCBI NO: 15228407 NR Description: manganese superoxide dismutase (MSD1)
  misc_feature (8)..(237): Homolog of NCBI NO: 15778185 NR Description: superoxide dismutase [Raphanus sativus]
  misc_feature (8)..(237): Homolog of NCBI NO: 7433350 NR Description: superoxide dismutase (EC 1.15.1.1) (Mn) - radish
IIISLSTIAIRSVASRKTLAGLKETSSRLLGLRSIQTFTLPDLPYDYSALEPAISGEIMQIHHQKHHQAYVTNYNNALEQLDQAVNKGDASGVVKLQSAIKFNGGGHVNHSIFWKNLAPVKEGGGEPPKGALGYAIDTHFGSLEGLVKKMSAEGAALQGSGWVWLGLDKELKKLVVDTTANQDPLVTKGGSLVPLVGIDVWEHAYYLQYKNVRPEYLKNVWKVVNWKYASEVYKECK

SEQ ID NO: 87 - protein, 179 aa, Brassica napus
  peptide (1)..(179): Ceres Seq. ID no. 13504267
  misc_feature (1)..(179): Homolog of NCBI NO: 15778185 NR Description: superoxide dismutase [Raphanus sativus]
  misc_feature (1)..(179): Homolog of NCBI NO: 7433350 NR Description: superoxide dismutase (EC 1.15.1.1) (Mn) - radish
  misc_feature (1)..(169): Homolog of NCBI NO: 30841303 NR Description: manganese-containing superoxide dismutase [Homo
  misc_feature (1)..(178): Homolog of NCBI NO: 3915002 NR Description: Superoxide dismutase [Mn], mitochondrial
  misc_feature (1)..(178): Homolog of NCBI NO: 9929159 NR Description: manganese superoxide dismutase [Digitalis lanata]
  misc_feature (1)..(178): Homolog of NCBI NO: 464775 NR Description: Superoxide dismutase [Mn], mitochondrial
  misc_feature (1)..(178): Homolog of NCBI NO: 134672 NR Description: Superoxide dismutase [Mn], mitochondrial
  misc_feature (1)..(177): Homolog of NCBI NO: 11256334 NR Description: superoxide dismutase (EC 1.15.1.1) (Mn)
  misc_feature (1)..(177): Homolog of NCBI NO: 21553457 NR Description: putative (Mn) superoxide dismutase [Arabidopsis
  misc_feature (1)..(177): Homolog of NCBI NO: 15228407 NR Description: manganese superoxide dismutase (MSD1)
MQIHHQKHHQAYVTNYNNALEQLDQAVNKGDASGVVKLQSAIKFNGGGHVNHSIFWKNLAPVKEGGGEPPKGALGYAIDTHFGSLEGLVKKMSAEGAALQGSGWVWLGLDKELKKLVVDTTANQDPLVTKGGSLVPLVGIDVWEHAYYLQYKNVRPEYLKNVWKVVNWKYASEVYKECK

SEQ ID NO: 88 - DNA, 1091 bp, Brassica napus
  misc_feature (1)..(1091): Ceres Seq. ID no. 12474685
gcacttgaaccgacactatacaagcgatcttaatctgaagcctctctaataatggccgaacgcactcagatacttcgagctcaacaccggcgctaagatcccatcggtgggtctcggaacatggcaagcctctccaggacttgtaggtgatgctgtcgccgccgctgttaagatcggatatcgtcatattgattgtgctcagatctacggcaacgagaaagagatagggacagttttgaaaaaattgtttgaagacaatgtagtgaaacgcgaggagttgttcatcacttccaaactatggtgtactgatcatgaccctcaggatgtgccagaggcactaaagagaaccctacaggatctacagcttgactatgtcgatctctatttgatgcactgacctgtaaggatgaagaaaggttctgttggagctaagccagagaaccttttacctgtagatattcctagcacatggaaagcaatggaagcactccatgattcgggcaaggcacgagccataggtgtaagcaatttctcaaccaagaagctagctgatcttatggagttagctcgtgttcctcctgccgttgttcaggtcgaatgtcatccttcttggcgacagantaagctacgagagttctgtaagtccaaaggacttcacctcaccgcatactcgcctttgggttctccaggaacaacgtggctaaagagtgatgttttgaagaaccctatactaaatactgttgctaagaaactcgggaagtntgctgcgcaagttgcgcttcgctggggactccaaatgggtaacagtgtacttcccaagagtactaatgaaggaagaattagagagaactttgaagttttcgactggtcaatacccgatgacttgttttccaagtttcctgagattgaacaggctaggttattgactgctcccttctttgttcatgagacattgagcccttacaagtctctcgaagagttgtgggatggcgaaatatgatatttcaactgatccaattgttttgtcaataataggaggttactctctgcctgttgaacttgacattttatctataaaaatgatgcctctc

SEQ ID NO: 89 - protein, 197 aa, Brassica napus
  peptide (1)..(197): Ceres Seq. ID no. 12474686
  misc_feature (1)..(197): Homolog of NCBI NO: 7431112 NR Description: abscisic acid activated protein - alfalfa
  misc_feature (1)..(197): Homolog of NCBI NO: 13160399 NR Description: aldose reductase [Digitalis purpurea]
  misc_feature (1)..(197): Homolog of NCBI NO: 13160397 NR Description: aldose reductase [Digitalis purpurea]
  misc_feature (1)..(197): Homolog of NCBI NO: 15232354 NR Description: aldo/keto reductase family
  misc_feature (169)..(197): Homolog of NCBI NO: 25283479 NR Description: probable alcohol dehydrogenase [imported] -
  misc_feature (1)..(170): Homolog of NCBI NO: 25283479 NR Description: probable alcohol dehydrogenase [imported] -
  misc_feature (1)..(197): Homolog of NCBI NO: 30687261 NR Description: aldo/keto reductase family [Arabidopsis thaliana]
  misc_feature (1)..(171): Homolog of NCBI NO: 7431114 NR Description: aldehyde dehydrogenase homolog At2g37770 -
  misc_feature (1)..(197): Homolog of NCBI NO: 28393400 NR Description: putative aldo/keto reductase [Arabidopsis
  misc_feature (1)..(197): Homolog of NCBI NO: 30687247 NR Description: aldo/keto reductase family [Arabidopsis thaliana]
  misc_feature (72)..(72): Xaa is any aa, unknown or other
  misc_feature (119)..(119): Xaa is any aa, unknown or other
MKKGSVGAKPENLLPVDIPSTWKAMEALHDSGKARAIGVSNFSTKKLADLMELARVPPAVVQVECHPSWRQXKLREFCKSKGLHLTAYSPLGSPGTTWLKSDVLKNPILNTVAKKLGKXAAQVALRWGLQMGNSVLPKSTNEGRIRENFEVFDWSIPDDLFSKFPEIEQARLLTAPFFVHETLSPYKSLEELWDGEI

SEQ ID NO: 90 - protein, 173 aa, Brassica napus
  peptide (1)..(173): Ceres Seq. ID no. 12474687
  misc_feature (1)..(173): Homolog of NCBI NO: 7431112 NR Description: abscisic acid activated protein - alfalfa
  misc_feature (1)..(173): Homolog of NCBI NO: 13160399 NR Description: aldose reductase [Digitalis purpurea]
  misc_feature (1)..(173): Homolog of NCBI NO: 13160397 NR Description: aldose reductase [Digitalis purpurea]
  misc_feature (1)..(173): Homolog of NCBI NO: 15232354 NR Description: aldo/keto reductase family
  misc_feature (145)..(173): Homolog of NCBI NO: 25283479 NR Description: probable alcohol dehydrogenase [imported] -
  misc_feature (1)..(146): Homolog of NCBI NO: 25283479 NR Description: probable alcohol dehydrogenase [imported] -
  misc_feature (1)..(173): Homolog of NCBI NO: 30687261 NR Description: aldo/keto reductase family [Arabidopsis thaliana]
  misc_feature (1)..(147): Homolog of NCBI NO: 7431114 NR Description: aldehyde dehydrogenase homolog At2g37770 -
  misc_feature (1)..(173): Homolog of NCBI NO: 28393400 NR Description: putative aldo/keto reductase [Arabidopsis
  misc_feature (1)..(173): Homolog of NCBI NO: 30687247 NR Description: aldo/keto reductase family [Arabidopsis thaliana]
  misc_feature (48)..(48): Xaa is any aa, unknown or other
  misc_feature (95)..(95): Xaa is any aa, unknown or other
MEALHDSGKARAIGVSNFSTKKLADLMELARVPPAVVQVECHPSWRQXKLREFCKSKGLHLTAYSPLGSPGTTWLKSDVLKNPILNTVAKKLGKXAAQVALRWGLQMGNSVLPKSTNEGRIRENFEVFDWSIPDDLFSKFPEIEQARLLTAPFFVHETLSPYKSLEELWDGEI

SEQ ID NO: 91 - protein, 147 aa, Brassica napus
  peptide (1)..(147): Ceres Seq. ID no. 12474688
  misc_feature (1)..(147): Homolog of NCBI NO: 7431112 NR Description: abscisic acid activated protein - alfalfa
  misc_feature (1)..(147): Homolog of NCBI NO: 13160399 NR Description: aldose reductase [Digitalis purpurea]
  misc_feature (1)..(147): Homolog of NCBI NO: 13160397 NR Description: aldose reductase [Digitalis purpurea]
  misc_feature (1)..(147): Homolog of NCBI NO: 15232354 NR Description: aldo/keto reductase family
  misc_feature (119)..(147): Homolog of NCBI NO: 25283479 NR Description: probable alcohol dehydrogenase [imported] -
  misc_feature (1)..(120): Homolog of NCBI NO: 25283479 NR Description: probable alcohol dehydrogenase [imported] -
  misc_feature (1)..(147): Homolog of NCBI NO: 30687261 NR Description: aldo/keto reductase family [Arabidopsis thaliana]
  misc_feature (1)..(121): Homolog of NCBI NO: 7431114 NR Description: aldehyde dehydrogenase homolog At2g37770 -
  misc_feature (1)..(147): Homolog of NCBI NO: 28393400 NR Description: putative aldo/keto reductase [Arabidopsis
  misc_feature (1)..(147): Homolog of NCBI NO: 30687247 NR Description: aldo/keto reductase family [Arabidopsis thaliana]
  misc_feature (22)..(22): Xaa is any aa, unknown or other
  misc_feature (69)..(69): Xaa is any aa, unknown or other
MELARVPPAVVQVECHPSWRQXKLREFCKSKGLHLTAYSPLGSPGTTWLKSDVLKNPILNTVAKKLGKXAAQVALRWGLQMGNSVLPKSTNEGRIRENFEVFDWSIPDDLFSKFPEIEQARLLTAPFFVHETLSPYKSLEELWDGEI

SEQ ID NO: 92 - DNA, 1008 bp, Brassica napus
  misc_feature (1)..(1008): Ceres Seq. ID no. 12557432
aagcaaaagaaaagtttctgagctgctctcctctgtataaacccttttccaaacaagagcagcagagaagaagaagaagaaagctaaaatgttcaggaatcagtacgacacagatgtgacgacatggagcccaacaggccgtctcttccaagtggagtacgccatggaagcagtcaagcaaggctccgccgcaatcgggctcagatctcgctcccatgtcgtcctcgcctgcgtcaacaaggcccaatccgagctctcctctcaccagaagaagatcttcaaagtcgatgaccatataggcgtcgcgatcgctgggctcaccgccgatggccgtgtcctctctcgttatatgagatcggaggctatcaaccactccttcacctatgagtctccgctccccgttggacgcctcgtcgttcacctcgctgataaggcccaggtctgtacccaacgatcatggaagcggccatatggcgtgggtcttttggtaggtggactggatgagtctggagcccatctttactncaactgcccaagcggaaactactttgagtatcaagctttcgctattgggtcccgttcacaagccgcaaagacctatntggagcgtaggtttgagagctttggggattcttccagagaagatntgataaaagatgctattctggctgtgagggagacactgcaaggagaaacacttaagagttctctctgcacggtctctgttctaggtgtcggtgagccgttccacttcttggaccaggaaactatacagaaagtgattgacacatttgagaaagtaccagaggatgaggctggtgaggctggtgaggctggtgagggtgaggctgaagctgctgctgctgctgcaccagcagaacagggtggtggtggtgcaggtgaccaagacgtggctccgatggaaatgtaaggcgtgtgcaacgctagaactgttttaattgaatgtttgttggatttactttggataatttcatatgaatcatttgc

SEQ ID NO: 93 - protein, 280 aa, Brassica napus
  peptide (1)..(280): Ceres Seq. ID no. 12557433
  misc_feature (29)..(214): Pfam Name: Proteasome A-type and B-type Pfam Description: Proteasome A-type and B-type
  misc_feature (1)..(257): Homolog of NCBI NO: 30584967 NR Description: Homo sapiens proteasome (prosome, macropain)
  misc_feature (1)..(236): Homolog of NCBI NO: 12229911 NR Description: Proteasome subunit alpha type 1 (Proteasome
  misc_feature (6)..(162): Homolog of NCBI NO: 14594923 NR Description: putative alpha6 proteasome subunit [Nicotiana
  misc_feature (1)..(264): Homolog of NCBI NO: 1709758 NR Description: Proteasome subunit alpha type 1 (20S proteasome subunit F) (20S proteasome subunit alpha-6) (Proteasome component
  misc_feature (1)..(280): Homolog of NCBI NO: 22947842 NR Description: 20S proteasome alpha 6 subunit [Nicotiana
  misc_feature (11)..(280): Homolog of NCBI NO: 2511586 NR Description: multicatalytic endopeptidase [Arabidopsis
  misc_feature (1)..(280): Homolog of NCBI NO: 15220151 NR Description: 20S proteasome alpha subunit F2 (PAF2)
  misc_feature (1)..(280): Homolog of NCBI NO: 15239061 NR Description: 20S proteasome alpha subunit F1 (PAF1)
  misc_feature (1)..(280): Homolog of NCBI NO: 21537234 NR Description: 20S proteasome subunit PAF1 [Arabidopsis thaliana]
  misc_feature (1)..(280): Homolog of NCBI NO: 25290066 NR Description: C 3.4.25.1 proteasome endopeptidase complex ()
  misc_feature (146)..(146): Xaa is any aa, unknown or other
  misc_feature (172)..(172): Xaa is any aa, unknown or other
  misc_feature (187)..(187): Xaa is any aa, unknown or other
MFRNQYDTDVTTWSPTGRLFQVEYAMEAVKQGSAAIGLRSRSHVVLACVNKAQSELSSHQKKIFKVDDHIGVAIAGLTADGRVLSRYMRSEAINHSFTYESPLPVGRLVVHLADKAQVCTQRSWKRPYGVGLLVGGLDESGAHLYXNCPSGNYFEYQAFAIGSRSQAAKTYXERRFESFGDSSREDXIKDAILAVRETLQGETLKSSLCTVSVLGVGEPFHFLDQETIQKVIDTFEKVPEDEAGEAGEAGEGEAEAAAAAAPAEQGGGGAGDQDVAPMEM

SEQ ID NO: 94 - protein, 255 aa, Brassica napus
  peptide (1)..(255): Ceres Seq. ID no. 12557434
  misc_feature (4)..(189): Pfam Name: Proteasome A-type and B-type Pfam Description: Proteasome A-type and B-type
  misc_feature (1)..(232): Homolog of NCBI NO: 30584967 NR Description: Homo sapiens proteasome (prosome, macropain)
  misc_feature (1)..(211): Homolog of NCBI NO: 12229911 NR Description: Proteasome subunit alpha type 1 (Proteasome
  misc_feature (1)..(137): Homolog of NCBI NO: 14594923 NR Description: putative alpha6 proteasome subunit [Nicotiana
  misc_feature (1)..(239): Homolog of NCBI NO: 1709758 NR Description: Proteasome subunit alpha type 1 (20S proteasome subunit F) (20S proteasome subunit alpha-6) (Proteasome component
  misc_feature (1)..(255): Homolog of NCBI NO: 22947842 NR Description: 20S proteasome alpha 6 subunit [Nicotiana
  misc_feature (1)..(255): Homolog of NCBI NO: 2511586 NR Description: multicatalytic endopeptidase [Arabidopsis
  misc_feature (1)..(255): Homolog of NCBI NO: 15220151 NR Description: 20S proteasome alpha subunit F2 (PAF2)
  misc_feature (1)..(255): Homolog of NCBI NO: 15239061 NR Description: 20S proteasome alpha subunit F1 (PAF1)
  misc_feature (1)..(255): Homolog of NCBI NO: 21537234 NR Description: 20S proteasome subunit PAF1 [Arabidopsis thaliana]
  misc_feature (1)..(255): Homolog of NCBI NO: 25290066 NR Description: C 3.4.25.1 proteasome endopeptidase complex ()
  misc_feature (121)..(121): Xaa is any aa, unknown or other
  misc_feature (147)..(147): Xaa is any aa, unknown or other
  misc_feature (162)..(162): Xaa is any aa, unknown or other
MEAVKQGSAAIGLRSRSHVVLACVNKAQSELSSHQKKIFKVDDHIGVAIAGLTADGRVLSRYMRSEAINHSFTYESPLPVGRLVVHLADKAQVCTQRSWKRPYGVGLLVGGLDESGAHLYXNCPSGNYFEYQAFAIGSRSQAAKTYXERRFESFGDSSREDXIKDAILAVRETLQGETLKSSLCTVSVLGVGEPFHFLDQETIQKVIDTFEKVPEDEAGEAGEAGEGEAEAAAAAAPAEQGGGGAGDQDVAPMEM

SEQ ID NO: 95 - protein, 193 aa, Brassica napus
  peptide (1)..(193): Ceres Seq. ID no. 12557435
  misc_feature (1)..(127): Pfam Name: Proteasome A-type and B-type Pfam Description: Proteasome A-type and B-type
  misc_feature (1)..(170): Homolog of NCBI NO: 30584967 NR Description: Homo sapiens proteasome (prosome, macropain)
  misc_feature (1)..(149): Homolog of NCBI NO: 12229911 NR Description: Proteasome subunit alpha type 1 (Proteasome
  misc_feature (1)..(75): Homolog of NCBI NO: 14594923 NR Description: putative alpha6 proteasome subunit [Nicotiana
  misc_feature (1)..(177): Homolog of NCBI NO: 1709758 NR Description: Proteasome subunit alpha type 1 (20S proteasome subunit F) (20S proteasome subunit alpha-6) (Proteasome component
  misc_feature (1)..(193): Homolog of NCBI NO: 22947842 NR Description: 20S proteasome alpha 6 subunit [Nicotiana
  misc_feature (1)..(193): Homolog of NCBI NO: 2511586 NR Description: multicatalytic endopeptidase [Arabidopsis
  misc_feature (1)..(193): Homolog of NCBI NO: 15220151 NR Description: 20S proteasome alpha subunit F2 (PAF2)
  misc_feature (1)..(193): Homolog of NCBI NO: 15239061 NR Description: 20S proteasome alpha subunit F1 (PAF1)
  misc_feature (1)..(193): Homolog of NCBI NO: 21537234 NR Description: 20S proteasome subunit PAF1 [Arabidopsis thaliana]
  misc_feature (1)..(193): Homolog of NCBI NO: 25290066 NR Description: C 3.4.25.1 proteasome endopeptidase complex ()
  misc_feature (59)..(59): Xaa is any aa, unknown or other
  misc_feature (85)..(85): Xaa is any aa, unknown or other
  misc_feature (100)..(100): Xaa is any aa, unknown or other
MRSEAINHSFTYESPLPVGRLVVHLADKAQVCTQRSWKRPYGVGLLVGGLDESGAHLYXNCPSGNYFEYQAFAIGSRSQAAKTYXERRFESFGDSSREDXIKDAILAVRETLQGETLKSSLCTVSVLGVGEPFHFLDQETIQKVIDTFEKVPEDEAGEAGEAGEGEAEAAAAAAPAEQGGGGAGDQDVAPMEM

SEQ ID NO: 96 - DNA, 960 bp, Brassica napus
  misc_feature (1)..(960): Ceres Seq. ID no. 12474478
  misc_feature (887)..(887): n is a, c, t, g, unknown, or other
attaacttttcaactaactccagcttttgctctagattttttttttatgtatctggaacattccttaatcctccctctctataaatccctgaacccttttgctgctactctcactcatagctgttaaaggaacctaaaatggcgaaagttttagatctttctctggttctctttgttctgtgtgtgtccactgcagcaatagccatggcaagaaaccttggagaggaatctagtgatgatactgagttcatcaaatcctcttgtgagatagcaacgtacccggaactatgttttcagtctctgtcttcttacgcaagcgagatcaagaagcggccacttcagctcgccgagacagcgcttgccgttagcatggcccgaacgaagtcagccaaaacatatatctcggacatgactgactacaaaggaatcncaaagaggcagcacgaggccgtgttggactgtgttgaanagatgggagatactgttgataggttgagcaagtcgctgaaggagttgaagaatctggaggaaggagagagcaaagaagacttctggttctgtttgagcaatgtccggacgtggacaagcgcggcgctgacagatgagaccacgtgtcttgatgggtttggagggaaaggcatggatggggagctgaaaagcttagtcaaagcacacattgtgcgtgtggcgcaanatacgagtaatgccttggctttgatcaatgtctatgcttccaagcattgaatatattgcaacggtttggtcatgaggacttgagctttttatacttttggatttggtttgtattgtgttttcaagaaatgtgttttggtttggttntgagtcatatcagtttctcttgccacattgttatatcatctacggtntatatagtttgaagcttttcattttgatgtttgattagtgatatagttttgtaagccatgaagagtattttgc

SEQ ID NO: 97 - protein, 201 aa, Brassica napus
  peptide (1)..(201): Ceres Seq. ID no. 12474479
  misc_feature (5)..(200): Homolog of NCBI NO: 21618013 NR Description: putative ripening-related protein [Arabidopsis
  misc_feature (5)..(200): Homolog of NCBI NO: 18407657 NR Description: expressed protein
  misc_feature (1)..(201): Homolog of NCBI NO: 21555297 NR Description: unknown [Arabidopsis thaliana]
  misc_feature (1)..(201): Homolog of NCBI NO: 15234547 NR Description: putative protein
  misc_feature (31)..(201): Homolog of NCBI NO: 7488727 NR Description: 21K protein precursor - alfalfa
  misc_feature (1)..(201): Homolog of NCBI NO: 21618088 NR Description: ripening-related protein-like [Arabidopsis
  misc_feature (1)..(201): Homolog of NCBI NO: 15241799 NR Description: ripening-related protein - like
  misc_feature (10)..(201): Homolog of NCBI NO: 7406663 NR Description: putative ripening-related protein [Vitis vinifera]
  misc_feature (36)..(201): Homolog of NCBI NO: 112717 NR Description: 21 KD PROTEIN PRECURSOR (1.2 PROTEIN)
  misc_feature (1)..(201): Homolog of NCBI NO: 15234982 NR Description: putative protein
  misc_feature (98)..(98): Xaa is any aa, unknown or other
  misc_feature (111)..(111): Xaa is any aa, unknown or other
  misc_feature (186)..(186): Xaa is any aa, unknown or other
MAKVLDLSLVLFVLCVSTAAIAMARNLGEESSDDTEFIKSSCEIATYPELCFQSLSSYASEIKKRPLQLAETALAVSMARTKSAKTYISDMTDYKGIXKRQHEAVLDCVEXMGDTVDRLSKSLKELKNLEEGESKEDFWFCLSNVRTWTSAALTDETTCLDGFGGKGMDGELKSLVKAHIVRVAQXTSNALALINVYASKH

SEQ ID NO: 98 - protein, 179 aa, Brassica napus
  peptide (1)..(179): Ceres Seq. ID no. 12474480
  misc_feature (1)..(178): Homolog of NCBI NO: 21618013 NR Description: putative ripening-related protein [Arabidopsis
  misc_feature (1)..(178): Homolog of NCBI NO: 18407657 NR Description: expressed protein
  misc_feature (1)..(179): Homolog of NCBI NO: 21555297 NR Description: unknown [Arabidopsis thaliana]
  misc_feature (1)..(179): Homolog of NCBI NO: 15234547 NR Description: putative protein
  misc_feature (9)..(179): Homolog of NCBI NO: 7488727 NR Description: 21K protein precursor - alfalfa
  misc_feature (1)..(179): Homolog of NCBI NO: 21618088 NR Description: ripening-related protein-like [Arabidopsis
  misc_feature (1)..(179): Homolog of NCBI NO: 15241799 NR Description: ripening-related protein - like
  misc_feature (1)..(179): Homolog of NCBI NO: 7406663 NR Description: putative ripening-related protein [Vitis vinifera]
  misc_feature (14)..(179): Homolog of NCBI NO: 112717 NR Description: 21 KD PROTEIN PRECURSOR (1.2 PROTEIN)
  misc_feature (1)..(179): Homolog of NCBI NO: 15234982 NR Description: putative protein
  misc_feature (76)..(76): Xaa is any aa, unknown or other
  misc_feature (89)..(89): Xaa is any aa, unknown or other
  misc_feature (164)..(164): Xaa is any aa, unknown or other
MARNLGEESSDDTEFIKSSCEIATYPELCFQSLSSYASEIKKRPLQLAETALAVSMARTKSAKTYISDMTDYKGIXKRQHEAVLDCVEXMGDTVDRLSKSLKELKNLEEGESKEDFWFCLSNVRTWTSAALTDETTCLDGFGGKGMDGELKSLVKAHIVRVAQXTSNALALINVYASKH

SEQ ID NO: 99 - protein, 124 aa, Brassica napus
  peptide (1)..(124): Ceres Seq. ID no. 12474481
  misc_feature (1)..(124): Homolog of NCBI NO: 7406663 NR Description: putative ripening-related protein [Vitis vinifera]
  misc_feature (1)..(124): Homolog of NCBI NO: 112717 NR Description: 21 KD PROTEIN PRECURSOR (1.2 PROTEIN)
  misc_feature (1)..(124): Homolog of NCBI NO: 15234982 NR Description: putative protein
  misc_feature (1)..(123): Homolog of NCBI NO: 21618013 NR Description: putative ripening-related protein [Arabidopsis
  misc_feature (1)..(123): Homolog of NCBI NO: 18407657 NR Description: expressed protein
  misc_feature (1)..(124): Homolog of NCBI NO: 21555297 NR Description: unknown [Arabidopsis thaliana]
  misc_feature (1)..(124): Homolog of NCBI NO: 15234547 NR Description: putative protein
  misc_feature (1)..(124): Homolog of NCBI NO: 7488727 NR Description: 21K protein precursor - alfalfa
  misc_feature (1)..(124): Homolog of NCBI NO: 21618088 NR Description: ripening-related protein-like [Arabidopsis
  misc_feature (1)..(124): Homolog of NCBI NO: 15241799 NR Description: ripening-related protein - like
  misc_feature (21)..(21): Xaa is any aa, unknown or other
  misc_feature (34)..(34): Xaa is any aa, unknown or other
  misc_feature (109)..(109): Xaa is any aa, unknown or other
MARTKSAKTYISDMTDYKGIXKRQHEAVLDCVEXMGDTVDRLSKSLKELKNLEEGESKEDFWFCLSNVRTWTSAALTDETTCLDGFGGKGMDGELKSLVKAHIVRVAQXTSNALALINVYASKH

SEQ ID NO: 100 - DNA, 814 bp, Brassica napus
  misc_feature (1)..(814): Ceres Seq. ID no. 13504237
gaagcttttttttatctctctctccgccgtcactctcacctgcggcgaggcttaacgatctcagccatggccgccgccgtagaaatcgacgcagagatccagcagcagcttaccaacgaggtcaagctcttcaaccgctggacctacgatgacgtctcggttgcagatatcagtcttgttgactacattggagttcaagcagccaaacacgccacctttgtcccccacactgcaggaagatactctgtgaagagattcaggaaggctcagtgcccaattgttgagaggctcacaaactctctcatgatgcacggaagaaacaatggaaagaagttgatggcggtgaggatcatcaagcacgccatggagatcatccacctcttgactgacgccaacccgattcagatcatcatcgatgccattgtcaacagtggtccacgtgaagatgccaccagaattggatctgctggtgtcgttaggagacaagctgttgatatctctcctttgagacgtgttaaccaggcgatcttcttgctcacaaccggtgctcgtgaggctgctttcagaaacattaagactattgctgagtgccttgctgatgagttaatcaacgcagccaagggctcgtccaacagctatgccatcaaaaagaaggatgagattgagagagttgccaaggctaatcgttaagggaaagtcttcttttaccctgatggttgttacaatcttatcaatgaaatttatgttttgtttcgactaagattgggaatatgtaacagatgttttgctcttttcgtcttangaaagnttattt

SEQ ID NO: 101 - protein, 229 aa, Brassica napus
  peptide (1)..(229): Ceres Seq. ID no. 13504238
  misc_feature (76)..(229): Pfam Name: Ribosomal protein S7p/S5e Pfam Description: Ribosomal protein S7p/S5e
  misc_feature (38)..(229): Homolog of NCBI NO: 15294021 NR Description: 40S ribosomal protein S5 [Ictalurus punctatus]
  misc_feature (38)..(229): Homolog of NCBI NO: 34854534 NR Description: similar to ribosomal protein S5; 40S ribosomal
  misc_feature (38)..(229): Homolog of NCBI NO: 13904870 NR Description: ribosomal protein S5; 40S ribosomal protein S5
  misc_feature (38)..(229): Homolog of NCBI NO: 3717978 NR Description: 5S ribosomal protein [Mus musculus]
  misc_feature (23)..(229): Homolog of NCBI NO: 40748265 NR Description: 40S ribosomal protein S5 [Capsicum annuum]
  misc_feature (31)..(229): Homolog of NCBI NO: 34893994 NR Description: putative 40S ribosomal protein S5
  misc_feature (40)..(229): Homolog of NCBI NO: 6831665 NR Description: 40S RIBOSOMAL PROTEIN S5
  misc_feature (23)..(229): Homolog of NCBI NO: 21617886 NR Description: 40S ribosomal protein S5 [Arabidopsis thaliana]
  misc_feature (23)..(229): Homolog of NCBI NO: 15229897 NR Description: 40S ribosomal protein S5 (RPS5B) [Arabidopsis
  misc_feature (23)..(229): Homolog of NCBI NO: 15228111 NR Description: 40S ribosomal protein S5 (RPS5A) [Arabidopsis
EAFFYLSLRRHSHLRRGLTISAMAAAVEIDAEIQQQLTNEVKLFNRWTYDDVSVADISLVDYIGVQAAKHATFVPHTAGRYSVKRFRKAQCPIVERLTNSLMMHGRNNGKKLMAVRIIKHAMEIIHLLTDANPIQIIIDAIVNSGPREDATRIGSAGVVRRQAVDISPLRRVNQAIFLLTTGAREAAFRNIKTIAECLADELINAAKGSSNSYAIKKKDEIERVAKANR

SEQ ID NO: 102 - protein, 207 aa, Brassica napus
  peptide (1)..(207): Ceres Seq. ID no. 13504239
  misc_feature (54)..(207): Pfam Name: Ribosomal protein S7p/S5e Pfam Description: Ribosomal protein S7p/S5e
  misc_feature (16)..(207): Homolog of NCBI NO: 15294021 NR Description: 40S ribosomal protein S5 [Ictalurus punctatus]
  misc_feature (16)..(207): Homolog of NCBI NO: 34854534 NR Description: similar to ribosomal protein S5; 40S ribosomal
  misc_feature (16)..(207): Homolog of NCBI NO: 13904870 NR Description: ribosomal protein S5; 40S ribosomal protein S5
  misc_feature (16)..(207): Homolog of NCBI NO: 3717978 NR Description: 5S ribosomal protein [Mus musculus]
  misc_feature (1)..(207): Homolog of NCBI NO: 40748265 NR Description: 40S ribosomal protein S5 [Capsicum annuum]
  misc_feature (9)..(207): Homolog of NCBI NO: 34893994 NR Description: putative 40S ribosomal protein S5
  misc_feature (18)..(207): Homolog of NCBI NO: 6831665 NR Description: 40S RIBOSOMAL PROTEIN S5
  misc_feature (1)..(207): Homolog of NCBI NO: 21617886 NR Description: 40S ribosomal protein S5 [Arabidopsis thaliana]
  misc_feature (1)..(207): Homolog of NCBI NO: 15229897 NR Description: 40S ribosomal protein S5 (RPS5B) [Arabidopsis
  misc_feature (1)..(207): Homolog of NCBI NO: 15228111 NR Description: 40S ribosomal protein S5 (RPS5A) [Arabidopsis
MAAAVEIDAEIQQQLTNEVKLFNRWTYDDVSVADISLVDYIGVQAAKHATFVPHTAGRYSVKRFRKAQCPIVERLTNSLMMHGRNNGKKLMAVRIIKHAMEIIHLLTDANPIQIIIDAIVNSGPREDATRIGSAGVVRRQAVDISPLRRVNQAIFLLTTGAREAAFRNIKTIAECLADELINAAKGSSNSYAIKKKDEIERVAKANR

SEQ ID NO: 103 - protein, 128 aa, Brassica napus
  peptide (1)..(128): Ceres Seq. ID no. 13504240
  misc_feature (1)..(128): Pfam Name: Ribosomal protein S7p/S5e Pfam Description: Ribosomal protein S7p/S5e
  misc_feature (1)..(128): Homolog of NCBI NO: 15294021 NR Description: 40S ribosomal protein S5 [Ictalurus punctatus]
  misc_feature (1)..(128): Homolog of NCBI NO: 34854534 NR Description: similar to ribosomal protein S5; 40S ribosomal
  misc_feature (1)..(128): Homolog of NCBI NO: 13904870 NR Description: ribosomal protein S5; 40S ribosomal protein S5
  misc_feature (1)..(128): Homolog of NCBI NO: 3717978 NR Description: 5S ribosomal protein [Mus musculus]
  misc_feature (1)..(128): Homolog of NCBI NO: 40748265 NR Description: 40S ribosomal protein S5 [Capsicum annuum]
  misc_feature (1)..(128): Homolog of NCBI NO: 34893994 NR Description: putative 40S ribosomal protein S5
  misc_feature (1)..(128): Homolog of NCBI NO: 6831665 NR Description: 40S RIBOSOMAL PROTEIN S5
  misc_feature (1)..(128): Homolog of NCBI NO: 21617886 NR Description: 40S ribosomal protein S5 [Arabidopsis thaliana]
  misc_feature (1)..(128): Homolog of NCBI NO: 15229897 NR Description: 40S ribosomal protein S5 (RPS5B) [Arabidopsis
  misc_feature (1)..(128): Homolog of NCBI NO: 15228111 NR Description: 40S ribosomal protein S5 (RPS5A) [Arabidopsis
MMHGRNNGKKLMAVRIIKHAMEIIHLLTDANPIQIIIDAIVNSGPREDATRIGSAGVVRRQAVDISPLRRVNQAIFLLTTGAREAAFRNIKTIAECLADELINAAKGSSNSYAIKKKDEIERVAKANR

SEQ ID NO: 104 - DNA, 804 bp, Brassica napus
  misc_feature (1)..(804): Ceres Seq. ID no. 12473409
caccacactctctcttccacagtttcgttatctagatattattttaggaggatctctctctgcttctctccatctctctcttagccatggctgctttcacttgtacctctcgtcctcctgttcccctccgttcggagtcgagaatcgcatcctctccatccgcttcactctctgctcggcggatgttcgccgtctcgcctgactcagcaggattgagaatccgtctttcccagtcttcgtccttgttgacctcgaaggttcctcgaccacgaagaggcatcgtctgtgaggctcaggaaaccactacagatatagtttcaatagtcaacgacacaacatgggactctctagttctcaaggcggacgggcctgttcttgtcgacttttgggctccatggtgtggactttgcaaaatgattgacccgctcgtgaatgaactagcaaaagagtaccccgggaaggtcaagttntacaaactgaacacggacgactntccttcaaccccaagcaagtacaatgttagaagcattccaacgatcatgatctttgtcaatggggagaagaaggatgcaatcataggtgcagtgcccagatntacgctcgcgtctagcattgataaattcttgcaatgagattagactggtgagtctgtgagatctgtttctccccccccctctgtcttgtgttctcattctctcttgtaatttgtgcttctttgtagctatctgcttcttctattgtatcttttcttcatcactgaacatctagacatggataaataagatgatgtcatgtttttatgtt

SEQ ID NO: 105 - protein, 181 aa, Brassica napus
  peptide (1)..(181): Ceres Seq. ID no. 12473410
  misc_feature (38)..(180): Homolog of NCBI NO: 21354 NR Description: thioredoxin M precursor (AA -67 to 114) [Spinacia
  misc_feature (21)..(180): Homolog of NCBI NO: 15232567 NR Description: thioredoxin m4
  misc_feature (18)..(181): Homolog of NCBI NO: 38346628 NR Description: OSJNBa0074L08.22 [Oryza sativa (japonica
  misc_feature (21)..(180): Homolog of NCBI NO: 6539614 NR Description: thioredoxin m4 [Arabidopsis thaliana]
  misc_feature (12)..(180): Homolog of NCBI NO: 15594012 NR Description: putative thioredoxin m2 [Pisum sativum]
  misc_feature (1)..(181): Homolog of NCBI NO: 11135407 NR Description: Thioredoxin M-type, chloroplast precursor (TRX-M)
  misc_feature (1)..(180): Homolog of NCBI NO: 30678634 NR Description: thioredoxin M-type 1, chloroplast precursor
  misc_feature (1)..(180): Homolog of NCBI NO: 21618235 NR Description: putative M-type thioredoxin [Arabidopsis thaliana]
  misc_feature (1)..(180): Homolog of NCBI NO: 6539610 NR Description: thioredoxin m2 [Arabidopsis thaliana]
  misc_feature (1)..(180): Homolog of NCBI NO: 15236327 NR Description: putative M-type thioredoxin
  misc_feature (128)..(128): Xaa is any aa, unknown or other
  misc_feature (136)..(136): Xaa is any aa, unknown or other
  misc_feature (170)..(170): Xaa is any aa, unknown or other
MAAFTCTSRPPVPLRSESRIASSPSASLSARRMFAVSPDSAGLRIRLSQSSSLLTSKVPRPRRGIVCEAQETTTDIVSIVNDTTWDSLVLKADGPVLVDFWAPWCGLCKMIDPLVNELAKEYPGKVKXYKLNTDDXPSTPSKYNVRSIPTIMIFVNGEKKDAIIGAVPRXTLASSIDKFLQ

SEQ ID NO: 106 - protein, 149 aa, Brassica napus
  peptide (1)..(149): Ceres Seq. ID no. 12473411
  misc_feature (6)..(148): Homolog of NCBI NO: 21354 NR Description: thioredoxin M precursor (AA -67 to 114) [Spinacia
  misc_feature (1)..(148): Homolog of NCBI NO: 15232567 NR Description: thioredoxin m4
  misc_feature (1)..(149): Homolog of NCBI NO: 38346628 NR Description: OSJNBa0074L08.22 [Oryza sativa (japonica
  misc_feature (1)..(148): Homolog of NCBI NO: 6539614 NR Description: thioredoxin m4 [Arabidopsis thaliana]
  misc_feature (1)..(148): Homolog of NCBI NO: 15594012 NR Description: putative thioredoxin m2 [Pisum sativum]
  misc_feature (1)..(149): Homolog of NCBI NO: 11135407 NR Description: Thioredoxin M-type, chloroplast precursor (TRX-M)
  misc_feature (1)..(148): Homolog of NCBI NO: 30678634 NR Description: thioredoxin M-type 1, chloroplast precursor
  misc_feature (1)..(148): Homolog of NCBI NO: 21618235 NR Description: putative M-type thioredoxin [Arabidopsis thaliana]
  misc_feature (1)..(148): Homolog of NCBI NO: 6539610 NR Description: thioredoxin m2 [Arabidopsis thaliana]
  misc_feature (1)..(148): Homolog of NCBI NO: 15236327 NR Description: putative M-type thioredoxin
  misc_feature (96)..(96): Xaa is any aa, unknown or other
  misc_feature (104)..(104): Xaa is any aa, unknown or other
  misc_feature (138)..(138): Xaa is any aa, unknown or other
MFAVSPDSAGLRIRLSQSSSLLTSKVPRPRRGIVCEAQETTTDIVSIVNDTTWDSLVLKADGPVLVDFWAPWCGLCKMIDPLVNELAKEYPGKVKXYKLNTDDXPSTPSKYNVRSIPTIMIFVNGEKKDAIIGAVPRXTLASSIDKFLQ

SEQ ID NO: 107 - DNA, 460 bp, Brassica napus
  misc_feature (1)..(460): Ceres Seq. ID no. 12476115
actaaaaacctcgattacgtaataaagtaatcaatattctcgatcgttcttataccgctttatagtcccttttatagtgccaccttcctcattagctcaccacgcacttaacaattgttcccttttccaactctcgctctctcttaaactttcttcccctctttcaaaatgaagctttctttgcgtttgatctcagctgttctcctcatgttcatgatattcgttgcttcagggatgggtccagtcaccgtggaggcacgcacgtgtgagtcgaagagccataagttcaggggtctttgtgtgagcagacacaactgcgcaaatgtgtgccacaacgaaggttttcatggaggcaaatgccgtgggttccgtcgtcgttgctactgcaccagacattgctgatccatccatcgatcgagactcataactcaaaatcttcaatccatcatctcgtctcatg

SEQ ID NO: 108 - protein, 77 aa, Brassica napus
  peptide (1)..(77): Ceres Seq. ID no. 12476116
  misc_feature (31)..(77): Pfam Name: Gamma-thionins family Pfam Description: Gamma-thionins family
  misc_feature (6)..(77): Homolog of NCBI NO: 17373811 NR Description: Defensin J1-2 precursor
  misc_feature (1)..(77): Homolog of NCBI NO: 28624546 NR Description: defensin protein 1 [Prunus persica]
  misc_feature (1)..(77): Homolog of NCBI NO: 22330359 NR Description: plant defensin protein, putative (PDF2.4)
  misc_feature (1)..(77): Homolog of NCBI NO: 21553559 NR Description: protease inhibitor II [Arabidopsis thaliana]
  misc_feature (1)..(77): Homolog of NCBI NO: 16225423 NR Description: putative gamma-thionin [Castanea sativa]
  misc_feature (1)..(77): Homolog of NCBI NO: 11387188 NR Description: Flower-specific gamma-thionin precursor (Defensin
  misc_feature (1)..(77): Homolog of NCBI NO: 15226876 NR Description: plant defensin protein, putative (PDF2.1)
  misc_feature (1)..(77): Homolog of NCBI NO: 15226872 NR Description: plant defensin protein, putative (PDF2.2)
  misc_feature (1)..(77): Homolog of NCBI NO: 7488534 NR Description: proteinase inhibitor II - turnip
  misc_feature (1)..(77): Homolog of NCBI NO: 15226878 NR Description: plant defensin protein, putative (PDF2.3)
MKLSLRLISAVLLMFMIFVASGMGPVTVEARTCESKSHKFRGLCVSRHNCANVCHNEGFHGGKCRGFRRRCYCTRHC

SEQ ID NO: 109 - protein, 64 aa, Brassica napus
  peptide (1)..(64): Ceres Seq. ID no. 12476117
  misc_feature (18)..(64): Pfam Name: Gamma-thionins family Pfam Description: Gamma-thionins family
  misc_feature (1)..(64): Homolog of NCBI NO: 17373811 NR Description: Defensin J1-2 precursor
  misc_feature (1)..(64): Homolog of NCBI NO: 28624546 NR Description: defensin protein 1 [Prunus persica]
  misc_feature (1)..(64): Homolog of NCBI NO: 22330359 NR Description: plant defensin protein, putative (PDF2.4)
  misc_feature (1)..(64): Homolog of NCBI NO: 21553559 NR Description: protease inhibitor II [Arabidopsis thaliana]
  misc_feature (1)..(64): Homolog of NCBI NO: 16225423 NR Description: putative gamma-thionin [Castanea sativa]
  misc_feature (1)..(64): Homolog of NCBI NO: 11387188 NR Description: Flower-specific gamma-thionin precursor (Defensin
  misc_feature (1)..(64): Homolog of NCBI NO: 15226876 NR Description: plant defensin protein, putative (PDF2.1)
  misc_feature (1)..(64): Homolog of NCBI NO: 15226872 NR Description: plant defensin protein, putative (PDF2.2)
  misc_feature (1)..(64): Homolog of NCBI NO: 7488534 NR Description: proteinase inhibitor II - turnip
  misc_feature (1)..(64): Homolog of NCBI NO: 15226878 NR Description: plant defensin protein, putative (PDF2.3)
MFMIFVASGMGPVTVEARTCESKSHKFRGLCVSRHNCANVCHNEGFHGGKCRGFRRRCYCTRHC

SEQ ID NO: 110 - protein, 62 aa, Brassica napus
  peptide (1)..(62): Ceres Seq. ID no. 12476118
  misc_feature (16)..(62): Pfam Name: Gamma-thionins family Pfam Description: Gamma-thionins family
  misc_feature (1)..(62): Homolog of NCBI NO: 15226872 NR Description: plant defensin protein, putative (PDF2.2)
  misc_feature (1)..(62): Homolog of NCBI NO: 7488534 NR Description: proteinase inhibitor II - turnip
  misc_feature (1)..(62): Homolog of NCBI NO: 28624546 NR Description: defensin protein 1 [Prunus persica]
  misc_feature (1)..(62): Homolog of NCBI NO: 21553559 NR Description: protease inhibitor II [Arabidopsis thaliana]
  misc_feature (1)..(62): Homolog of NCBI NO: 11387188 NR Description: Flower-specific gamma-thionin precursor (Defensin
  misc_feature (1)..(62): Homolog of NCBI NO: 15226876 NR Description: plant defensin protein, putative (PDF2.1)
  misc_feature (1)..(62): Homolog of NCBI NO: 16225423 NR Description: putative gamma-thionin [Castanea sativa]
  misc_feature (1)..(62): Homolog of NCBI NO: 22330359 NR Description: plant defensin protein, putative (PDF2.4)
  misc_feature (1)..(62): Homolog of NCBI NO: 17373811 NR Description: Defensin J1-2 precursor
  misc_feature (1)..(62): Homolog of NCBI NO: 15226878 NR Description: plant defensin protein, putative (PDF2.3)
MIFVASGMGPVTVEARTCESKSHKFRGLCVSRHNCANVCHNEGFHGGKCRGFRRRCYCTRHC

SEQ ID NO: 111 - DNA, 765 bp, Brassica napus
  misc_feature (1)..(765): Ceres Seq. ID no. 12557928
aaagagaaagcccctccagagctcataacccaatctcccatcctcctcgattcaatacttatctctcctctcaatcaaaaacttgatctacataatcgattccacatgaaacgcagtgcttcaaactcagttacaaacggtgacgcgagtaacaagaagatgaaaaagaccacagaggaagattcagaaatcggattcgccaacttagacgagaatctactctacgaggtgttgaagcacgtggacgcgaggaccttagcaacgtcttcttgcgtgagcaagatctggcacaggactgcacaagacgagcgtctgtgggagctgatctgcacgcgtcactgggccaacatcggctgcagccaacaccagctcagattcgtcgtcttggcgcttggcggcttcaagcaactccactcgctctacctgtggcctctctcgagtccgaatcaacatggtagattgggtaaagacgagctgaaactctccctttctctcctctcgattcggtactacgagaagatgaatttcactaagagactcccctgagtccaaatgattttacttcagatctattttttccagcatcgttnttagttttattttattgtttngcgagatgtttgtaatttgtaatatctgctttgtacttgtttaagctcgttctcatatgtttgatattattaaaatctggcaaaatccatgtaagccagactgtctgaaacagctagttctgtaataatanaggctggtgagaatatttaagcc

SEQ ID NO: 112 - protein, 181 aa, Brassica napus
  peptide (1)..(181): Ceres Seq. ID no. 12557929
  misc_feature (39)..(174): Homolog of NCBI NO: 15238908 NR Description: putative protein; protein id: At5g48170.1
  misc_feature (41)..(179): Homolog of NCBI NO: 33411641 NR Description: GID2 [Oryza sativa (japonica cultivar-group)]
  misc_feature (36)..(181): Homolog of NCBI NO: 21593260 NR Description: unknown [Arabidopsis thaliana]
  misc_feature (36)..(181): Homolog of NCBI NO: 15233744 NR Description: putative protein
KEKAPPELITQSPILLDSILISPLNQKLDLHNRFHMKRSASNSVTNGDASNKKMKKTTEEDSEIGFANLDENLLYEVLKHVDARTLATSSCVSKIWHRTAQDERLWELICTRHWANIGCSQHQLRFVVLALGGFKQLHSLYLWPLSSPNQHGRLGKDELKLSLSLLSIRYYEKMNFTKRLP

SEQ ID NO: 113 - protein, 146 aa, Brassica napus
  peptide (1)..(146): Ceres Seq. ID no. 12557930
  misc_feature (4)..(139): Homolog of NCBI NO: 15238908 NR Description: putative protein; protein id: At5g48170.1
  misc_feature (6)..(144): Homolog of NCBI NO: 33411641 NR Description: GID2 [Oryza sativa (japonica cultivar-group)]
  misc_feature (1)..(146): Homolog of NCBI NO: 21593260 NR Description: unknown [Arabidopsis thaliana]
  misc_feature (1)..(146): Homolog of NCBI NO: 15233744 NR Description: putative protein
MKRSASNSVTNGDASNKKMKKTTEEDSEIGFANLDENLLYEVLKHVDARTLATSSCVSKIWHRTAQDERLWELICTRHWANIGCSQHQLRFVVLALGGFKQLHSLYLWPLSSPNQHGRLGKDELKLSLSLLSIRYYEKMNFTKRLP

SEQ ID NO: 114 - protein, 128 aa, Brassica napus
  peptide (1)..(128): Ceres Seq. ID no. 12557931
  misc_feature (1)..(121): Homolog of NCBI NO: 15238908 NR Description: putative protein; protein id: At5g48170.1
  misc_feature (1)..(126): Homolog of NCBI NO: 33411641 NR Description: GID2 [Oryza sativa (japonica cultivar-group)]
  misc_feature (1)..(128): Homolog of NCBI NO: 21593260 NR Description: unknown [Arabidopsis thaliana]
  misc_feature (1)..(128): Homolog of NCBI NO: 15233744 NR Description: putative protein
MKKTTEEDSEIGFANLDENLLYEVLKHVDARTLATSSCVSKIWHRTAQDERLWELICTRHWANIGCSQHQLRFVVLALGGFKQLHSLYLWPLSSPNQHGRLGKDELKLSLSLLSIRYYEKMNFTKRLP

SEQ ID NO: 115 - DNA, 1017 bp, Brassica napus
  misc_feature (1)..(1017): Ceres Seq. ID no. 12472913
aactgtcactcgaactccaacaaacagaagatggcgatatggtggcgtggcgtgagatccgcggcggaggcagctaatctgccagcagcatactcattcggtcgatcgattcggtgtttacatcagtatgagacgattcaggcgataccacgcgaggctacggggcgaagagtatcggctcgtgatcggacgattggccggattcccgccgtggttttcacccaatcgcttctcgagacggacgcttcgaagagaggcgtttcgaggaagcagcttttgacggccgataggaagcagatcaagtcgattgttgactctgtgggtctcccgttcttctgttcgactactttcaagctccaggtcagagcggggcaaggttcgtcgtcgctggttgagtcgggtcgtgtacttcccctcaagattcatagagatgaagagagtgggaagatacttaatttagtgttcgtgtgggctaatgatggagagcagctgaaggttgatgttccaattgttttcaaaggattagatgattgtcccggtcttaagaaagggggaaatctacggtcaatgcgaagcactntgaagcttntaggcccagcggaacacattccatcgaaaatcgaagtggatgtgagcaaactggacatagcggacaaagtgttaatgcaagaagttgaattccatccatcgttgaagctgttgagcaagaatgagacattgcctgtgtgtaagattgttgccacaagcccggtcaaagaaccagaagctgttcaagcatagaataagtccttcaactttagaaggagagaagcacccttcaagtcctctctagctacttatttttttgttntagaacgaagcaaattcagtttgaattgctgatcaacaacatatctgtttttgagtctttcttcggaatgttactttaactagtagtatccgattcttcgcaagagtcagaacaacttgaatttggtcgttaccagtgaaaataaaagcccaacaacgacttggtcc

SEQ ID NO: 116 - protein, 259 aa, Brassica napus
  peptide (1)..(259): Ceres Seq. ID no. 12472914
  misc_feature (76)..(256): Homolog of NCBI NO: 22961530 NR Description: hypothetical protein [Rhodopseudomonas palustris]
  misc_feature (44)..(211): Homolog of NCBI NO: 34912284 NR Description: P0451D05.2 [Oryza sativa (japonica
  misc_feature (44)..(245): Homolog of NCBI NO: 15236554 NR Description: putative protein
  misc_feature (11)..(259): Homolog of NCBI NO: 15240108 NR Description: putative protein
  misc_feature (194)..(194): Xaa is any aa, unknown or other
  misc_feature (197)..(197): Xaa is any aa, unknown or other
NCHSNSNKQKMAIWWRGVRSAAEAANLPAAYSFGRSIRCLHQYETIQAIPREATGRRVSARDRTIGRIPAVVFTQSLLETDASKRGVSRKQLLTADRKQIKSIVDSVGLPFFCSTTFKLQVRAGQGSSSLVESGRVLPLKIHRDEESGKILNLVFVWANDGEQLKVDVPIVFKGLDDCPGLKKGGNLRSMRSTXKLXGPAEHIPSKIEVDVSKLDIADKVLMQEVEFHPSLKLLSKNETLPVCKIVATSPVKEPEAVQA

SEQ ID NO: 117 - protein, 249 aa, Brassica napus
  peptide (1)..(249): Ceres Seq. ID no. 12472915
  misc_feature (66)..(246): Homolog of NCBI NO: 22961530 NR Description: hypothetical protein [Rhodopseudomonas palustris]
  misc_feature (34)..(201): Homolog of NCBI NO: 34912284 NR Description: P0451D05.2 [Oryza sativa (japonica
  misc_feature (34)..(235): Homolog of NCBI NO: 15236554 NR Description: putative protein
  misc_feature (1)..(249): Homolog of NCBI NO: 15240108 NR Description: putative protein
  misc_feature (184)..(184): Xaa is any aa, unknown or other
  misc_feature (187)..(187): Xaa is any aa, unknown or other
MAIWWRGVRSAAEAANLPAAYSFGRSIRCLHQYETIQAIPREATGRRVSARDRTIGRIPAVVFTQSLLETDASKRGVSRKQLLTADRKQIKSIVDSVGLPFFCSTTFKLQVRAGQGSSSLVESGRVLPLKIHRDEESGKILNLVFVWANDGEQLKVDVPIVFKGLDDCPGLKKGGNLRSMRSTXKLXGPAEHIPSKIEVDVSKLDIADKVLMQEVEFHPSLKLLSKNETLPVCKIVATSPVKEPEAVQA

SEQ ID NO: 118 - DNA, 945 bp, Brassica napus
  misc_feature (1)..(945): Ceres Seq. ID no. 12472626
aaaatcttcgatggaaacactttctcctcctctacgagacgacgatgaggaaaacgaagtagacgaagccaaaatgctcctcatcggtgagaacggaaccaacggtgagagtttctctcctctgtccgacggtgcaccggagctccagcagtacactatccgctccatcgagtcaacggtcgtgattcgtcaactaacatcacagggtctctccttccagctctggccagccgcttctactttcgtcgcgcttctcgataactaccgcctcgaccctaccaacagccccctcgccgcaacactctcctcgctgaaacccgccggctctacgactactactacaccgatgaacattctcgagctcggatccggaaccggcgtcgtcggaatcgccgcggcgatcactctttccgctaacgtcacggtgacggatctcccgcacgtcctcgacaacctcagcttcaacgcagaggcgaacgctcagactgtggcgagattcggcggtcaagtccacgcggcaccgctccgttggggagaggctgatgacgtggagattctggggcggaacgttgacttggttgtagcatctgacgtggtgtaccacgaccatctntacgagcctctcctgaaaacgctgcgtttaatggcggcggcgaaggggttagaggggaagaggttgatatttctgatggctcatctgaggaggtggaaaaaagagtctgtcttcttcaagaaagctagaaaggtctttgatgttgacgttatacactctgatgagcctcgaaatggtgcaagaagcggcgttttggtttaccgttttgtcgcgaaacaatcgaatcaaaatggtcggattgtttcgtgttaacagtttgcaaattttcaggattaatttcgtttgatgaatgaaatttctcaaatgtgtttatcaaaagatttccacattat

SEQ ID NO: 119 - protein, 287 aa, Brassica napus
  peptide (1)..(287): Ceres Seq. ID no. 12472627
  misc_feature (57)..(224): Homolog of NCBI NO: 40746818 NR Description: hypothetical protein AN0945.2 [Aspergillus
  misc_feature (31)..(243): Homolog of NCBI NO: 40739926 NR Description: hypothetical protein AN3851.2 [Aspergillus
  misc_feature (98)..(221): Homolog of NCBI NO: 19075657 NR Description: uv-induced protein uvi22 [Schizosaccharomyces
  misc_feature (60)..(202): Homolog of NCBI NO: 38109737 NR Description: hypothetical protein MG01212.4 [Magnaporthe
  misc_feature (10)..(203): Homolog of NCBI NO: 38567162 NR Description: conserved hypothetical protein [Neurospora crassa]
  misc_feature (47)..(277): Homolog of NCBI NO: 33146776 NR Description: unknown protein [Oryza sativa (japonica
  misc_feature (43)..(279): Homolog of NCBI NO: 26451147 NR Description: unknown protein [Arabidopsis thaliana]
  misc_feature (43)..(279): Homolog of NCBI NO: 15230327 NR Description: putative protein; protein id: At3g50850.1
  misc_feature (10)..(287): Homolog of NCBI NO: 15240506 NR Description: putative protein; protein id: At5g49560.1
  misc_feature (204)..(204): Xaa is any aa, unknown or other
KSSMETLSPPLRDDDEENEVDEAKMLLIGENGTNGESFSPLSDGAPELQQYTIRSIESTVVIRQLTSQGLSFQLWPAASTFVALLDNYRLDPTNSPLAATLSSLKPAGSTTTTTPMNILELGSGTGVVGIAAAITLSANVTVTDLPHVLDNLSFNAEANAQTVARFGGQVHAAPLRWGEADDVEILGRNVDLVVASDVVYHDHXYEPLLKTLRLMAAAKGLEGKRLIFLMAHLRRWKKESVFFKKARKVFDVDVIHSDEPRNGARSGVLVYRFVAKQSNQNGRIVSC

SEQ ID NO: 120 - protein, 284 aa, Brassica napus
  peptide (1)..(284): Ceres Seq. ID no. 12472628
  misc_feature (54)..(221): Homolog of NCBI NO: 40746818 NR Description: hypothetical protein AN0945.2 [Aspergillus
  misc_feature (28)..(240): Homolog of NCBI NO: 40739926 NR Description: hypothetical protein AN3851.2 [Aspergillus
  misc_feature (95)..(218): Homolog of NCBI NO: 19075657 NR Description: uv-induced protein uvi22 [Schizosaccharomyces
  misc_feature (57)..(199): Homolog of NCBI NO: 38109737 NR Description: hypothetical protein MG01212.4 [Magnaporthe
  misc_feature (7)..(200): Homolog of NCBI NO: 38567162 NR Description: conserved hypothetical protein [Neurospora crassa]
  misc_feature (44)..(274): Homolog of NCBI NO: 33146776 NR Description: unknown protein [Oryza sativa (japonica
  misc_feature (40)..(276): Homolog of NCBI NO: 26451147 NR Description: unknown protein [Arabidopsis thaliana]
  misc_feature (40)..(276): Homolog of NCBI NO: 15230327 NR Description: putative protein; protein id: At3g50850.1
  misc_feature (7)..(284): Homolog of NCBI NO: 15240506 NR Description: putative protein; protein id: At5g49560.1
  misc_feature (201)..(201): Xaa is any aa, unknown or other
METLSPPLRDDDEENEVDEAKMLLIGENGTNGESFSPLSDGAPELQQYTIRSIESTVVIRQLTSQGLSFQLWPAASTFVALLDNYRLDPTNSPLAATLSSLKPAGSTTTTTPMNILELGSGTGVVGIAAAITLSANVTVTDLPHVLDNLSFNAEANAQTVARFGGQVHAAPLRWGEADDVEILGRNVDLVVASDVVYHDHXYEPLLKTLRLMAAAKGLEGKRLIFLMAHLRRWKKESVFFKKARKVFDVDVIHSDEPRNGARSGVLVYRFVAKQSNQNGRIVSC

SEQ ID NO: 121 - protein, 263 aa, Brassica napus
  peptide (1)..(263): Ceres Seq. ID no. 12472629
  misc_feature (33)..(200): Homolog of NCBI NO: 40746818 NR Description: hypothetical protein AN0945.2 [Aspergillus
  misc_feature (7)..(219): Homolog of NCBI NO: 40739926 NR Description: hypothetical protein AN3851.2 [Aspergillus
  misc_feature (74)..(197): Homolog of NCBI NO: 19075657 NR Description: uv-induced protein uvi22 [Schizosaccharomyces
  misc_feature (36)..(178): Homolog of NCBI NO: 38109737 NR Description: hypothetical protein MG01212.4 [Magnaporthe
  misc_feature (1)..(179): Homolog of NCBI NO: 38567162 NR Description: conserved hypothetical protein [Neurospora crassa]
  misc_feature (23)..(253): Homolog of NCBI NO: 33146776 NR Description: unknown protein [Oryza sativa (japonica
  misc_feature (19)..(255): Homolog of NCBI NO: 26451147 NR Description: unknown protein [Arabidopsis thaliana]
  misc_feature (19)..(255): Homolog of NCBI NO: 15230327 NR Description: putative protein; protein id: At3g50850.1
  misc_feature (1)..(263): Homolog of NCBI NO: 15240506 NR Description: putative protein; protein id: At5g49560.1
  misc_feature (180)..(180): Xaa is any aa, unknown or other
MLLIGENGTNGESFSPLSDGAPELQQYTIRSIESTVVIRQLTSQGLSFQLWPAASTFVALLDNYRLDPTNSPLAATLSSLKPAGSTTTTTPMNILELGSGTGVVGIAAAITLSANVTVTDLPHVLDNLSFNAEANAQTVARFGGQVHAAPLRWGEADDVEILGRNVDLVVASDVVYHDHXYEPLLKTLRLMAAAKGLEGKRLIFLMAHLRRWKKESVFFKKARKVFDVDVIHSDEPRNGARSGVLVYRFVAKQSNQNGRIVSC

SEQ ID NO: 122 - DNA, 905 bp, Brassica napus
  misc_feature (1)..(905): Ceres Seq. ID no. 12471935
accacttaatatatgtatatgaatccatctcttcttcataaattcccacgaccatcggaccaaagaatcatacccctcctttctagccattcaaactagtaaacaatggggatactcaggaagaaaaaacacgagcgaaagccgtcgtttaagagtgttttaaccgcaatattagctacacatgccgcaacattcctcttgttgatcgccggtgtatccctcgccggcacagccgccgcatttatcgctaccatgccactattcgtagtattcagtccgattctcgtaccagctggtattaccactggtttactgactacgggtttagcagccgccggtggcgccggcgcgactgctgtcaccatcatcctgtggctctacaagcgagcaacgggcaaggcgccgccaaaagtcctagaaaaagtcttgaaaaagataataccaggtgctgcagctgcaccagcagccgctccaggagccgctccagcagcggcgccagcagccgcaccagctgtggcgccagcagccgcaccagctgctgcgccagcacctaagccagcagccccaccagcacctaagccagcagccgcaccgagtatatgaaaagaagtggtgggcatgagtaaaggttgatatggaaaactggatacatagaaaaaagagtaatccaacttttaaaaaataaataacaacttcacgtggggatagaaaaattttcaaatattattttactaatggatgtcgcggtacaaaataataacaaatgtaagcctttttattgtatagtattttaagaacgaagctatgtagcgttgacatttgtaccttattcaagttcaactatattattctagttcttttttcaccaatcctactatataaaanaagctaaattggagctttct

SEQ ID NO: 123 - protein, 165 aa, Brassica napus
  peptide (1)..(165): Ceres Seq. ID no. 12471936
  misc_feature (14)..(131): Pfam Name: Oleosin Pfam Description: Oleosin
  misc_feature (55)..(144): Homolog of NCBI NO: 7488470 NR Description: oleosin-like protein OLN10 - rape (fragment)
  misc_feature (56)..(144): Homolog of NCBI NO: 7488475 NR Description: oleosin-like protein OLN8 - rape (fragment)
  misc_feature (11)..(141): Homolog of NCBI NO: 15081220 NR Description: glycine-rich protein GRP20 [Arabidopsis thaliana]
  misc_feature (11)..(145): Homolog of NCBI NO: 15081227 NR Description: glycine-rich protein GRP20 [Arabidopsis thaliana]
  misc_feature (11)..(153): Homolog of NCBI NO: 15240816 NR Description: glycine-rich protein GRP20; protein id:
  misc_feature (11)..(147): Homolog of NCBI NO: 15081213 NR Description: glycine-rich protein GRP20 [Arabidopsis thaliana]
  misc_feature (1)..(144): Homolog of NCBI NO: 7488519 NR Description: anther-specific protein BNA237 - turnip
  misc_feature (1)..(156): Homolog of NCBI NO: 123952 NR Description: MICROSPORE-SPECIFIC PROTEIN I3
  misc_feature (1)..(156): Homolog of NCBI NO: 1076452 NR Description: oleosin - rape
  misc_feature (1)..(165): Homolog of NCBI NO: 1076453 NR Description: oleosin - rape
MGILRKKKHERKPSFKSVLTAILATHAATFLLLIAGVSLAGTAAAFIATMPLFVVFSPILVPAGITTGLLTTGLAAAGGAGATAVTIILWLYKRATGKAPPKVLEKVLKKIIPGAAAAPAAAPGAAPAAAPAAAPAVAPAAAPAAAPAPKPAAPPAPKPAAAPSI

SEQ ID NO: 124 - protein, 116 aa, Brassica napus
  peptide (1)..(116): Ceres Seq. ID no. 12471937
  misc_feature (1)..(82): Pfam Name: Oleosin Pfam Description: Oleosin
  misc_feature (6)..(95): Homolog of NCBI NO: 7488470 NR Description: oleosin-like protein OLN10 - rape (fragment)
  misc_feature (7)..(95): Homolog of NCBI NO: 7488475 NR Description: oleosin-like protein OLN8 - rape (fragment)
  misc_feature (1)..(92): Homolog of NCBI NO: 15081220 NR Description: glycine-rich protein GRP20 [Arabidopsis thaliana]
  misc_feature (1)..(96): Homolog of NCBI NO: 15081227 NR Description: glycine-rich protein GRP20 [Arabidopsis thaliana]
  misc_feature (1)..(104): Homolog of NCBI NO: 15240816 NR Description: glycine-rich protein GRP20; protein id:
  misc_feature (1)..(98): Homolog of NCBI NO: 15081213 NR Description: glycine-rich protein GRP20 [Arabidopsis thaliana]
  misc_feature (1)..(95): Homolog of NCBI NO: 7488519 NR Description: anther-specific protein BNA237 - turnip
  misc_feature (1)..(107): Homolog of NCBI NO: 123952 NR Description: MICROSPORE-SPECIFIC PROTEIN I3
  misc_feature (1)..(107): Homolog of NCBI NO: 1076452 NR Description: oleosin - rape
  misc_feature (1)..(116): Homolog of NCBI NO: 1076453 NR Description: oleosin - rape
MPLFVVFSPILVPAGITTGLLTTGLAAAGGAGATAVTIILWLYKRATGKAPPKVLEKVLKKIIPGAAAAPAAAPGAAPAAAPAAAPAVAPAAAPAAAPAPKPAAPPAPKPAAAPSI

SEQ ID NO: 125 - DNA, 608 bp, Brassica napus
  misc_feature (1)..(608): Ceres Seq. ID no. 12556889
attttttcatgttctgtggatgttagaaataaaacaaaggagattggtctgggagaaagaagcaaagaagaaaaatggcagcaacatttgcagctccatcgacagtgataggtctcggaggatcatctgtttctcccatcaaggccaaagctctctcttcatcctttttgaaaccaacattaagagcaaagaaccctctgaaagtcgccggagcatcaggaggaagattcacttgctttgagaggaactggctgaggagagatctgaacgtggtggggttcgggcttgtcggatggctagctccgtctagcattccggcgataaacgggaagagcctgacgggtctcttctttgagagcataggaactgagctcgctcacttcccaactcctccagctctcacgtcacagttctggttgtggctgatcacctggcacttaggcctcttcatatgcctcaccttcggacaaatcggatttaagggcaggactgaagattacttcaagaaataaatcattccctcttgttccatctgtacttattatcttactctctcttggttctctgtgtaatagtatgactctatatgaagctttctttcgattcct

SEQ ID NO: 126 - protein, 145 aa, Brassica napus
  peptide (1)..(145): Ceres Seq. ID no. 12556890
  misc_feature (1)..(145): Homolog of NCBI NO: 6996562 NR Description: putative 16kDa membrane protein [Nicotiana
  misc_feature (1)..(143): Homolog of NCBI NO: 22531014 NR Description: expressed protein [Arabidopsis thaliana]
  misc_feature (1)..(143): Homolog of NCBI NO: 18390888 NR Description: expressed protein
MAATFAAPSTVIGLGGSSVSPIKAKALSSSFLKPTLRAKNPLKVAGASGGRFTCFERNWLRRDLNVVGFGLVGWLAPSSIPAINGKSLTGLFFESIGTELAHFPTPPALTSQFWLWLITWHLGLFICLTFGQIGFKGRTEDYFKK

SEQ ID NO: 127 - protein, 79 aa, Brassica napus
  peptide (1)..(79): Ceres Seq. ID no. 12556891
FFHVLWMLEIKQRRLVWEKEAKKKNGSNICSSIDSDRSRRIICFSHQGQSSLFILFETNIKSKEPSESRRSIRRKIHLL

SEQ ID NO: 128 - protein, 73 aa, Brassica napus
  peptide (1)..(73): Ceres Seq. ID no. 12556892
MLEIKQRRLVWEKEAKKKNGSNICSSIDSDRSRRIICFSHQGQSSLFILFETNIKSKEPSESRRSIRRKIHLL

SEQ ID NO: 129 - DNA, 1022 bp, Brassica napus
  misc_feature (1)..(1022): Ceres Seq. ID no. 12474640
aaaaggttcttcctcctctcacacgctctgtcttcttcctcctcctccttggttagattagatatttagtagggctttgaagctactaaactcgagcaaaaaaaaaaatggagattgcggagcgtagggacgaggggatgagagaatctggaaacatggagaacataaagtccgactctttttccgatgaacgctactctcgcgacctcaaagctggtctccatcctctacggtacaagtttgcgatttggtacacacgtcgaacaccaggggtcaggagccagacatcttatgaggataacattaagaagattgttgatttcagcactgttgaagggttttgggcatgctactgtcaccttgctcgttcttctctcttgcctagtcctacagatcttcatttcttcaaggatggcattcgccccttgtgggaggattctgccaactgcaatggaggaaagtggatcgtacgtttctccaaagttgtatccgctcgcttctgggaggatctgcttcttgccttggtaggcgaccagcttgatgatgctgacaatatctgtggggcagtactgagtgtccgcttcaacgaggacatcattagtgtgtggaatcgcaatgcttctgatcatcaggcagtgatgggtttgagagactcaatcaagcggcacttgaagctgcctcattcttatgttatggaatacaagccccncgatgcttctnttcgcgacaactcctcttacaggaacacatggatgagaggatagctaggttcaaaatntgacacgtgatgtggagaaagatttgggtagctctcttgcaacctgggaagatatatggactcaaccccgttttcggtagtatcaatggcttacgatntaagcattgaaaatcctctcgacttgtgtaatcatatcgttttcttgtttctagatattgttgttaccttcaatggtttgcactttgcagtgttgtttgaaactataatgattcgaataaaacttgagctcacgtactggttttac

SEQ ID NO: 130 - protein, 218 aa, Brassica napus
  peptide (1)..(218): Ceres Seq. ID no. 12474641
  misc_feature (39)..(199): Homolog of NCBI NO: 34877568 NR Description: similar to eukaryotic translation initiation
  misc_feature (5)..(199): Homolog of NCBI NO: 29839292 NR Description: Eukaryotic translation initiation factor 4E type (eIF-4E type 3) (eIF4E type 3) (mRNA cap-binding protein type 3) translation initiation factor 4E-like 3) (eIF4E-like protein
  misc_feature (5)..(199): Homolog of NCBI NO: 29144998 NR Description: Similar to RIKEN cDNA 2700069E09 gene [Mus
  misc_feature (12)..(199): Homolog of NCBI NO: 3329384 NR Description: translation initiation factor 4e [Homo sapiens]
  misc_feature (5)..(199): Homolog of NCBI NO: 12653185 NR Description: EIF4EL3 protein [Homo sapiens]
  misc_feature (5)..(199): Homolog of NCBI NO: 4757702 NR Description: eukaryotic translation initiation factor 4E-like 3
  misc_feature (36)..(214): Homolog of NCBI NO: 37590370 NR Description: Unknown (protein for MGC:73242) [Danio rerio]
  misc_feature (5)..(214): Homolog of NCBI NO: 13624327 NR Description: RIKEN cDNA 2700069E09; DNA segment, human
  misc_feature (1)..(218): Homolog of NCBI NO: 15238740 NR Description: eukaryotic cap-binding protein (gb|AAC17220.1)
  misc_feature (1)..(218): Homolog of NCBI NO: 25453555 NR Description: eukaryotic cap-binding protein [imported] -
  misc_feature (201)..(201): Xaa is any aa, unknown or other
  misc_feature (205)..(205): Xaa is any aa, unknown or other
MEIAERRDEGMRESGNMENIKSDSFSDERYSRDLKAGLHPLRYKFAIWYTRRTPGVRSQTSYEDNIKKIVDFSTVEGFWACYCHLARSSLLPSPTDLHFFKDGIRPLWEDSANCNGGKWIVRFSKVVSARFWEDLLLALVGDQLDDADNICGAVLSVRFNEDIISVWNRNASDHQAVMGLRDSIKRHLKLPHSYVMEYKPXDASXRDNSSYRNTWMRG

SEQ ID NO: 131 - protein, 208 aa, Brassica napus
  peptide (1)..(208): Ceres Seq. ID no. 12474642
  misc_feature (1)..(189): Homolog of NCBI NO: 29144998 NR Description: Similar to RIKEN cDNA 2700069E09 gene [Mus
  misc_feature (2)..(189): Homolog of NCBI NO: 3329384 NR Description: translation initiation factor 4e [Homo sapiens]
  misc_feature (1)..(189): Homolog of NCBI NO: 12653185 NR Description: EIF4EL3 protein [Homo sapiens]
  misc_feature (1)..(189): Homolog of NCBI NO: 4757702 NR Description: eukaryotic translation initiation factor 4E-like 3
  misc_feature (26)..(204): Homolog of NCBI NO: 37590370 NR Description: Unknown (protein for MGC:73242) [Danio rerio]
  misc_feature (1)..(204): Homolog of NCBI NO: 13624327 NR Description: RIKEN cDNA 2700069E09; DNA segment, human
  misc_feature (1)..(208): Homolog of NCBI NO: 15238740 NR Description: eukaryotic cap-binding protein (gb|AAC17220.1)
  misc_feature (1)..(208): Homolog of NCBI NO: 25453555 NR Description: eukaryotic cap-binding protein [imported] -
  misc_feature (29)..(189): Homolog of NCBI NO: 34877568 NR Description: similar to eukaryotic translation initiation
  misc_feature (1)..(189): Homolog of NCBI NO: 29839292 NR Description: Eukaryotic translation initiation factor 4E type (eIF-4E type 3) (eIF4E type 3) (mRNA cap-binding protein type 3) translation initiation factor 4E-like 3) (eIF4E-like protein
  misc_feature (191)..(191): Xaa is any aa, unknown or other
  misc_feature (195)..(195): Xaa is any aa, unknown or other
MRESGNMENIKSDSFSDERYSRDLKAGLHPLRYKFAIWYTRRTPGVRSQTSYEDNIKKIVDFSTVEGFWACYCHLARSSLLPSPTDLHFFKDGIRPLWEDSANCNGGKWIVRFSKVVSARFWEDLLLALVGDQLDDADNICGAVLSVRFNEDIISVWNRNASDHQAVMGLRDSIKRHLKLPHSYVMEYKPXDASXRDNSSYRNTWMRG

SEQ ID NO: 132 - protein, 202 aa, Brassica napus
  peptide (1)..(202): Ceres Seq. ID no. 12474643
  misc_feature (23)..(183): Homolog of NCBI NO: 34877568 NR Description: similar to eukaryotic translation initiation
  misc_feature (1)..(183): Homolog of NCBI NO: 29839292 NR Description: Eukaryotic translation initiation factor 4E type (eIF-4E type 3) (eIF4E type 3) (mRNA cap-binding protein type 3) translation initiation factor 4E-like 3) (eIF4E-like protein
  misc_feature (1)..(183): Homolog of NCBI NO: 29144998 NR Description: Similar to RIKEN cDNA 2700069E09 gene [Mus
  misc_feature (1)..(183): Homolog of NCBI NO: 3329384 NR Description: translation initiation factor 4e [Homo sapiens]
  misc_feature (1)..(183): Homolog of NCBI NO: 12653185 NR Description: EIF4EL3 protein [Homo sapiens]
  misc_feature (1)..(183): Homolog of NCBI NO: 4757702 NR Description: eukaryotic translation initiation factor 4E-like 3
  misc_feature (20)..(198): Homolog of NCBI NO: 37590370 NR Description: Unknown (protein for MGC:73242) [Danio rerio]
  misc_feature (1)..(198): Homolog of NCBI NO: 13624327 NR Description: RIKEN cDNA 2700069E09; DNA segment, human
  misc_feature (1)..(202): Homolog of NCBI NO: 15238740 NR Description: eukaryotic cap-binding protein (gb|AAC17220.1)
  misc_feature (1)..(202): Homolog of NCBI NO: 25453555 NR Description: eukaryotic cap-binding protein [imported] -
  misc_feature (185)..(185): Xaa is any aa, unknown or other
  misc_feature (189)..(189): Xaa is any aa, unknown or other
MENIKSDSFSDERYSRDLKAGLHPLRYKFAIWYTRRTPGVRSQTSYEDNIKKIVDFSTVEGFWACYCHLARSSLLPSPTDLHFFKDGIRPLWEDSANCNGGKWIVRFSKVVSARFWEDLLLALVGDQLDDADNICGAVLSVRFNEDIISVWNRNASDHQAVMGLRDSIKRHLKLPHSYVMEYKPXDASXRDNSSYRNTWMRG

SEQ ID NO: 133 - DNA, 890 bp, Brassica napus
  misc_feature (1)..(890): Ceres Seq. ID no. 12473977
attctgattattatctttcgaaaatgtttattctccggtcgcagaagctatggacggtggttatgattctagtgatgtcgtcgcgtgtaacgcactcgctgcacttcgatctgcactcgggacggacgaagtgtatagcggaagacatcaagagcaattcaatgaccgtgggaaagtacagcgtcgataaccctcacgaaggccacgatttgcctcaatctcacaagatctccgtcaaggtgacgtcaagctcagggaatgcgtaccatcacgcggatcaagtggcgtctgggcaattcgcgttctcggcagtggaagctggggactacatggcttgtttctcagccgttgatcataagcctgaggtgactctgagcattgattttgagtggaggacgggtgttcaatccaagagctgggctactgttgccaagaagagccaagtcgaaaccatggagtttgatgtaaagagccttcttgatactgtcaactctattcatgaagagatgttttatcttagagaaagggaagaagaaatgcaagatntgaaccggtcaacaaacactaaaatggcgtggttgagtttgctctctttattcgtatgcataggagtggcagctatgcagtatgtacacttgaagncctttttcgagaagaagaaagtcatctaatttgttacttacaggcaatcacacgcacgaaacaatctacttatcttttgggtgttgtatattaagtcaatgactactgcaagcatgttntcttgagacttagaactttgattttatgtgccagtattgtccttcttgggtttagttctttgtttagatttgttggtccttaatacttggataatttgatggtttaaactatataaaatgtgcatttcc

SEQ ID NO: 134 - protein, 222 aa, Brassica napus
  peptide (1)..(222): Ceres Seq. ID no. 12473978
  misc_feature (18)..(222): Pfam Name: emp24/gp25L/p24 family Pfam Description: emp24/gp25L/p24 family
  misc_feature (1)..(222): Homolog of NCBI NO: 11994711 NR Description: golgi-associated membrane trafficking
  misc_feature (19)..(222): Homolog of NCBI NO: 33146897 NR Description: putative transmembrane protein
  misc_feature (8)..(222): Homolog of NCBI NO: 15227591 NR Description: putative Golgi-associated membrane trafficking
  misc_feature (19)..(222): Homolog of NCBI NO: 8778403 NR Description: F16A14.23 [Arabidopsis thaliana]
  misc_feature (59)..(222): Homolog of NCBI NO: 26452085 NR Description: unknown protein [Arabidopsis thaliana]
  misc_feature (19)..(222): Homolog of NCBI NO: 15223027 NR Description: unknown protein; protein id: At1g14010.1
  misc_feature (8)..(222): Homolog of NCBI NO: 21618241 NR Description: unknown [Arabidopsis thaliana]
  misc_feature (8)..(222): Homolog of NCBI NO: 18396016 NR Description: expressed protein
  misc_feature (19)..(222): Homolog of NCBI NO: 12597802 NR Description: unknown protein [Arabidopsis thaliana]
  misc_feature (8)..(222): Homolog of NCBI NO: 22330523 NR Description: unknown protein
  misc_feature (182)..(182): Xaa is any aa, unknown or other
  misc_feature (214)..(214): Xaa is any aa, unknown or other
SDYYLSKMFILRSQKLWTVVMILVMSSRVTHSLHFDLHSGRTKCIAEDIKSNSMTVGKYSVDNPHEGHDLPQSHKISVKVTSSSGNAYHHADQVASGQFAFSAVEAGDYMACFSAVDHKPEVTLSIDFEWRTGVQSKSWATVAKKSQVETMEFDVKSLLDTVNSIHEEMFYLREREEEMQDXNRSTNTKMAWLSLLSLFVCIGVAAMQYVHLKXFFEKKKVI

SEQ ID NO: 135 - protein, 215 aa, Brassica napus
  peptide (1)..(215): Ceres Seq. ID no. 12473979
  misc_feature (11)..(215): Pfam Name: emp24/gp25L/p24 family Pfam Description: emp24/gp25L/p24 family
  misc_feature (1)..(215): Homolog of NCBI NO: 11994711 NR Description: golgi-associated membrane trafficking
  misc_feature (12)..(215): Homolog of NCBI NO: 33146897 NR Description: putative transmembrane protein
  misc_feature (1)..(215): Homolog of NCBI NO: 15227591 NR Description: putative Golgi-associated membrane trafficking
  misc_feature (12)..(215): Homolog of NCBI NO: 8778403 NR Description: F16A14.23 [Arabidopsis thaliana]
  misc_feature (52)..(215): Homolog of NCBI NO: 26452085 NR Description: unknown protein [Arabidopsis thaliana]
  misc_feature (12)..(215): Homolog of NCBI NO: 15223027 NR Description: unknown protein; protein id: At1g14010.1
  misc_feature (1)..(215): Homolog of NCBI NO: 21618241 NR Description: unknown [Arabidopsis thaliana]
  misc_feature (1)..(215): Homolog of NCBI NO: 18396016 NR Description: expressed protein
  misc_feature (12)..(215): Homolog of NCBI NO: 12597802 NR Description: unknown protein [Arabidopsis thaliana]
  misc_feature (1)..(215): Homolog of NCBI NO: 22330523 NR Description: unknown protein
  misc_feature (175)..(175): Xaa is any aa, unknown or other
  misc_feature (207)..(207): Xaa is any aa, unknown or other
MFILRSQKLWTVVMILVMSSRVTHSLHFDLHSGRTKCIAEDIKSNSMTVGKYSVDNPHEGHDLPQSHKISVKVTSSSGNAYHHADQVASGQFAFSAVEAGDYMACFSAVDHKPEVTLSIDFEWRTGVQSKSWATVAKKSQVETMEFDVKSLLDTVNSIHEEMFYLREREEEMQDXNRSTNTKMAWLSLLSLFVCIGVAAMQYVHLKXFFEKKKVI

SEQ ID NO: 136 - protein, 202 aa, Brassica napus
  peptide (1)..(202): Ceres Seq. ID no. 12473980
  misc_feature (1)..(202): Pfam Name: emp24/gp25L/p24 family Pfam Description: emp24/gp25L/p24 family
  misc_feature (1)..(202): Homolog of NCBI NO: 11994711 NR Description: golgi-associated membrane trafficking
  misc_feature (1)..(202): Homolog of NCBI NO: 33146897 NR Description: putative transmembrane protein
  misc_feature (1)..(202): Homolog of NCBI NO: 15227591 NR Description: putative Golgi-associated membrane trafficking
  misc_feature (1)..(202): Homolog of NCBI NO: 8778403 NR Description: F16A14.23 [Arabidopsis thaliana]
  misc_feature (39)..(202): Homolog of NCBI NO: 26452085 NR Description: unknown protein [Arabidopsis thaliana]
  misc_feature (1)..(202): Homolog of NCBI NO: 15223027 NR Description: unknown protein; protein id: At1g14010.1
  misc_feature (1)..(202): Homolog of NCBI NO: 21618241 NR Description: unknown [Arabidopsis thaliana]
  misc_feature (1)..(202): Homolog of NCBI NO: 18396016 NR Description: expressed protein
  misc_feature (1)..(202): Homolog of NCBI NO: 12597802 NR Description: unknown protein [Arabidopsis thaliana]
  misc_feature (1)..(202): Homolog of NCBI NO: 22330523 NR Description: unknown protein
  misc_feature (162)..(162): Xaa is any aa, unknown or other
  misc_feature (194)..(194): Xaa is any aa, unknown or other
MILVMSSRVTHSLHFDLHSGRTKCIAEDIKSNSMTVGKYSVDNPHEGHDLPQSHKISVKVTSSSGNAYHHADQVASGQFAFSAVEAGDYMACFSAVDHKPEVTLSIDFEWRTGVQSKSWATVAKKSQVETMEFDVKSLLDTVNSIHEEMFYLREREEEMQDXNRSTNTKMAWLSLLSLFVCIGVAAMQYVHLKXFFEKKKVI

SEQ ID NO: 137 - DNA, 763 bp, Brassica napus
  misc_feature (1)..(763): Ceres Seq. ID no. 13504224
aattgattccttcgtcaagcctcaatcactttcctcactcctctctctctcaaatcaacagcacgaagagatgaagcacctgatccgccgcctctcccgcgtcgccgactccgcgaactacagcctcctccgctccgattcgcagcgacctagccgccgtccaccgccgcctcgtcgctcgaagaagcacacatcctccgttcccgagggacacgtgcctgtctacgtgggagacgagatggagcggttcgtcgtgagcgcggagctgcttaaccacccggttttcatcggtttgttgaaccgatcggctcaagagtacggttacgaacagaaaggagttctgcagatcccctgccacgtgttggtattcgagcgaatcatggagtcgctccggctcggattagcggtgccgagcgacctacaagatctgatcggcgacgagacgatttgacacgcgagggaatctttggtagttagagagagatattgatctggttcttcttttttttggctcagatgcagtacgacgtcgtgttgatggtgtacatagctatatgtatatttttttttttcgggatgatgatgatgaaaagttcaaatgggaaggggaaagattagcgatatttttagggcttttctttttgaatttttttttctttttataaaatttgtttgttgcaaatttcctgtttttcgccggtttaagaaccggtttgagactcttgtgaaggtttatatggaaattgcttcggtttggttatgc

SEQ ID NO: 138 - protein, 149 aa, Brassica napus
  peptide (1)..(149): Ceres Seq. ID no. 13504225
  misc_feature (27)..(131): Pfam Name: Auxin responsive protein Pfam Description: Auxin responsive protein
  misc_feature (9)..(127): Homolog of NCBI NO: 15231081 NR Description: auxin-induced (indole-3-acetic acid induced)
  misc_feature (49)..(131): Homolog of NCBI NO: 15238919 NR Description: auxin-induced (indole-3-acetic acid induced)
  misc_feature (64)..(133): Homolog of NCBI NO: 5852079 NR Description: zwh0002.1 [Oryza sativa (indica cultivar-group)]
  misc_feature (58)..(129): Homolog of NCBI NO: 15236199 NR Description: auxin-induced (indole-3-acetic acid induced)
  misc_feature (51)..(149): Homolog of NCBI NO: 15228626 NR Description: auxin-induced (indole-3-acetic acid induced)
  misc_feature (64)..(133): Homolog of NCBI NO: 38345606 NR Description: OSJNBa0093O08.8 [Oryza sativa (japonica
  misc_feature (24)..(144): Homolog of NCBI NO: 15219296 NR Description: auxin-induced (indole-3-acetic acid induced)
  misc_feature (24)..(149): Homolog of NCBI NO: 15219275 NR Description: auxin-induced (indole-3-acetic acid induced)
  misc_feature (24)..(135): Homolog of NCBI NO: 15223462 NR Description: auxin-induced (indole-3-acetic acid induced)
  misc_feature (24)..(149): Homolog of NCBI NO: 15230601 NR Description: auxin-induced (indole-3-acetic acid induced)
IDSFVKPQSLSSLLSLSNQQHEEMKHLIRRLSRVADSANYSLLRSDSQRPSRRPPPPRRSKKHTSSVPEGHVPVYVGDEMERFVVSAELLNHPVFIGLLNRSAQEYGYEQKGVLQIPCHVLVFERIMESLRLGLAVPSDLQDLIGDETI

SEQ ID NO: 139 - protein, 126 aa, Brassica napus
  peptide (1)..(126): Ceres Seq. ID no. 13504226
  misc_feature (4)..(108): Pfam Name: Auxin responsive protein Pfam Description: Auxin responsive protein
  misc_feature (1)..(104): Homolog of NCBI NO: 15231081 NR Description: auxin-induced (indole-3-acetic acid induced)
  misc_feature (26)..(108): Homolog of NCBI NO: 15238919 NR Description: auxin-induced (indole-3-acetic acid induced)
  misc_feature (41)..(110): Homolog of NCBI NO: 5852079 NR Description: zwh0002.1 [Oryza sativa (indica cultivar-group)]
  misc_feature (35)..(106): Homolog of NCBI NO: 15236199 NR Description: auxin-induced (indole-3-acetic acid induced)
  misc_feature (28)..(126): Homolog of NCBI NO: 15228626 NR Description: auxin-induced (indole-3-acetic acid induced)
  misc_feature (41)..(110): Homolog of NCBI NO: 38345606 NR Description: OSJNBa0093O08.8 [Oryza sativa (japonica
  misc_feature (1)..(121): Homolog of NCBI NO: 15219296 NR Description: auxin-induced (indole-3-acetic acid induced)
  misc_feature (1)..(126): Homolog of NCBI NO: 15219275 NR Description: auxin-induced (indole-3-acetic acid induced)
  misc_feature (1)..(112): Homolog of NCBI NO: 15223462 NR Description: auxin-induced (indole-3-acetic acid induced)
  misc_feature (1)..(126): Homolog of NCBI NO: 15230601 NR Description: auxin-induced (indole-3-acetic acid induced)
MKHLIRRLSRVADSANYSLLRSDSQRPSRRPPPPRRSKKHTSSVPEGHVPVYVGDEMERFVVSAELLNHPVFIGLLNRSAQEYGYEQKGVLQIPCHVLVFERIMESLRLGLAVPSDLQDLIGDETI

SEQ ID NO: 140 - DNA, 618 bp, Brassica napus
  misc_feature (1)..(618): Ceres Seq. ID no. 12557027
aagaccgtccattgtgagtcggttgcaaaaatcaacatagatgggaaaaaatctcaccttgaatcctttttgattgaaataaaatctcaaattcgatcaaagaaatgcaaacatcatctgttcctcctggaagaagtctctacctcaacctcatcgtcgtcgtcttagcgctctttgcatcgatcaccatggcagaatccaccggagaagcatcgtccgaagcgaaggtccacatcatctacaccgagaaacccaccgatgaggaacctaaagactatcatctccgtactctctcctccgctctcggcagtgaggaagcagcaaaggacgctctgatctacagttacaaggaagctgcttctggtttctcagctaagctcacacctgagcaagtcaccaagatctccaaactaccaggtgtgattcaagttgtgccgagccagacctaccagttgcacaaacctgttggtgctggtttcaagctgacttaactaaaatgtagcttcttgttgttgtaaatgtcgtggctttcagaactggtatctaactataataatgccatgaatttgctagagttctgtgttgttgagaaattgggttttataattatattatttt

SEQ ID NO: 141 - protein, 128 aa, Brassica napus
  peptide (1)..(128): Ceres Seq. ID no. 12557028
  misc_feature (41)..(118): Pfam Name: Subtilisin N-terminal Region Pfam Description: Subtilisin N-terminal Region
  misc_feature (18)..(117): Homolog of NCBI NO: 18413347 NR Description: subtilisin-like serine protease; protein id:
  misc_feature (18)..(117): Homolog of NCBI NO: 18413349 NR Description: subtilisin-like serine protease; protein id:
  misc_feature (13)..(117): Homolog of NCBI NO: 7435680 NR Description: subtilisin-like proteinase homolog T4F9.10 -
  misc_feature (13)..(117): Homolog of NCBI NO: 18413353 NR Description: subtilisin-like serine protease; protein id:
  misc_feature (13)..(117): Homolog of NCBI NO: 4115920 NR Description: similar to the subtilase family of serine
  misc_feature (20)..(115): Homolog of NCBI NO: 34394844 NR Description: unknown protein [Oryza sativa (japonica
  misc_feature (18)..(118): Homolog of NCBI NO: 3204125 NR Description: putative Pi starvation-induced protein [Cicer
  misc_feature (29)..(118): Homolog of NCBI NO: 7489176 NR Description: pit2 protein (clone pAL141), Pi starvation
  misc_feature (1)..(128): Homolog of NCBI NO: 21593285 NR Description: unknown [Arabidopsis thaliana]
  misc_feature (1)..(128): Homolog of NCBI NO: 18409953 NR Description: expressed protein
MQTSSVPPGRSLYLNLIVVVLALFASITMAESTGEASSEAKVHIIYTEKPTDEEPKDYHLRTLSSALGSEEAAKDALIYSYKEAASGFSAKLTPEQVTKISKLPGVIQVVPSQTYQLHKPVGAGFKLT

SEQ ID NO: 142 - protein, 100 aa, Brassica napus
  peptide (1)..(100): Ceres Seq. ID no. 12557029
  misc_feature (13)..(90): Pfam Name: Subtilisin N-terminal Region Pfam Description: Subtilisin N-terminal Region
  misc_feature (1)..(89): Homolog of NCBI NO: 4115920 NR Description: similar to the subtilase family of serine
  misc_feature (1)..(87): Homolog of NCBI NO: 34394844 NR Description: unknown protein [Oryza sativa (japonica
  misc_feature (1)..(90): Homolog of NCBI NO: 3204125 NR Description: putative Pi starvation-induced protein [Cicer
  misc_feature (1)..(89): Homolog of NCBI NO: 18413347 NR Description: subtilisin-like serine protease; protein id:
  misc_feature (1)..(89): Homolog of NCBI NO: 7435680 NR Description: subtilisin-like proteinase homolog T4F9.10 -
  misc_feature (1)..(89): Homolog of NCBI NO: 18413353 NR Description: subtilisin-like serine protease; protein id:
  misc_feature (1)..(89): Homolog of NCBI NO: 18413349 NR Description: subtilisin-like serine protease; protein id:
  misc_feature (1)..(90): Homolog of NCBI NO: 7489176 NR Description: pit2 protein (clone pAL141), Pi starvation
  misc_feature (1)..(100): Homolog of NCBI NO: 21593285 NR Description: unknown [Arabidopsis thaliana]
  misc_feature (1)..(100): Homolog of NCBI NO: 18409953 NR Description: expressed protein
MAESTGEASSEAKVHIIYTEKPTDEEPKDYHLRTLSSALGSEEAAKDALIYSYKEAASGFSAKLTPEQVTKISKLPGVIQVVPSQTYQLHKPVGAGFKLT

SEQ ID NO: 143 - DNA, 945 bp, Brassica napus
  misc_feature (1)..(945): Ceres Seq. ID no. 12472003
  misc_feature (934)..(934): n is a, c, t, g, unknown, or other
caccgtgtcaccgcttttgaagtaacaatgccgcagggagattacatcgagctgcaccagaagaggcatggacgccgcctcgattacgaggagcgcaagcgcaagaaggaggcgcgtgcagttcacaagcgctccaaacaagctcaaaactctataggtataaagggtaagatgattgctaagaagaactacgctgagaaagctcaaatgaagaaaacattgaagatgcatgaggagagttcatcaaggcgtaaagctgatgaggatgttcaggaaggagctgttcctgcttatcttcttgatcgtgagaacacctctcgtgccaaggttcttagcaatactattaaacagaagaggaaggagaaagctgggaagtgggaggttcctctgccaaaggttcgtcctgtggctgaagatgagatgttcagagtgatcagatccgggaagaggaaaacaaaacagtggaagaggatggttacgaaagctacatttgttggacctggtttcacaaggaagccgccaaagtacgagcgattcatccgcccttntgggctgcgtttcaccaaggcccacgtcactcaccctgagntaagatgcactttttgtctcgagatcattgggatcaagaagaatcccaacggtcctatgtatacgtcccttggtgtcatgaccagaggaacaatcattgaggtcaatgtgagtgagcttggtcttgttacaccagctggaaaagttgtntgggggaagtacgctcaggtgacaaacaatcctgagaatgacggatgtataaacgctgttctgcttgtgtaatcaaaatctccggcaagaataacgttgtttactttcttttttagttctctcctgaaaacaattttgtctttgactcgagtcttttatgtatctgtgtggtttaatacaatttaagcaaagcctnttttccgtttc

SEQ ID NO: 144 - protein, 269 aa, Brassica napus
  peptide (1)..(269): Ceres Seq. ID no. 12472004
  misc_feature (10)..(246): Pfam Name: Ribosomal protein S8e Pfam Description: Ribosomal protein S8e
  misc_feature (10)..(269): Homolog of NCBI NO: 9438133 NR Description: unknown [Ochlerotatus triseriatus]
  misc_feature (10)..(269): Homolog of NCBI NO: 29248956 NR Description: GLP_159_37795_38577 [Giardia lamblia ATCC 50803]
  misc_feature (10)..(269): Homolog of NCBI NO: 28278483 NR Description: Similar to RIKEN cDNA 5730427N09 gene [Danio
  misc_feature (10)..(269): Homolog of NCBI NO: 12856931 NR Description: unnamed protein product [Mus musculus]
  misc_feature (10)..(269): Homolog of NCBI NO: 34924868 NR Description: TGF beta-inducible nuclear protein 1 (CDK105
  misc_feature (10)..(269): Homolog of NCBI NO: 34925411 NR Description: TGF beta-inducible nuclear protein 1 (L-name
  misc_feature (10)..(269): Homolog of NCBI NO: 7662677 NR Description: hypothetical protein YR-29
  misc_feature (10)..(269): Homolog of NCBI NO: 33146852 NR Description: putative TGF(transfoming growth factor) beta
  misc_feature (10)..(269): Homolog of NCBI NO: 21553587 NR Description: unknown [Arabidopsis thaliana]
  misc_feature (10)..(269): Homolog of NCBI NO: 15240023 NR Description: putative protein
  misc_feature (183)..(183): Xaa is any aa, unknown or other
  misc_feature (197)..(197): Xaa is any aa, unknown or other
  misc_feature (246)..(246): Xaa is any aa, unknown or other
HRVTAFEVTMPQGDYIELHQKRHGRRLDYEERKRKKEARAVHKRSKQAQNSIGIKGKMIAKKNYAEKAQMKKTLKMHEESSSRRKADEDVQEGAVPAYLLDRENTSRAKVLSNTIKQKRKEKAGKWEVPLPKVRPVAEDEMFRVIRSGKRKTKQWKRMVTKATFVGPGFTRKPPKYERFIRPXGLRFTKAHVTHPEXRCTFCLEIIGIKKNPNGPMYTSLGVMTRGTIIEVNVSELGLVTPAGKVXWGKYAQVTNNPENDGCINAVLLV

SEQ ID NO: 145 - protein, 260 aa, Brassica napus
  peptide (1)..(260): Ceres Seq. ID no. 12472005
  misc_feature (1)..(237): Pfam Name: Ribosomal protein S8e Pfam Description: Ribosomal protein S8e
  misc_feature (1)..(260): Homolog of NCBI NO: 9438133 NR Description: unknown [Ochlerotatus triseriatus]
  misc_feature (1)..(260): Homolog of NCBI NO: 29248956 NR Description: GLP_159_37795_38577 [Giardia lamblia ATCC 50803]
  misc_feature (1)..(260): Homolog of NCBI NO: 28278483 NR Description: Similar to RIKEN cDNA 5730427N09 gene [Danio
  misc_feature (1)..(260): Homolog of NCBI NO: 12856931 NR Description: unnamed protein product [Mus musculus]
  misc_feature (1)..(260): Homolog of NCBI NO: 34924868 NR Description: TGF beta-inducible nuclear protein 1 (CDK105
  misc_feature (1)..(260): Homolog of NCBI NO: 34925411 NR Description: TGF beta-inducible nuclear protein 1 (L-name
  misc_feature (1)..(260): Homolog of NCBI NO: 7662677 NR Description: hypothetical protein YR-29
  misc_feature (1)..(260): Homolog of NCBI NO: 33146852 NR Description: putative TGF(transfoming growth factor) beta
  misc_feature (1)..(260): Homolog of NCBI NO: 21553587 NR Description: unknown [Arabidopsis thaliana]
  misc_feature (1)..(260): Homolog of NCBI NO: 15240023 NR Description: putative protein
  misc_feature (174)..(174): Xaa is any aa, unknown or other
  misc_feature (188)..(188): Xaa is any aa, unknown or other
  misc_feature (237)..(237): Xaa is any aa, unknown or other
MPQGDYIELHQKRHGRRLDYEERKRKKEARAVHKRSKQAQNSIGIKGKMIAKKNYAEKAQMKKTLKMHEESSSRRKADEDVQEGAVPAYLLDRENTSRAKVLSNTIKQKRKEKAGKWEVPLPKVRPVAEDEMFRVIRSGKRKTKQWKRMVTKATFVGPGFTRKPPKYERFIRPXGLRFTKAHVTHPEXRCTFCLEIIGIKKNPNGPMYTSLGVMTRGTIIEVNVSELGLVTPAGKVXWGKYAQVTNNPENDGCINAVLLV

SEQ ID NO: 146 - protein, 212 aa, Brassica napus
  peptide (1)..(212): Ceres Seq. ID no. 12472006
  misc_feature (1)..(189): Pfam Name: Ribosomal protein S8e Pfam Description: Ribosomal protein S8e
  misc_feature (1)..(212): Homolog of NCBI NO: 9438133 NR Description: unknown [Ochlerotatus triseriatus]
  misc_feature (1)..(212): Homolog of NCBI NO: 29248956 NR Description: GLP_159_37795_38577 [Giardia lamblia ATCC 50803]
  misc_feature (1)..(212): Homolog of NCBI NO: 28278483 NR Description: Similar to RIKEN cDNA 5730427N09 gene [Danio
  misc_feature (1)..(212): Homolog of NCBI NO: 12856931 NR Description: unnamed protein product [Mus musculus]
  misc_feature (1)..(212): Homolog of NCBI NO: 34924868 NR Description: TGF beta-inducible nuclear protein 1 (CDK105
  misc_feature (1)..(212): Homolog of NCBI NO: 34925411 NR Description: TGF beta-inducible nuclear protein 1 (L-name
  misc_feature (1)..(212): Homolog of NCBI NO: 7662677 NR Description: hypothetical protein YR-29
  misc_feature (1)..(212): Homolog of NCBI NO: 33146852 NR Description: putative TGF(transfoming growth factor) beta
  misc_feature (1)..(212): Homolog of NCBI NO: 21553587 NR Description: unknown [Arabidopsis thaliana]
  misc_feature (1)..(212): Homolog of NCBI NO: 15240023 NR Description: putative protein
  misc_feature (126)..(126): Xaa is any aa, unknown or other
  misc_feature (140)..(140): Xaa is any aa, unknown or other
  misc_feature (189)..(189): Xaa is any aa, unknown or other
MIAKKNYAEKAQMKKTLKMHEESSSRRKADEDVQEGAVPAYLLDRENTSRAKVLSNTIKQKRKEKAGKWEVPLPKVRPVAEDEMFRVIRSGKRKTKQWKRMVTKATFVGPGFTRKPPKYERFIRPXGLRFTKAHVTHPEXRCTFCLEIIGIKKNPNGPMYTSLGVMTRGTIIEVNVSELGLVTPAGKVXWGKYAQVTNNPENDGCINAVLLV

SEQ ID NO: 147 - DNA, 999 bp, Brassica napus
  misc_feature (1)..(999): Ceres Seq. ID no. 12465955
ataagaaacaatacttccttcgtaatctccgcctcgtatctcttatataactcatctctctaaacctaaaaaatgttcctctccgttaaatctaacggtcatgtcaactaataccgtcgtccctctccgtcgcagatctaacggatatcacactaacggcgtggcctttaacggaatggataatattgtcaagaaaaccgacgactgctacaccaacggcaacggcaacggaggagtagagagaagcaaagcctcgtttctgacatggaccatgcgtgacgctgtctacgtagcgagataccattggataccgtgtttctttgcggtcggagttctgttctttatgggggttgagtacacgctccagatggttccggcgaagtctgagccgttcgatattgggtttgtggccacgcgctctctaaaccgcgtcttggcgagttcaccggatcttaacacccttttagcggctctaaacacggtattcgtagcgatgcaaacgacgtatattgtatggacatggttgatggaaggaagaccacgagccnctatctcggcttgcttcatgtttacttgtcgcggcattnttggttactctactcagctccctctaccncaggattttttaggatcaggagttgattttccggtgggaaacgtctcattcttcctcttctattctggccacgtagccggttcaatgatcgcatccttggacatgaggagaatgcagaggttgagactagcgatgctttttgacatcctcaacatattacaatcgatcagactgctcgggacgagaggacnctacacgatcgatcttgcggtcggagttggcgctgggattctctttgactcattggccgggaagtacgaagagatgatgagcaagagacncaatttagccaatggttttagtttgatttntaaagactcgctagtcaattaatcttttgttttcattttaaatgattagttgaacttgaacatatttgattt

SEQ ID NO: 148 - protein, 282 aa, Brassica napus
  peptide (1)..(282): Ceres Seq. ID no. 12465956
  misc_feature (3)..(281): Homolog of NCBI NO: 15232701 NR Description: unknown protein; protein id: At3g15830.1
  misc_feature (26)..(282): Homolog of NCBI NO: 13926235 NR Description: AT3g15820/MSJ11_22 [Arabidopsis thaliana]
  misc_feature (1)..(282): Homolog of NCBI NO: 18400910 NR Description: expressed protein
  misc_feature (150)..(150): Xaa is any aa, unknown or other
  misc_feature (163)..(163): Xaa is any aa, unknown or other
  misc_feature (172)..(172): Xaa is any aa, unknown or other
  misc_feature (236)..(236): Xaa is any aa, unknown or other
  misc_feature (266)..(266): Xaa is any aa, unknown or other
  misc_feature (276)..(276): Xaa is any aa, unknown or other
MSTNTVVPLRRRSNGYHTNGVAFNGMDNIVKKTDDCYTNGNGNGGVERSKASFLTWTMRDAVYVARYHWIPCFFAVGVLFFMGVEYTLQMVPAKSEPFDIGFVATRSLNRVLASSPDLNTLLAALNTVFVAMQTTYIVWTWLMEGRPRAXISACFMFTCRGIXGYSTQLPLXQDFLGSGVDFPVGNVSFFLFYSGHVAGSMIASLDMRRMQRLRLAMLFDILNILQSIRLLGTRGXYTIDLAVGVGAGILFDSLAGKYEEMMSKRXNLANGFSLIXKDSLVN

SEQ ID NO: 149 - protein, 257 aa, Brassica napus
  peptide (1)..(257): Ceres Seq. ID no. 12465957
  misc_feature (1)..(256): Homolog of NCBI NO: 15232701 NR Description: unknown protein; protein id: At3g15830.1
  misc_feature (1)..(257): Homolog of NCBI NO: 13926235 NR Description: AT3g15820/MSJ11_22 [Arabidopsis thaliana]
  misc_feature (1)..(257): Homolog of NCBI NO: 18400910 NR Description: expressed protein
  misc_feature (125)..(125): Xaa is any aa, unknown or other
  misc_feature (138)..(138): Xaa is any aa, unknown or other
  misc_feature (147)..(147): Xaa is any aa, unknown or other
  misc_feature (211)..(211): Xaa is any aa, unknown or other
  misc_feature (241)..(241): Xaa is any aa, unknown or other
  misc_feature (251)..(251): Xaa is any aa, unknown or other
MDNIVKKTDDCYTNGNGNGGVERSKASFLTWTMRDAVYVARYHWIPCFFAVGVLFFMGVEYTLQMVPAKSEPFDIGFVATRSLNRVLASSPDLNTLLAALNTVFVAMQTTYIVWTWLMEGRPRAXISACFMFTCRGIXGYSTQLPLXQDFLGSGVDFPVGNVSFFLFYSGHVAGSMIASLDMRRMQRLRLAMLFDILNILQSIRLLGTRGXYTIDLAVGVGAGILFDSLAGKYEEMMSKRXNLANGFSLIXKDSLVN

SEQ ID NO: 150 - protein, 225 aa, Brassica napus
  peptide (1)..(225): Ceres Seq. ID no. 12465958
  misc_feature (1)..(224): Homolog of NCBI NO: 15232701 NR Description: unknown protein; protein id: At3g15830.1
  misc_feature (1)..(225): Homolog of NCBI NO: 13926235 NR Description: AT3g15820/MSJ11_22 [Arabidopsis thaliana]
  misc_feature (1)..(225): Homolog of NCBI NO: 18400910 NR Description: expressed protein
  misc_feature (93)..(93): Xaa is any aa, unknown or other
  misc_feature (106)..(106): Xaa is any aa, unknown or other
  misc_feature (115)..(115): Xaa is any aa, unknown or other
  misc_feature (179)..(179): Xaa is any aa, unknown or other
  misc_feature (209)..(209): Xaa is any aa, unknown or other
  misc_feature (219)..(219): Xaa is any aa, unknown or other
MRDAVYVARYHWIPCFFAVGVLFFMGVEYTLQMVPAKSEPFDIGFVATRSLNRVLASSPDLNTLLAALNTVFVAMQTTYIVWTWLMEGRPRAXISACFMFTCRGIXGYSTQLPLXQDFLGSGVDFPVGNVSFFLFYSGHVAGSMIASLDMRRMQRLRLAMLFDILNILQSIRLLGTRGXYTIDLAVGVGAGILFDSLAGKYEEMMSKRXNLANGFSLIXKDSLVN

SEQ ID NO: 151 - DNA, 1244 bp, Arabidopsis thaliana
  misc_feature (1)..(1244): Ceres Seq. ID no. 13647121
gagaaacaacaatcaaaatacaattatacaatattaaacatttaacaaaataaaaaaatacaacttaaaactttaaaatttgagttataaaatttcgtctcgcggtgaattatacatttaaatcaaacaatagcataaatttattaaatcatcctacaaaatattcagttattttttaattaatgaaaatataagcccgcggtataccgcaggttaatatctagataaaaaaaataatcaaatttcaattctataaacatactaaataatatatctaaatatacaaaatataaaaaataacaaataattataagactgtgaattatatattacgaaagtaattactgtcaacactaaaataaaatatagacccgcggtataccgcgggttaaaatctagtatatactaaaactgttggtttttttttaatatataaattaacaaaatttatatatgctgcaaaacgagacctggttatatttggttatgagttgaaatagcaagttacctgagcaccaaggagtttcatggaaagtacattaaaggattgtttctctatatcagcagctcccatgaaaacagtacactccaaggagagctttgcacatgcagccgctgtggcgactccatgttgtccggctccagtggccgccaccacacggctgcaaccaagccgccgggaaatcatggcctgagcgagagcattattgattttgtgagacccacagtggctaagatcttcccgtttcaagtatatctctggtccaccttcgatggttggaactatgttcttgtagtgttcggttagacgttcggcgaagtagagaggcgtttctcttcctacgtagtctcttaacgctgtggtaagctcctcctgaaattcgtgatcgcacctaacaaagttaaattcgtcttcaagttctatcaggcgagacatcaatgtctccggtacaaatttcccaccgaacctcccgaatttaccgttaccgtcaccacgaagaaactgcctcttgtcggttcttgttgggaccgaatccaacgatggaccactattactgctgagtgcattgatttcacggtggtggcgttttgtggaaacgccgcaaacaatcaagtgtgtcatacggtggtttcttgccggaaccctaagaagtggctgccctcgtacctggattttactggacaacattttctctctcttttctttcttccagaatacttgttatatctatttgagattttct

SEQ ID NO: 152 - protein, 59 aa, Arabidopsis thaliana
  peptide (1)..(59): Ceres Seq. ID no. 13647122
MLSGSSGRHHTAATKPPGNHGLSESIIDFVRPTVAKIFPFQVYLWSTFDGWNYVLVVFG

SEQ ID NO: 153 - protein, 55 aa, Arabidopsis thaliana
  peptide (1)..(55): Ceres Seq. ID no. 13647123
MESTLKDCFSISAAPMKTVHSKESFAHAAAVATPCCPAPVAATTRLQPSRREIMA

SEQ ID NO: 154 - protein, 40 aa, Arabidopsis thaliana
  peptide (1)..(40): Ceres Seq. ID no. 13647124
MKTVHSKESFAHAAAVATPCCPAPVAATTRLQPSRREIMA

SEQ ID NO: 155 - DNA, 555 bp, Arabidopsis thaliana
  misc_feature (1)..(555): Ceres Seq. ID no. 13646302
  misc_feature: MA Experiment ID: 20000355 Result: Up-regulated in Transcription
  misc_feature: MA Experiment 20000355 PARAMETER Experiment Name: At_Siliques_Sub_P Parameter: Age (day) Value: 21
  misc_feature: MA Experiment 20000355 PARAMETER Experiment Name: At_Siliques_Sub_P Parameter: Organism Value: A. thaliana
  misc_feature: MA Experiment 20000355 PARAMETER Experiment Name: At_Siliques_Sub_P Parameter: Plant Line Value: WS
  misc_feature: MA Experiment 20000355 PARAMETER Experiment Name: At_Siliques_Sub_P Parameter: Tissue Value: Less Than 5mm Siliques vs. Whole Plant
atcaacattcacaattcacaaaaaaatacttgttcagttattaaagataaatctctcagaaaagaaaaaaaaaatggtgaacacaaaaattgtagccttgttaatggtggtgatgatggtaacaatgggaatggagaacattttggttcaggcaaatcgtcgtcatcatcattctccttccccttctccttcatctgattttgatgatagtggttcaaaatctccttctccttcaccaaaatcaaaagaaaagtcatcaacatattgcatgattggctgttcttttgagaagtgctttcaccatggaaaaagctcaagcgatgtggaaaagtatgacttatgcatgaaaaaatgttcgaagatatgcaacaagaagaaggaaagcgatgacatatatgtctaaattactaaagagcaaatgattgttgtttcgcatctactatgtctttgtcttattacttactcatcagatgtatatctctcataatatttttttatgagacgtaatcataataaatatatataaaggatataataaacattgatagtttcttt

SEQ ID NO: 156 - protein, 133 aa, Arabidopsis thaliana
  peptide (1)..(133): Ceres Seq. ID no. 13646303
STFTIHKKILVQLLKINLSEKKKKMVNTKIVALLMVVMMVTMGMENILVQANRRHHHSPSPSPSSDFDDSGSKSPSPSPKSKEKSSTYCMIGCSFEKCFHHGKSSSDVEKYDLCMKKCSKICNKKKESDDIYV

SEQ ID NO: 157 - protein, 109 aa, Arabidopsis thaliana
  peptide (1)..(109): Ceres Seq. ID no. 13646304
MVNTKIVALLMVVMMVTMGMENILVQANRRHHHSPSPSPSSDFDDSGSKSPSPSPKSKEKSSTYCMIGCSFEKCFHHGKSSSDVEKYDLCMKKCSKICNKKKESDDIYV

SEQ ID NO: 158 - protein, 99 aa, Arabidopsis thaliana
  peptide (1)..(99): Ceres Seq. ID no. 13646305
MVVMMVTMGMENILVQANRRHHHSPSPSPSSDFDDSGSKSPSPSPKSKEKSSTYCMIGCSFEKCFHHGKSSSDVEKYDLCMKKCSKICNKKKESDDIYV

SEQ ID NO: 159 - DNA, 594 bp, Arabidopsis thaliana
  misc_feature (1)..(594): Ceres Seq. ID no. 13647621
ggggaaataatggcgtagctctactagctcaagtttgagctctcccataatgagtacatcaagcttgtcctccatctcctgcctcctctggagatctctctcatgatgacttcgaaggtatgagaaactacagagataatgttaaactgcaacaaggttttagaacaccgggcagcccttagcgacgatccctttctctgttgggcaatttgccaaagggcaatggtctgtgttctcattcccccaccaatctggtaagcttatgttattgttctgtaacgcaaagtagatcaacactcccataaccgcagtgcctgcatcaagagctgcagagaggatgtagttatgccttgcccaccatcccttgtacctcctgaagatatagtagttgaacacgatcccaacagcgaaccacgaccagtaatgcacagccttggccattggcatcacattagcccctgagaagatcaagggaatatgaatctgatgtatccacttcttctccgggaatttccttgcaaagaaccagaccgggacaggagcaaggaagccaatgaggaagaaccagttcatcccggggtatatacctttact

SEQ ID NO: 160 - protein, 39 aa, Arabidopsis thaliana
  peptide (1)..(39): Ceres Seq. ID no. 13647622
MLNCNKVLEHRAALSDDPFLCWAICQRAMVCVLIPPPIW

SEQ ID NO: 161 - protein, 38 aa, Arabidopsis thaliana
  peptide (1)..(38): Ceres Seq. ID no. 13647623
MPCPPSLVPPEDIVVEHDPNSEPRPVMHSLGHWHHISP

SEQ ID NO: 162 - protein, 39 aa, Arabidopsis thaliana
  peptide (1)..(39): Ceres Seq. ID no. 13647624
MNLMYPLLLREFPCKEPDRDRSKEANEEEPVHPGVYTFT

SEQ ID NO: 163 - DNA, 536 bp, Arabidopsis thaliana
  misc_feature (1)..(536): Ceres Seq. ID no. 14307583
  misc_feature: MA Experiment ID: 20000173 Result: Down-regulated in Transcription
  misc_feature: MA Experiment 20000173 PARAMETER Experiment Name: At_42deg_Heat_P Parameter: Age (day) Value: 14
  misc_feature: MA Experiment 20000173 PARAMETER Experiment Name: At_42deg_Heat_P Parameter: Organism Value: A. thaliana
  misc_feature: MA Experiment 20000173 PARAMETER Experiment Name: At_42deg_Heat_P Parameter: Plant Line Value: WS
  misc_feature: MA Experiment 20000173 PARAMETER Experiment Name: At_42deg_Heat_P Parameter: Temperature (deg C) Value: 42 vs. 22
  misc_feature: MA Experiment 20000173 PARAMETER Experiment Name: At_42deg_Heat_P Parameter: Timepoint (hr) Value: 6
  misc_feature: MA Experiment 20000173 PARAMETER Experiment Name: At_42deg_Heat_P Parameter: Tissue Value: Aerial
  misc_feature: MA Experiment ID: 20000180 Result: Up-regulated in Transcription
  misc_feature: MA Experiment 20000180 PARAMETER Experiment Name: At_Germinating_Seeds_P Parameter: Age (hr) Value: 24 vs. 0
  misc_feature: MA Experiment 20000180 PARAMETER Experiment Name: At_Germinating_Seeds_P Parameter: Tissue Value: Germinating Seeds
  misc_feature: MA Experiment ID: 20000182 Result: Down-regulated in Transcription
  misc_feature: MA Experiment 20000182 PARAMETER Experiment Name: At_2mM_SA_P Parameter: Age (day) Value: 14
  misc_feature: MA Experiment 20000182 PARAMETER Experiment Name: At_2mM_SA_P Parameter: Organism Value: A. thaliana
  misc_feature: MA Experiment 20000182 PARAMETER Experiment Name: At_2mM_SA_P Parameter: Plant Line Value: WS
  misc_feature: MA Experiment 20000182 PARAMETER Experiment Name: At_2mM_SA_P Parameter: Timepoint (hr) Value: 6
  misc_feature: MA Experiment 20000182 PARAMETER Experiment Name: At_2mM_SA_P Parameter: Tissue Value: Aerial
  misc_feature: MA Experiment 20000182 PARAMETER Experiment Name: At_2mM_SA_P Parameter: Treatment Value: 2mM SA vs. No Treatment
  misc_feature: MA Experiment ID: 20000185 Result: Down-regulated in Transcription
  misc_feature: MA Experiment 20000185 PARAMETER Experiment Name: At_Roots__P Parameter: Age (day) Value: 7 vs. 21
  misc_feature: MA Experiment 20000185 PARAMETER Experiment Name: At_Roots__P Parameter: Organism Value: A. thaliana
  misc_feature: MA Experiment 20000185 PARAMETER Experiment Name: At_Roots__P Parameter: Tissue Value: Roots vs. Whole Plant
  misc_feature: MA Experiment ID: 20000436 Result: Down-regulated in Transcription
  misc_feature: MA Experiment 20000436 PARAMETER Experiment Name: At_Drought_P Parameter: Age (day) Value: 7
  misc_feature: MA Experiment 20000436 PARAMETER Experiment Name: At_Drought_P Parameter: Organism Value: A. thaliana
  misc_feature: MA Experiment 20000436 PARAMETER Experiment Name: At_Drought_P Parameter: Plant Line Value: WS
  misc_feature: MA Experiment 20000436 PARAMETER Experiment Name: At_Drought_P Parameter: Timepoint (hr) Value: 12
  misc_feature: MA Experiment 20000436 PARAMETER Experiment Name: At_Drought_P Parameter: Tissue Value: Whole Plant
  misc_feature: MA Experiment 20000436 PARAMETER Experiment Name: At_Drought_P Parameter: Treatment Value: Drought vs. No Drought
  misc_feature: MA Experiment ID: 20000437 Result: Down-regulated in Transcription
  misc_feature: MA Experiment 20000437 PARAMETER Experiment Name: At_Drought_P Parameter: Age (day) Value: 8
  misc_feature: MA Experiment 20000437 PARAMETER Experiment Name: At_Drought_P Parameter: Organism Value: A. thaliana
  misc_feature: MA Experiment 20000437 PARAMETER Experiment Name: At_Drought_P Parameter: Plant Line Value: WS
  misc_feature: MA Experiment 20000437 PARAMETER Experiment Name: At_Drought_P Parameter: Timepoint (hr) Value: 24
  misc_feature: MA Experiment 20000437 PARAMETER Experiment Name: At_Drought_P Parameter: Tissue Value: Whole Plant
  misc_feature: MA Experiment 20000437 PARAMETER Experiment Name: At_Drought_P Parameter: Treatment Value: Drought vs. No Drought
  misc_feature: MA Experiment ID: 20000438 Result: Up-regulated in Transcription
  misc_feature: MA Experiment 20000438 PARAMETER Experiment Name: At_Shoots__P Parameter: Age (day) Value: 14
  misc_feature: MA Experiment 20000438 PARAMETER Experiment Name: At_Shoots__P Parameter: Tissue Value: Shoots vs. Whole Plant
  misc_feature: MA Experiment ID: 20000439 Result: Down-regulated in Transcription
  misc_feature: MA Experiment 20000439 PARAMETER Experiment Name: At_Roots__P Parameter: Age (day) Value: 14 vs. 21
  misc_feature: MA Experiment 20000439 PARAMETER Experiment Name: At_Roots__P Parameter: Organism Value: A. thaliana
  misc_feature: MA Experiment 20000439 PARAMETER Experiment Name: At_Roots__P Parameter: Tissue Value: Roots vs. Whole Plant
  misc_feature: MA Experiment ID: 20000794 Result: Down-regulated in Transcription
  misc_feature: MA Experiment 20000794 PARAMETER Experiment Name: At_Petals_P Parameter: Age (day) Value: 23-25 days
  misc_feature: MA Experiment 20000794 PARAMETER Experiment Name: At_Petals_P Parameter: Plant Line Value: WS
  misc_feature: MA Experiment 20000794 PARAMETER Experiment Name: At_Petals_P Parameter: Tissue Value: Petals vs. Whole plant
  misc_feature: MA Experiment ID: 20001557 Result: Down-regulated in Transcription
  misc_feature: MA Experiment 20001557 PARAMETER Experiment Name: At_Drought_Soil_Dry_P Parameter: Age (day) Value: 27
  misc_feature: MA Experiment 20001557 PARAMETER Experiment Name: At_Drought_Soil_Dry_P Parameter: Organism Value: A. thaliana
  misc_feature: MA Experiment 20001557 PARAMETER Experiment Name: At_Drought_Soil_Dry_P Parameter: Plant Line Value: WS
  misc_feature: MA Experiment 20001557 PARAMETER Experiment Name: At_Drought_Soil_Dry_P Parameter: Post Timepoint (hr) Value: 3
  misc_feature: MA Experiment 20001557 PARAMETER Experiment Name: At_Drought_Soil_Dry_P Parameter: Post-Treatment Value: Re-Water vs. No Drought
  misc_feature: MA Experiment 20001557 PARAMETER Experiment Name: At_Drought_Soil_Dry_P Parameter: Timepoint (day) Value: 13
  misc_feature: MA Experiment 20001557 PARAMETER Experiment Name: At_Drought_Soil_Dry_P Parameter: Treatment Value: Drought vs. No Drought
  misc_feature: MA Experiment ID: 20001904 Result: Down-regulated in Transcription
  misc_feature: MA Experiment 20001904 PARAMETER Experiment Name: At_Drought_Reproduction_P Parameter: Age (day) Value: 37
  misc_feature: MA Experiment 20001904 PARAMETER Experiment Name: At_Drought_Reproduction_P Parameter: Organism Value: A. thaliana
  misc_feature: MA Experiment 20001904 PARAMETER Experiment Name: At_Drought_Reproduction_P Parameter: Plant Line Value: WS
  misc_feature: MA Experiment 20001904 PARAMETER Experiment Name: At_Drought_Reproduction_P Parameter: Timepoint (day) Value: 7
  misc_feature: MA Experiment 20001904 PARAMETER Experiment Name: At_Drought_Reproduction_P Parameter: Tissue Value: Rosettes
  misc_feature: MA Experiment 20001904 PARAMETER Experiment Name: At_Drought_Reproduction_P Parameter: Treatment Value: Drought vs. No Drought
tgctatccgatgaacttctgaccatgattattgataaagtgagttcttgaaatcccatctctcttagtgtgatgtataatattttggtaaatttagttagcacatgcttcttttctttctctactttgtttttgctagacatttgctgatgcagattctgacaaagacggtaaaattagtaaggatgaatggaatgtctatgtgcataaacatcctagcttgttgaagaatatgactcttccttacctaaaggatgtgacgacagcattcccaagttttatattcaacactgaggttgaagactgaggcacaactgtccatgcaacaccggtcatcttttttctgcttggtcctgtaattcgagtgagattgtcatagcgcaagagcagaacgaggaaagaaggttttccttattttattttaagccaacgtagttgatgattattagctgtaagtaaaattgtcaagcactttgctttgttttgatgactttactgtaattgttccattgaaagtaatgaagcatttttcttttc

SEQ ID NO: 164 - protein, 40 aa, Arabidopsis thaliana
  peptide (1)..(40): Ceres Seq. ID no. 14307584
MLLFFLYFVFARHLLMQILTKTVKLVRMNGMSMCINILAC

SEQ ID NO: 165 - DNA, 663 bp, Arabidopsis thaliana
  misc_feature (1)..(663): Ceres Seq. ID no. 13648081
  misc_feature: MA Experiment ID: 20000180 Result: Up-regulated in Transcription
  misc_feature: MA Experiment 20000180 PARAMETER Experiment Name: At_Germinating_Seeds_P Parameter: Age (hr) Value: 24 vs. 0
  misc_feature: MA Experiment 20000180 PARAMETER Experiment Name: At_Germinating_Seeds_P Parameter: Tissue Value: Germinating Seeds
  misc_feature: MA Experiment ID: 20000184 Result: Down-regulated in Transcription
  misc_feature: MA Experiment 20000184 PARAMETER Experiment Name: At_Shoots__P Parameter: Age (day) Value: 7
  misc_feature: MA Experiment 20000184 PARAMETER Experiment Name: At_Shoots__P Parameter: Tissue Value: Shoots vs. Whole Plant
  misc_feature: MA Experiment ID: 20000185 Result: Up-regulated in Transcription
  misc_feature: MA Experiment 20000185 PARAMETER Experiment Name: At_Roots__P Parameter: Age (day) Value: 7 vs. 21
  misc_feature: MA Experiment 20000185 PARAMETER Experiment Name: At_Roots__P Parameter: Organism Value: A. thaliana
  misc_feature: MA Experiment 20000185 PARAMETER Experiment Name: At_Roots__P Parameter: Tissue Value: Roots vs. Whole Plant
  misc_feature: MA Experiment ID: 20000227 Result: Up-regulated in Transcription
  misc_feature: MA Experiment 20000227 PARAMETER Experiment Name: At_Root-Tips-vs-Tops_P Parameter: Tissue Value: Root Tips vs. Root Tops
  misc_feature: MA Experiment ID: 20000264 Result: Up-regulated in Transcription
  misc_feature: MA Experiment 20000264 PARAMETER Experiment Name: At_Open_Flower_P Parameter: Age (day) Value: 21
  misc_feature: MA Experiment 20000264 PARAMETER Experiment Name: At_Open_Flower_P Parameter: Plant Line Value: WS
  misc_feature: MA Experiment 20000264 PARAMETER Experiment Name: At_Open_Flower_P Parameter: Tissue Value: Open Flower vs. Whole Plant
  misc_feature: MA Experiment ID: 20000265 Result: Down-regulated in Transcription
  misc_feature: MA Experiment 20000265 PARAMETER Experiment Name: At_Open_Flower_P Parameter: Age (day) Value: 21
  misc_feature: MA Experiment 20000265 PARAMETER Experiment Name: At_Open_Flower_P Parameter: Plant Line Value: WS
  misc_feature: MA Experiment 20000265 PARAMETER Experiment Name: At_Open_Flower_P Parameter: Tissue Value: Closed Flower vs. Whole Plant
  misc_feature: MA Experiment ID: 20000286 Result: Up-regulated in Transcription
  misc_feature: MA Experiment 20000286 PARAMETER Experiment Name: At_Open_Flower_P Parameter: Age (day) Value: 21
  misc_feature: MA Experiment 20000286 PARAMETER Experiment Name: At_Open_Flower_P Parameter: Plant Line Value: WS
  misc_feature: MA Experiment 20000286 PARAMETER Experiment Name: At_Open_Flower_P Parameter: Tissue Value: Half Open vs. Whole Plant
  misc_feature: MA Experiment ID: 20000438 Result: Down-regulated in Transcription
  misc_feature: MA Experiment 20000438 PARAMETER Experiment Name: At_Shoots__P Parameter: Age (day) Value: 14
  misc_feature: MA Experiment 20000438 PARAMETER Experiment Name: At_Shoots__P Parameter: Tissue Value: Shoots vs. Whole Plant
  misc_feature: MA Experiment ID: 20000439 Result: Up-regulated in Transcription
  misc_feature: MA Experiment 20000439 PARAMETER Experiment Name: At_Roots__P Parameter: Age (day) Value: 14 vs. 21
  misc_feature: MA Experiment 20000439 PARAMETER Experiment Name: At_Roots__P Parameter: Organism Value: A. thaliana
  misc_feature: MA Experiment 20000439 PARAMETER Experiment Name: At_Roots__P Parameter: Tissue Value: Roots vs. Whole Plant
  misc_feature: MA Experiment ID: 20000527 Result: Down-regulated in Transcription
  misc_feature: MA Experiment 20000527 PARAMETER Experiment Name: At_10percent_PEG_P Parameter: Age (day) Value: 20
  misc_feature: MA Experiment 20000527 PARAMETER Experiment Name: At_10percent_PEG_P Parameter: Organism Value: A. thaliana
  misc_feature: MA Experiment 20000527 PARAMETER Experiment Name: At_10percent_PEG_P Parameter: Plant Line Value: WS
  misc_feature: MA Experiment 20000527 PARAMETER Experiment Name: At_10percent_PEG_P Parameter: Timepoint (day) Value: 20
  misc_feature: MA Experiment 20000527 PARAMETER Experiment Name: At_10percent_PEG_P Parameter: Tissue Value: Whole Plant
  misc_feature: MA Experiment 20000527 PARAMETER Experiment Name: At_10percent_PEG_P Parameter: Treatment Value: 10percent PEG vs. No Treatment
  misc_feature: MA Experiment ID: 20000794 Result: Up-regulated in Transcription
  misc_feature: MA Experiment 20000794 PARAMETER Experiment Name: At_Petals_P Parameter: Age (day) Value: 23-25 days
  misc_feature: MA Experiment 20000794 PARAMETER Experiment Name: At_Petals_P Parameter: Plant Line Value: WS
  misc_feature: MA Experiment 20000794 PARAMETER Experiment Name: At_Petals_P Parameter: Tissue Value: Petals vs. Whole plant
  misc_feature: MA Experiment ID: 20001451 Result: Up-regulated in Transcription
  misc_feature: MA Experiment 20001451 PARAMETER Experiment Name: At_Far-red-induction_P Parameter: Age (day) Value: 7
  misc_feature: MA Experiment 20001451 PARAMETER Experiment Name: At_Far-red-induction_P Parameter: Light Value: Far-red vs. White
  misc_feature: MA Experiment 20001451 PARAMETER Experiment Name: At_Far-red-induction_P Parameter: Organism Value: A. thaliana
  misc_feature: MA Experiment 20001451 PARAMETER Experiment Name: At_Far-red-induction_P Parameter: Plant Line Value: Columbia
  misc_feature: MA Experiment 20001451 PARAMETER Experiment Name: At_Far-red-induction_P Parameter: Timepoint (hr) Value: 24
  misc_feature: MA Experiment 20001451 PARAMETER Experiment Name: At_Far-red-induction_P Parameter: Tissue Value: Whole Plant
  misc_feature: MA Experiment ID: 20001554 Result: Up-regulated in Transcription
  misc_feature: MA Experiment 20001554 PARAMETER Experiment Name: At_Drought_Soil_Dry_P Parameter: Age (day) Value: 21
  misc_feature: MA Experiment 20001554 PARAMETER Experiment Name: At_Drought_Soil_Dry_P Parameter: Organism Value: A. thaliana
  misc_feature: MA Experiment 20001554 PARAMETER Experiment Name: At_Drought_Soil_Dry_P Parameter: Plant Line Value: WS
  misc_feature: MA Experiment 20001554 PARAMETER Experiment Name: At_Drought_Soil_Dry_P Parameter: Post Timepoint (hr) Value: None
  misc_feature: MA Experiment 20001554 PARAMETER Experiment Name: At_Drought_Soil_Dry_P Parameter: Post-Treatment Value: None
  misc_feature: MA Experiment 20001554 PARAMETER Experiment Name: At_Drought_Soil_Dry_P Parameter: Timepoint (day) Value: 7
  misc_feature: MA Experiment 20001554 PARAMETER Experiment Name: At_Drought_Soil_Dry_P Parameter: Treatment Value: Drought vs. No Drought
  misc_feature: MA Experiment ID: 20001556 Result: Up-regulated in Transcription
  misc_feature: MA Experiment 20001556 PARAMETER Experiment Name: At_Drought_Soil_Dry_P Parameter: Age (day) Value: 26
  misc_feature: MA Experiment 20001556 PARAMETER Experiment Name: At_Drought_Soil_Dry_P Parameter: Organism Value: A. thaliana
  misc_feature: MA Experiment 20001556 PARAMETER Experiment Name: At_Drought_Soil_Dry_P Parameter: Plant Line Value: WS
  misc_feature: MA Experiment 20001556 PARAMETER Experiment Name: At_Drought_Soil_Dry_P Parameter: Post Timepoint (hr) Value: None
  misc_feature: MA Experiment 20001556 PARAMETER Experiment Name: At_Drought_Soil_Dry_P Parameter: Post-Treatment Value: None
  misc_feature: MA Experiment 20001556 PARAMETER Experiment Name: At_Drought_Soil_Dry_P Parameter: Timepoint (day) Value: 12
  misc_feature: MA Experiment 20001556 PARAMETER Experiment Name: At_Drought_Soil_Dry_P Parameter: Treatment Value: Drought vs. No Drought
  misc_feature: MA Experiment ID: 20001558 Result: Up-regulated in Transcription
  misc_feature: MA Experiment 20001558 PARAMETER Experiment Name: At_Drought_Soil_Dry_P Parameter: Age (day) Value: 27
  misc_feature: MA Experiment 20001558 PARAMETER Experiment Name: At_Drought_Soil_Dry_P Parameter: Organism Value: A. thaliana
  misc_feature: MA Experiment 20001558 PARAMETER Experiment Name: At_Drought_Soil_Dry_P Parameter: Plant Line Value: WS
  misc_feature: MA Experiment 20001558 PARAMETER Experiment Name: At_Drought_Soil_Dry_P Parameter: Post Timepoint (hr) Value: 6
  misc_feature: MA Experiment 20001558 PARAMETER Experiment Name: At_Drought_Soil_Dry_P Parameter: Post-Treatment Value: Re-Water vs. No Drought
  misc_feature: MA Experiment 20001558 PARAMETER Experiment Name: At_Drought_Soil_Dry_P Parameter: Timepoint (day) Value: 13
  misc_feature: MA Experiment 20001558 PARAMETER Experiment Name: At_Drought_Soil_Dry_P Parameter: Treatment Value: Drought vs. No Drought
  misc_feature: MA Experiment ID: 20001904 Result: Up-regulated in Transcription
  misc_feature: MA Experiment 20001904 PARAMETER Experiment Name: At_Drought_Reproduction_P Parameter: Age (day) Value: 37
  misc_feature: MA Experiment 20001904 PARAMETER Experiment Name: At_Drought_Reproduction_P Parameter: Organism Value: A. thaliana
  misc_feature: MA Experiment 20001904 PARAMETER Experiment Name: At_Drought_Reproduction_P Parameter: Plant Line Value: WS
  misc_feature: MA Experiment 20001904 PARAMETER Experiment Name: At_Drought_Reproduction_P Parameter: Timepoint (day) Value: 7
  misc_feature: MA Experiment 20001904 PARAMETER Experiment Name: At_Drought_Reproduction_P Parameter: Tissue Value: Rosettes
  misc_feature: MA Experiment 20001904 PARAMETER Experiment Name: At_Drought_Reproduction_P Parameter: Treatment Value: Drought vs. No Drought
  misc_feature: MA Experiment ID: 20001905 Result: Up-regulated in Transcription
  misc_feature: MA Experiment 20001905 PARAMETER Experiment Name: At_Drought_Reproduction_P Parameter: Age (day) Value: 40
  misc_feature: MA Experiment 20001905 PARAMETER Experiment Name: At_Drought_Reproduction_P Parameter: Organism Value: A. thaliana
  misc_feature: MA Experiment 20001905 PARAMETER Experiment Name: At_Drought_Reproduction_P Parameter: Plant Line Value: WS
  misc_feature: MA Experiment 20001905 PARAMETER Experiment Name: At_Drought_Reproduction_P Parameter: Timepoint (day) Value: 10
  misc_feature: MA Experiment 20001905 PARAMETER Experiment Name: At_Drought_Reproduction_P Parameter: Tissue Value: Rosettes
  misc_feature: MA Experiment 20001905 PARAMETER Experiment Name: At_Drought_Reproduction_P Parameter: Treatment Value: Drought vs. No Drought
  misc_feature: MA Experiment ID: 20001906 Result: Up-regulated in Transcription
  misc_feature: MA Experiment 20001906 PARAMETER Experiment Name: At_Drought_Reproduction_P Parameter: Age (day) Value: 35
  misc_feature: MA Experiment 20001906 PARAMETER Experiment Name: At_Drought_Reproduction_P Parameter: Organism Value: A. thaliana
  misc_feature: MA Experiment 20001906 PARAMETER Experiment Name: At_Drought_Reproduction_P Parameter: Plant Line Value: WS
  misc_feature: MA Experiment 20001906 PARAMETER Experiment Name: At_Drought_Reproduction_P Parameter: Timepoint (day) Value: 5
  misc_feature: MA Experiment 20001906 PARAMETER Experiment Name: At_Drought_Reproduction_P Parameter: Tissue Value: Siliques
  misc_feature: MA Experiment 20001906 PARAMETER Experiment Name: At_Drought_Reproduction_P Parameter: Treatment Value: Drought vs. No Drought
aaaaaaaaaaaaaaaaaatgaagaaacttcttttgatatttctgttttctcttgtcattctccaaactgcttgtgacgatagatgggcatgaagatgtacccgaaaacgacgaaaatgctcttcttaaggctgttgcaaaccaacctgtatctgttgcaattgatgctggaagttcagatttccagttttattcagagggagtgtttacgggatcttgtggaacagagctgaaccatggtgtggcagcggtcgggtatggatctgagagggggaaaaagtattggatagtgagaaactcatggggagctgaatggggagagggaggctatataaagattgaaagagagattgatgaaccggaagggcgttgcggtattgcgatggaggcatcgtatccgatcaagctatcgtcttctaatcctaccccgaaagacggtgatgtcaaagatgagctctagatatgtgtacacattgtgtaaaaccatatcaaaggtgatcccaattccttgttgattcatgttgttagtttcgtcttcatgatttgattttgttgttggttttgaatttgaataaaaatgtctcgtgttttctcaatcctttgtttattaattatgtacaagagaccaataagacacttttggcgaaaaaaaaaaaaaaaaaaa

SEQ ID NO: 166 - protein, 53 aa, Arabidopsis thaliana
  peptide (1)..(53): Ceres Seq. ID no. 13648082
MNRKGVAVLRWRHRIRSSYRLLILPRKTVMSKMSSRYVYTLCKTISKVIPIPC

SEQ ID NO: 167 - protein, 49 aa, Arabidopsis thaliana
  peptide (1)..(49): Ceres Seq. ID no. 13648083
MGMKMYPKTTKMLFLRLLQTNLYLLQLMLEVQISSFIQRECLRDLVEQS

SEQ ID NO: 168 - protein, 47 aa, Arabidopsis thaliana
  peptide (1)..(47): Ceres Seq. ID no. 13648084
MKMYPKTTKMLFLRLLQTNLYLLQLMLEVQISSFIQRECLRDLVEQS

SEQ ID NO: 169 - DNA, 910 bp, Arabidopsis thaliana
  misc_feature (1)..(910): Ceres Seq. ID no. 13648101
cccccagtggtaattctgttgaagctgatgcaccaccatcaccaatcttgtctttatttatcttgaatcgatgatttttagctagcctacgcgccctacatctttcgagtttcttaagaaagctctctccaaaattctgaagcacttgacccaaaggcagtagctcatcatcctcatcattattatcataatgatcaattgtgttacttgcatcaaacgtttcagttgattctgaagaatccagaaaaaactttgaaatagatttcaaccaccagtcacgatatctttcagtaacagaagtcgtagcgacacgagaaggtatgtaaagcattaaaccatcaagagacttattgtaaccatcccatgcttctttttctgtgaagctgctatgatcagtaaccaaaccaggaagatcttgagccagcccgaactgcattgccactcggtttggatagtaatcctccacaatatcaaccccaacaagctgagaaactctcatacatcgagcaaaggaaacgaatccatcatcaagattgtcatcaacagtcatccacatagcttcttcagggtaaaaccgaggagggttccaaatctgtaaaggtttagtgtaaggacgccaatcaaaatcaacaagattcaatctcacattcttagatgtttgtgagtgccaccgagatatcctaggttcaccttttggtatcactctagcttttggactggtactcttgaatctctcccatgcccagagttggactaacttaaacagtgatttcagagtgacatttggagtggacttttctctagcagaagcttgaatttgacccaaatctctgtatagtctagctagaacagcaggagcaaaagcaatcctttcgcctctagctaaacgaacagccataaggagaacttt

SEQ ID NO: 170 - protein, 69 aa, Arabidopsis thaliana
  peptide (1)..(69): Ceres Seq. ID no. 13648102
MISNQTRKILSQPELHCHSVWIVILHNINPNKLRNSHTSSKGNESIIKIVINSHPHSFFRVKPRRVPNL

SEQ ID NO: 171 - DNA, 1143 bp, Arabidopsis thaliana
  misc_feature (1)..(1143): Ceres Seq. ID no. 13648449
ggcgtcttcatcgctgctcgccatcgccggccaccggggttgccgctgatgcgattcgatccagtgggaacttttgtcaccttgcctcttctctctttcctaacactcaaatctctcctcagccttcagatagatagtctttgaagcaaaccaaaggtgaaaactgttctgcagttggtgatgacaagaagaatcacaagcttttgacttatgtttgagaatcatcatgggacaaggcttccgcaatcgaaatgggactttttcagcagcatcctagaaagactctttgcctttatcgcttcacctagacnacgagcaaggataactccatcctccatggctgagcaacctccttgtccgatatcaggagtcattgggtgaagtgcatctcctgcaacgcacacgttgtcttttgtgatgtttgaccatagcagttcccatggaggtcggtacttcagttgagacatcaccatgctatcaagatcagtggtctccaccacattcttaatgttttcaggcaagtctttgatcttgttcagcacaaactctttgaggatttccgaatttgtctcctcatctaacaagcgcaaggagaagagtcaaagacagtagtctgatatgaacaagaagctgcttgtagttagatattagatatcaggtaaagttgcatatcttcacctatatcagtggacgtgtgggttaggaaccagtagacagtgttgtggtcacatgggataaagccggaacgaacgccgtctccataaaactggaagaaccttttcccaaatccatggccttccggaaaatgtgtgagccctcggatttctaaccgggcagttgtagcgggatttttgaatcctagacacttaccaatcactgagtacagtgcatcgcaccttaccaaatcctgcatttcgtttagaaaccctacaattccgtagcaagtccaggcctcacatggtttacagaggacaagtagttatttaccttggttttgagaatggtcccgtcggagagatgagccttcttgtatcatccagccaattcaatatgaacaaccttagacgaaaacctgatggtctcttcaggcaactcacctgctagagcctctaacatcagcttcctctgtacgcatcgagactc

SEQ ID NO: 172 - protein, 56 aa, Arabidopsis thaliana
  peptide (1)..(56): Ceres Seq. ID no. 13648450
  misc_feature (34)..(34): Xaa is any aa, unknown or other
MFENHHGTRLPQSKWDFFSSILERLFAFIASPRXRARITPSSMAEQPPCPISGVIG

SEQ ID NO: 173 - protein, 48 aa, Arabidopsis thaliana
  peptide (1)..(48): Ceres Seq. ID no. 13648451
MVYRGQVVIYLGFENGPVGEMSLLVSSSQFNMNNLRRKPDGLFRQLTC

SEQ ID NO: 174 - protein, 47 aa, Arabidopsis thaliana
  peptide (1)..(47): Ceres Seq. ID no. 13648452
GVFIAARHRRPPGLPLMRFDPVGTFVTLPLLSFLTLKSLLSLQIDSL

SEQ ID NO: 175 - DNA, 430 bp, Arabidopsis thaliana
  misc_feature (1)..(430): Ceres Seq. ID no. 13593557
aaataatttacaaacagaattttagaccatttgagaaatttctacaaaatcaatcgagaaaagcaaattacatgaatcattgtcaaacagtacaataatgatcactacaagggagcttataaaagaagagcgaggaggaaagaggaagcagcaccaatatggaaggagcctgggaacataatagttgaggctgcagaggatgttgttgtgttgcgaggccctctgtatttcacccttttcttcatcaccactgcgagatttcttgagccatgctcaccctcagctgaacacaaaagaaaggcctgagagaagaagaagaggaatacgatggagaagaggagtatgcgtctggctttgatcatctcacccatctttggtttttgcgttttgcttaattctgatggatgtgagtattacatatataaagatt

SEQ ID NO: 176 - protein, 52 aa, Arabidopsis thaliana
  peptide (1)..(52): Ceres Seq. ID no. 13593558
MLLCCEALCISPFSSSPLRDFLSHAHPQLNTKERPERRRRGIRWRRGVCVWL

SEQ ID NO: 177 - protein, 34 aa, Arabidopsis thaliana
  peptide (1)..(34): Ceres Seq. ID no. 13593559
MEKRSMRLALIISPIFGFCVLLNSDGCEYYIYKD

SEQ ID NO: 178 - protein, 31 aa, Arabidopsis thaliana
  peptide (1)..(31): Ceres Seq. ID no. 13593560
IIYKQNFRPFEKFLQNQSRKANYMNHCQTVQ

SEQ ID NO: 179 - DNA, 512 bp, Arabidopsis thaliana
  misc_feature (1)..(512): Ceres Seq. ID no. 13648511
gcaccaggtccccccccccccccccgaagtaggcgagctttttactaaaaacgctcctcgtcacggaaatcgagacactctcaccattcatgccttctgacgccggtggagcttccgttcgccagcgtctggatctatcaactctattcagcctctctttgttctgtataagcttggtctcgtttgattcttcttccatgatttcaattctctccaaacatccaaattccctttcccatgtgttcttcttccctgagggttttctttggctccgatctgtctcagaccttggatccatctctgtccctgaaaccaaaatcagaagatccacaacagttcagcggctctttacctcaaacatcagagagtatctcttggaccatcagatgtgcattttccggtgagaacgtcgacggcacacgacgagctcaaaagctgggctggtggtctccctctacgcctcaccgccgaccatcactccaatctttcagaacttcaaccctagggtttgg

SEQ ID NO: 180 - protein, 104 aa, Arabidopsis thaliana
  peptide (1)..(104): Ceres Seq. ID no. 13648512
MPSDAGGASVRQRLDLSTLFSLSLFCISLVSFDSSSMISILSKHPNSLSHVFFFPEGFLWLRSVSDLGSISVPETKIRRSTTVQRLFTSNIREYLLDHQMCIFR

SEQ ID NO: 181 - protein, 91 aa, Arabidopsis thaliana
  peptide (1)..(91): Ceres Seq. ID no. 13648513
MCSSSLRVFFGSDLSQTLDPSLSLKPKSEDPQQFSGSLPQTSESISWTIRCAFSGENVDGTRRAQKLGWWSPSTPHRRPSLQSFRTSTLGF

SEQ ID NO: 182 - protein, 68 aa, Arabidopsis thaliana
  peptide (1)..(68): Ceres Seq. ID no. 13648514
MISILSKHPNSLSHVFFFPEGFLWLRSVSDLGSISVPETKIRRSTTVQRLFTSNIREYLLDHQMCIFR

SEQ ID NO: 183 - DNA, 843 bp, Arabidopsis thaliana
  misc_feature (1)..(843): Ceres Seq. ID no. 15226740
ggcatatttgaatagttcaaataatatgatcacctctctcttctctccttcatatcttttagagagaggaactgttgaattctgccgaccggattattctggtaaactgccgtcccaagttttgggcttttgcccggcatctttttggctttgttagcaaagatggccggtcctcttctggcaaatccggcttctacaagcggttttggccggcttttatccttcctccgccgttcgatcggttgttcttactgattgctttagtttctttttcagtttttctttcaataatttctaaagatttcaattggagattaattttaggtcataatagcctaagattaagttttcggatttgtatctttagaaagtttgatttgcagaattacctcaagtatgaaaggaagttttgtttccagcatattgggattgcctgtagccgtttctacatgtttatggagcttcgatcgatcaaatttgaggaatactcagatttttctttcctcattacctgtttttgccaaatctcttggttgatgattttggcatgcagatggaattgaattctctgtttgtgtatcctcccttctctgtttagcagtttccggtgagaaaaaaacaaaaatcgatgtttgccctttttcgacgttgattgtgttcaccggatcggagtctttgacggcaaaggatgacaggaacgtttcatcgcttctcttgcaacacgtgtcttgttatacgatcgtgttttgttaaagagatatccttcctttaaagaaatgtaactaagtggacctttgttgggatgtattctgtggatcattaataaacataatctttccagtg

SEQ ID NO: 184 - protein, 51 aa, Arabidopsis thaliana
  peptide (1)..(51): Ceres Seq. ID no. 15226741
AYLNSSNNMITSLFSPSYLLERGTVEFCRPDYSGKLPSQVLGFCPASFWLC

SEQ ID NO: 185 - protein, 46 aa, Arabidopsis thaliana
  peptide (1)..(46): Ceres Seq. ID no. 15226742
MKGSFVSSILGLPVAVSTCLWSFDRSNLRNTQIFLSSLPVFAKSLG

SEQ ID NO: 186 - protein, 43 aa, Arabidopsis thaliana
  peptide (1)..(43): Ceres Seq. ID no. 15226743
MITSLFSPSYLLERGTVEFCRPDYSGKLPSQVLGFCPASFWLC

SEQ ID NO: 187 - DNA, 925 bp, Arabidopsis thaliana
  misc_feature (1)..(925): Ceres Seq. ID no. 13647991
gagtagtacttttagtttactaatacttttttaagtataaaagttcatagtttcgaaaaaaaacaaaagactcgaaggatcgatgactgagatattattaatttattattgactcgtcggcatagcggttaactaaagccagcgcattgctagtaagcttcttgacgtcatcgactcgagagcagacgtcatctttgatagagtcgtcttcgtggacgtctttgaacccgtccgtacaagtatactcatcagtaagagctgcactaagccaagtcttgacattactcatctggaacctaaatgactcgatcgagccagacgcggagacaagctccttcatctgtttcatggagcctctcataccgtcaacggcatctttaagattctcgaagcagtctctaaggacgggggttgggtggtcgcggttataagcgttttggaggtaagagagaagctggagagtgttgtggagagtgagggagatggctacgcgcgcgaggcggtttgagtcattttggatggagttggcaaaagaggagagagtggagaagcaaaggtccgggtagagtgtggtgttgcaggccaaacggatgaaatcggagccgttggatggtgggagtggtggatcaacggtgaggatttgtgggagaaaggtggaaaagagaagtataaggagagtaggtctcatcattgttaccatattgttgtgtgatgtgtttggctcttttggattcataagccttggagttatttataggatttttgaaaaatatcagattttataaagaaacaaaattagagagttgagtttggaggtgaacaaaaatactctgccaacaattgtctgcatgaatgtttagtgggccgggccgaattccaatcttagaacttatcatatgaaaagaaaagaagttagttttttttt

SEQ ID NO: 188 - protein, 64 aa, Arabidopsis thaliana
  peptide (1)..(64): Ceres Seq. ID no. 13647992
MKSEPLDGGSGGSTVRICGRKVEKRSIRRVGLIIVTILLCDVFGSFGFISLGVIYRIFEKYQIL

SEQ ID NO: 189 - DNA, 1254 bp, Arabidopsis thaliana
  misc_feature (1)..(1254): Ceres Seq. ID no. 13648040
aaatcgactccggcaatatcacacactccctctccgatacagatttccggcaattacctggccctgagccataaatggcgtctcgagtgtttccctcgagctcgtgtggccattaccgtagaataagcttgctggaatctgatgttgaagaagagccgctaagtattgtttgaaaccatcgagcagaagctttaggtatccttgtgagattgttcttgtagtcaacatagtagatcccaaaccggaccgtgtatcctgagttccattcccaattgtctagcaatgaccacacaaaatatcctcttacgtcgcattcatcattcctgcaaagtgaatgcgggaacatttcaaactcaagaatctttgtgaatctctgcaaagtgaagaactttaccttatggcagctgataagtttgagaggtgggtttccatatatgtctttaacatacactgccagtttcctgattccccatgggacaatgtgtagccagcttgaccctgcctgtttcaagtatggtaagcagcagcatgagacaacagaatgttatgagctacaatatacggttcgaccgatgacttccccttcttacagaaccaatgtcccagaagtgagcaccttcctggagcttgtatccctgtgtcatagccttggatcgataccccatgaggctcattgaaagtgatccagtacttcactctatctccaaatgctttgaaacagtttggagaagatgaagaagaagaagaatgtcacctggtaagctgaagaagctgttccgaatacaaacccatctggaaaatttgctcggctgatagattctgaagaaacatgatcaagaggtacgaagaagacgacgaagaacggaaacagaactaagacgagtctcatcaaagattccatttttgggtcgcgtgaatagagaaagtgagagagagagagagataaagggatggaattttatggtgaatgaaagatttggaggcaagaaaatggagttttggtgtgtgtgtgtttttaatttgtaaagttgaagaagaaagaggaagagtgcaaaacaaaagctcacgtcttttgaaggcttttctttggttttgacatttgttctctctacttttactgcacacgtttcttatacttgtgccaaaaactttttaaagttgtttactctcccttaagataaaaaaaagtttgttactgagtgacaaaaaaaaaaaagaaaaaaaaaaaaaaaaaaactcgagggggggcccggt

SEQ ID NO: 190 - protein, 80 aa, Arabidopsis thaliana
  peptide (1)..(80): Ceres Seq. ID no. 13648041
MSLTYTASFLIPHGTMCSQLDPACFKYGKQQHETTECYELQYTVRPMTSPSYRTNVPEVSTFLELVSLCHSLGSIPHEAH

SEQ ID NO: 191 - protein, 65 aa, Arabidopsis thaliana
  peptide (1)..(65): Ceres Seq. ID no. 13648042
MCSQLDPACFKYGKQQHETTECYELQYTVRPMTSPSYRTNVPEVSTFLELVSLCHSLGSIPHEAH

SEQ ID NO: 192 - protein, 50 aa, Arabidopsis thaliana
  peptide (1)..(50): Ceres Seq. ID no. 13648043
MREHFKLKNLCESLQSEELYLMAADKFERWVSIYVFNIHCQFPDSPWDNV

SEQ ID NO: 193 - DNA, 1844 bp, Arabidopsis thaliana
  misc_feature (1)..(1844): Ceres Seq. ID no. 15179695
actagttctctctggcctcagagctagcatcaagagcgcttgtagcttcatctagtaacagaatctttgggtctttcaacatcgccctagcaattgcaattctctgcttctgtccacctgagagttgaacaccacgttctccaacctgtgtgtcgtagcctttaggaagtaatgtaatgaaactatgcgcattcgcagcggaagcagcagcttcaacttcaaccattgttgcatcaggctttccatagagtatgttctctagtatagtagtggcaaagagcgcaggttcttgattcacaagcccgatttgttcacgcaaaaacttcaactgaagcgtctttatctcaacaccatccaacagaatttgcccgctgtttggatcatagaatctctcaatgagggaaacaacagtactctttccagagccactcccaccaacaaccgccacagttttcccagaagggaagaaaatattaaagttcctgaagatcataacatcaggccgtgaaggatagctaaaagtcacatctttaaactcaatgttcccatgaacttgatccaaacattttccatccaacgggtcttgaattatcgtcggtctctggttaattatctccatcaacttataaccagccgctttacctttactaaacgccccaagattcgagaaagattgccccaaactcattccaccaacaatagcagagaatatagcagtaaacgcctttcctccatcggtttgtccattccgaataaaaactccagcataccaaaacaccaaagcccatgacatacaagctattccataagtacatcctaaacccaaccctttagccatccccgctttataaccgagcttaagcgtatactgaatcgcatccgaatacgcattaagtgccttactctctccaacatatgaataaacagttcgaacttgagcaattgcctgctcggcgataacaccggcgttagcataagattcacggctctttgaagtaattccggtgagtgtataagcgtataaacctccagcgaaagcgattccgggaatcacagcaacacttaacaaagctaatttccatgccgatacaaatccaactactaatcccgccaaaaatgttgagaggtaatgtataaagtttccaaccttttcactaatggcatcttgaacaagaagagtatcagtagaaacactaaagacaatgtcaccagttctagcatcagtatcaaagaacccaacgtcttgttttaatactgcttcaagatatttcttccttaatgctgctacttgtctttctccagaatacatccaacatgctatctctgcgtaagaagagaagcaaacgaccaaacccaagtagacgaaatatagagaatatctagagacttcatgaaccatttgatgtaaatccatttggtttttaccaaagccattaaccatttgaccaaagagtaaaaagaagacaggcatggaagagccatgaacaatggcaccaagagaaccaacgaacattaagagataatcaaatttatcagcgaaagaaaagagtttaaagaatggtaaactctgttctttcttcttctctgcttctggtggaacagtcttggcatcggttgtgttaggttccgacatggtttttgtagatccgagttcaaagaaagaaagaagaggaaacgagttggtttagtgagaaaacgagatcattgagcagtgagagagagagagagaaagaataaaaagtttttcttgaaaatctgacaattgttttgtgaagttcaagaactcttttacgagtgtcttgttttgaagtggtgaagagagagagagagagaatgagagtgtc

SEQ ID NO: 194 - protein, 80 aa, Arabidopsis thaliana
  peptide (1)..(80): Ceres Seq. ID no. 15179696
MNLIQTFSIQRVLNYRRSLVNYLHQLITSRFTFTKRPKIRERLPQTHSTNNSREYSSKRLSSIGLSIPNKNSSIPKHQSP

SEQ ID NO: 195 - protein, 42 aa, Arabidopsis thaliana
  peptide (1)..(42): Ceres Seq. ID no. 15179697
MSPVLASVSKNPTSCFNTASRYFFLNAATCLSPEYIQHAISA

SEQ ID NO: 196 - protein, 40 aa, Arabidopsis thaliana
  peptide (1)..(40): Ceres Seq. ID no. 15179698
MYKVSNLFTNGILNKKSISRNTKDNVTSSSISIKEPNVLF

SEQ ID NO: 197 - DNA, 852 bp, Arabidopsis thaliana
  misc_feature (1)..(852): Ceres Seq. ID no. 13648571
tctgttgtggctgctcgaatggctccgcgatgtatctcgccacgtgtgctattaagttcccgtgagacgaattcactcctttgcttcgtcccgtcgtccccgaggagtaaagcaacatcgccgtgtcgtctttatgaacttggtttctgactgcttgtccacttggttctttcttcatcatttcagttagattcccaaccactttgagtcctctcggaacgcgtagagtgtcttctacgcgctcgaggacgatggagataccggaactggcgattttgggagccagttccggtgttgtgaaggcgagttttggattgctatccgcgatttgtcttaagatttcactagcggtgttgagaggattagcggtagttaagacagcgccaagagacatcacggagaggcagacaatggggatggagatggtgttgggagagaggactaggaccacgtcacctctccgtattcccacgtcgtggaggagacagtcggcgacacgatccacggccctccataaatcggagaagcttatgcggtggtccgtggctgcgtctatgaaggcggttttgccacggtacgtttgggaggagatgaatgttgtgatgtcgagtgattcttttgaaggaagtgccaaatggtttgcgtttactgtaaaatgtggagtgtgatgtgcagaaaccgttccttggatcgatcagagatgatgatctttgagaattcgccattattctttggttggattagattgatgcaagctctcatatagttgcacttatcttatggaaatatcagcatcttaataaggcatatgctaaacgttcactgaaactatctaaatatctttcactactt

SEQ ID NO: 198 - protein, 138 aa, Arabidopsis thaliana
  peptide (1)..(138): Ceres Seq. ID no. 13648572
MEIPELAILGASSGVVKASFGLLSAICLKISLAVLRGLAVVKTAPRDITERQTMGMEMVLGERTRTTSPLRIPTSWRRQSATRSTALHKSEKLMRWSVAASMKAVLPRYVWEEMNVVMSSDSFEGSAKWFAFTVKCGV

SEQ ID NO: 199 - protein, 85 aa, Arabidopsis thaliana
  peptide (1)..(85): Ceres Seq. ID no. 13648573
MGMEMVLGERTRTTSPLRIPTSWRRQSATRSTALHKSEKLMRWSVAASMKAVLPRYVWEEMNVVMSSDSFEGSAKWFAFTVKCGV

SEQ ID NO: 200 - protein, 83 aa, Arabidopsis thaliana
  peptide (1)..(83): Ceres Seq. ID no. 13648574
MEMVLGERTRTTSPLRIPTSWRRQSATRSTALHKSEKLMRWSVAASMKAVLPRYVWEEMNVVMSSDSFEGSAKWFAFTVKCGV

SEQ ID NO: 201 - DNA, 1234 bp, Arabidopsis thaliana
  misc_feature (1)..(1234): Ceres Seq. ID no. 12394606
  misc_feature: MA Experiment ID: 108461 Result: Down-regulated in Transcription
  misc_feature: MA Experiment 108461 PARAMETER Experiment Name: At_Germinating_Seeds_cDNA_P Parameter: Age (day) Value: 1 vs. 0
  misc_feature: MA Experiment 108461 PARAMETER Experiment Name: At_Germinating_Seeds_cDNA_P Parameter: Tissue Value: Germinating Seeds
  misc_feature: MA Experiment ID: 108462 Result: Down-regulated in Transcription
  misc_feature: MA Experiment 108462 PARAMETER Experiment Name: At_Germinating_Seeds_cDNA_P Parameter: Age (day) Value: 2 vs. 0
  misc_feature: MA Experiment 108462 PARAMETER Experiment Name: At_Germinating_Seeds_cDNA_P Parameter: Tissue Value: Germinating Seeds
  misc_feature: MA Experiment ID: 108463 Result: Down-regulated in Transcription
  misc_feature: MA Experiment 108463 PARAMETER Experiment Name: At_Germinating_Seeds_cDNA_P Parameter: Age (day) Value: 3 vs. 0
  misc_feature: MA Experiment 108463 PARAMETER Experiment Name: At_Germinating_Seeds_cDNA_P Parameter: Tissue Value: Germinating Seeds
  misc_feature: MA Experiment ID: 108464 Result: Down-regulated in Transcription
  misc_feature: MA Experiment 108464 PARAMETER Experiment Name: At_Germinating_Seeds_cDNA_P Parameter: Age (day) Value: 4 vs. 0
  misc_feature: MA Experiment 108464 PARAMETER Experiment Name: At_Germinating_Seeds_cDNA_P Parameter: Tissue Value: Germinating Seeds
  misc_feature: MA Experiment ID: 108576 Result: Up-regulated in Transcription
  misc_feature: MA Experiment 108576 PARAMETER Experiment Name: At_42deg_Heat_cDNA_P Parameter: Temperature (deg C) Value: 42 vs. 22
  misc_feature: MA Experiment 108576 PARAMETER Experiment Name: At_42deg_Heat_cDNA_P Parameter: Timepoint (hr) Value: 1
  misc_feature: MA Experiment 108576 PARAMETER Experiment Name: At_42deg_Heat_cDNA_P Parameter: Tissue Value: Aerial
  misc_feature: MA Experiment ID: 108577 Result: Up-regulated in Transcription
  misc_feature: MA Experiment 108577 PARAMETER Experiment Name: At_42deg_Heat_cDNA_P Parameter: Temperature (deg C) Value: 42 vs. 22
  misc_feature: MA Experiment 108577 PARAMETER Experiment Name: At_42deg_Heat_cDNA_P Parameter: Timepoint (hr) Value: 6
  misc_feature: MA Experiment 108577 PARAMETER Experiment Name: At_42deg_Heat_cDNA_P Parameter: Tissue Value: Aerial
  misc_feature: MA Experiment ID: 20000093 Result: Up-regulated in Transcription
  misc_feature: MA Experiment 20000093 PARAMETER Experiment Name: At_42deg_Heat_cDNA_P Parameter: Temperature (deg C) Value: 42 vs. 22
  misc_feature: MA Experiment 20000093 PARAMETER Experiment Name: At_42deg_Heat_cDNA_P Parameter: Timepoint (hr) Value: 0.5
  misc_feature: MA Experiment 20000093 PARAMETER Experiment Name: At_42deg_Heat_cDNA_P Parameter: Tissue Value: Aerial
  misc_feature: MA Experiment ID: 20000111 Result: Up-regulated in Transcription
  misc_feature: MA Experiment 20000111 PARAMETER Experiment Name: At_42deg_Heat_cDNA_P Parameter: Temperature (deg C) Value: 42 vs. 22
  misc_feature: MA Experiment 20000111 PARAMETER Experiment Name: At_42deg_Heat_cDNA_P Parameter: Timepoint (hr) Value: 6
  misc_feature: MA Experiment 20000111 PARAMETER Experiment Name: At_42deg_Heat_cDNA_P Parameter: Tissue Value: Aerial
  misc_feature: MA Experiment ID: 20000112 Result: Up-regulated in Transcription
  misc_feature: MA Experiment 20000112 PARAMETER Experiment Name: At_42deg_Heat_cDNA_P Parameter: Temperature (deg C) Value: 42 vs. 22
  misc_feature: MA Experiment 20000112 PARAMETER Experiment Name: At_42deg_Heat_cDNA_P Parameter: Timepoint (hr) Value: 2
  misc_feature: MA Experiment 20000112 PARAMETER Experiment Name: At_42deg_Heat_cDNA_P Parameter: Tissue Value: Aerial
  misc_feature: MA Experiment ID: 20000113 Result: Up-regulated in Transcription
  misc_feature: MA Experiment 20000113 PARAMETER Experiment Name: At_42deg_Heat_cDNA_P Parameter: Temperature (deg C) Value: 42 vs. 22
  misc_feature: MA Experiment 20000113 PARAMETER Experiment Name: At_42deg_Heat_cDNA_P Parameter: Timepoint (hr) Value: 8
  misc_feature: MA Experiment 20000113 PARAMETER Experiment Name: At_42deg_Heat_cDNA_P Parameter: Tissue Value: Aerial
  misc_feature: MA Experiment ID: 20000144 Result: Up-regulated in Transcription
  misc_feature: MA Experiment 20000144 PARAMETER Experiment Name: At_42deg_Heat_cDNA_P Parameter: Temperature (deg C) Value: 42 vs. 22
  misc_feature: MA Experiment 20000144 PARAMETER Experiment Name: At_42deg_Heat_cDNA_P Parameter: Timepoint (hr) Value: 1
  misc_feature: MA Experiment 20000144 PARAMETER Experiment Name: At_42deg_Heat_cDNA_P Parameter: Tissue Value: Aerial
  misc_feature: MA Experiment ID: 20000171 Result: Up-regulated in Transcription
  misc_feature: MA Experiment 20000171 PARAMETER Experiment Name: At_42deg_Heat_P Parameter: Age (day) Value: 14
  misc_feature: MA Experiment 20000171 PARAMETER Experiment Name: At_42deg_Heat_P Parameter: Organism Value: A. thaliana
  misc_feature: MA Experiment 20000171 PARAMETER Experiment Name: At_42deg_Heat_P Parameter: Plant Line Value: WS
  misc_feature: MA Experiment 20000171 PARAMETER Experiment Name: At_42deg_Heat_P Parameter: Temperature (deg C) Value: 42 vs. 22
  misc_feature: MA Experiment 20000171 PARAMETER Experiment Name: At_42deg_Heat_P Parameter: Timepoint (hr) Value: 1
  misc_feature: MA Experiment 20000171 PARAMETER Experiment Name: At_42deg_Heat_P Parameter: Tissue Value: Aerial
  misc_feature: MA Experiment ID: 20000173 Result: Up-regulated in Transcription
  misc_feature: MA Experiment 20000173 PARAMETER Experiment Name: At_42deg_Heat_P Parameter: Age (day) Value: 14
  misc_feature: MA Experiment 20000173 PARAMETER Experiment Name: At_42deg_Heat_P Parameter: Organism Value: A. thaliana
  misc_feature: MA Experiment 20000173 PARAMETER Experiment Name: At_42deg_Heat_P Parameter: Plant Line Value: WS
  misc_feature: MA Experiment 20000173 PARAMETER Experiment Name: At_42deg_Heat_P Parameter: Temperature (deg C) Value: 42 vs. 22
  misc_feature: MA Experiment 20000173 PARAMETER Experiment Name: At_42deg_Heat_P Parameter: Timepoint (hr) Value: 6
  misc_feature: MA Experiment 20000173 PARAMETER Experiment Name: At_42deg_Heat_P Parameter: Tissue Value: Aerial
  misc_feature: MA Experiment ID: 20000180 Result: Down-regulated in Transcription
  misc_feature: MA Experiment 20000180 PARAMETER Experiment Name: At_Germinating_Seeds_P Parameter: Age (hr) Value: 24 vs. 0
  misc_feature: MA Experiment 20000180 PARAMETER Experiment Name: At_Germinating_Seeds_P Parameter: Tissue Value: Germinating Seeds
  misc_feature: MA Experiment ID: 20000495 Result: Up-regulated in Transcription
  misc_feature: MA Experiment 20000495 PARAMETER Experiment Name: At_Guard_Cells_P Parameter: Harvest Date Value: 8/2/2002
  misc_feature: MA Experiment 20000495 PARAMETER Experiment Name: At_Guard_Cells_P Parameter: Organism Value: A. thaliana
  misc_feature: MA Experiment 20000495 PARAMETER Experiment Name: At_Guard_Cells_P Parameter: Tissue Value: Guard Cells vs. Leaves
aggagcctctgtaattttgtagtagtctgtccgattcttctcaacgatttttgtattcatcgagtcaattgttcctgtgttttcattgattagatcttgtgaatatagtctttatagctttggttagagttttcttattggttaatgatgataaatccaaaggcttgtttctcaaacattcgcagtggccgcctaagagctttcgcctttcgccaggcttgagagttaatgctgttttatccttccttggatgtctgaaacttttgtatctaaacctgtattgttttgttttctattagggttttagatttgggactaagttattcaatgtcccattagcagaattgatttctcttagtgcttaataggattgaacaaagtccctcaaatcttgatccatctgtcactttgtcagcagtcttaattggtttcttgctgatcattatatgatgggaaataacatataatctcgattttgattaattggtagaatttgcttaatattggtcgatgaggataagatgaaggcttgtttctcaaaacattcgcagtggccgcctaaggctttcgcctttcgccgggcttgagagcttatgatgtttttatccttccttggatgtctgagaccaattctgttttagttagatgattgttgctgttagttttcggttgatgaggattatatttaaggcttgtttctcaaaacattcgcagtggccgcctaaagctttcgcctttcgccaggcttgagagctaatgcagctttatccttcctttggatgtctgaaaccgatgaatgttttaaatctcgtttttatgtttttgtctgtaagaaagatcaatgatgataaacttaaggcttgtttctcaaaacattcgcagtggccgcctaaagctttcgcctttcgccgggcttgagagttaatgcagcttttatccttccttggatgtctgagatctttattcactctatcgattatcttgtctgtttaggttattccttctagtagattattatcgtctaaattttgtgttgaatttgcaggtaatttcttggtggtagcttcttcgctttactggcttttggagaaagagttccttacgtttcctgtaatttcctttaatctgtaaaaatcattgtcagatttatttacaatctgtaaagagttctttgttgtaaacaattttgttcattggtgatgaaattttgttctcattatgaattttatttgtg

SEQ ID NO: 202 - protein, 53 aa, Arabidopsis thaliana
  peptide (1)..(53): Ceres Seq. ID no. 12394607
MQLYPSFGCLKPMNVLNLVFMFLSVRKINDDKLKACFSKHSQWPPKAFAFRRA

SEQ ID NO: 203 - protein, 41 aa, Arabidopsis thaliana
  peptide (1)..(41): Ceres Seq. ID no. 12394608
MNVLNLVFMFLSVRKINDDKLKACFSKHSQWPPKAFAFRRA

SEQ ID NO: 204 - protein, 34 aa, Arabidopsis thaliana
  peptide (1)..(34): Ceres Seq. ID no. 12394609
MIVAVSFRLMRIIFKACFSKHSQWPPKAFAFRQA

SEQ ID NO: 205 - DNA, 1132 bp, Arabidopsis thaliana
  misc_feature (1)..(1132): Ceres Seq. ID no. 15225940
gcagtttgagccgtttatagaaaagtcagaagctcttcatttctcagtggatcccgttggtaccgacgtcatgtaaaacatttcaactctacattgggttgcagtgcattatgaacaaagttttctctatgaatccgaaaacgtgagttattgagtttaaagaaagcaaaatacattgattatttgcaaataatagctgtttcctaacaagacaagccaacaaaagaaagattttaagctcccactttccagagacgttccttaacaccgagcttgcagcaaacatagacatcatgtgacgcttgtactatctgatcatgagagaggctacgagcaccccaattactcatacataactccttatctttcgtcactccttcatgccccaaatacaccttcacaatcgtctcaaacgagctactcaagagcaacggatggagatagtgccttatgtggacaagtctccagatatccaactgatggtggaatctctcgagcttgtcgttgtcttggctgttccatacgccgacaaaagtgattgtctgatcttccaagaaacttctaaggacgtcggggacgtacttacagtgagacaactgaatgatgagacagcgagtaccaacacatagttggagaatatccggtggaggatcggaaccacggggtgtccattgaacgccaagtccgacaactagaggtgtgataagcgaagacggctgacgaagcggatactgtggatccattggcgtatcactgagggagtatgagtgactgtgacgatcaaacgttctccaaagaagtcgacgtggtgttcttcgggtagagatgttgtggtgggtaaaaaagctcagcccgacctgaacccaaaataaacccgcccaccaaaaacccaactttagaaaacttagatgggtttttgatatagtgggtaaagcccgaaaaaacctgattgttccgagactacccgtgggtacccaacttagttttatcattttttagagtttatgtttaactgttaatatactattatatgtatgttatatctatattttgcttataaatatattttaaattatatttattttctgtattacatatatatttgatggaaaaaaggttaaattgcattacc

SEQ ID NO: 206 - protein, 82 aa, Arabidopsis thaliana
  peptide (1)..(82): Ceres Seq. ID no. 15225941
MPQIHLHNRLKRATQEQRMEIVPYVDKSPDIQLMVESLELVVVLAVPYADKSDCLIFQETSKDVGDVLTVRQLNDETASTNT

SEQ ID NO: 207 - protein, 64 aa, Arabidopsis thaliana
  peptide (1)..(64): Ceres Seq. ID no. 15225942
MEIVPYVDKSPDIQLMVESLELVVVLAVPYADKSDCLIFQETSKDVGDVLTVRQLNDETASTNT

SEQ ID NO: 208 - protein, 49 aa, Arabidopsis thaliana
  peptide (1)..(49): Ceres Seq. ID no. 15225943
MVESLELVVVLAVPYADKSDCLIFQETSKDVGDVLTVRQLNDETASTNT

SEQ ID NO: 209 - DNA, 2904 bp, Arabidopsis thaliana
  misc_feature (1)..(2904): Ceres Seq. ID no. 15168935
tgaattttctgtctatcccaggtgttagtctctttgcaaataagatctgcaaccgtcaggcgttgagtatcccagttagggggtcccactggcgttagcggggcagtgatagagatccagggctcatcccacaccagagtatcagcaccgtttccaatagccttccccaggttcttttttaacagatctctgcccagacagatgccacgccaaccatgggaggcagaagaagcaacatgacactcaaggaaagagttgtttctgcagtattttcccaggagggttctggccaagaggcaggtcggtttttccaagagtctccagctgattttagccagcagagcatcattgaagtgttggatgtctctgaaaccgagtccaccatctcttctggacatgggaggctggaagcttgaagcaggacatcgtatacgttggcatagctgccaaaacagattttagcatggttgtcttaccagcagtggataggaattttgaggaccagctgagtgctctttggcgaatccggtcaatgatactattgaagaggtccttttttttcctgccaaacagttctggtaatccgaggatactcattagctcctcacaatttttctcattggagcggcagaaaaacatagtatcatcagcgaacaggagagccccgagagaacctcactacagaggataaagaggtagggggagagaggatcgccctggcgaatacctctctgagggcagaccaatccctgagcagatccatttagaagaaaggagtatgagaccgtagagacgcactgcataacccagcagatccatttctggtgaaaacctagtctctttaagactagctctatgaaatcccattcgatgcggtcgtacgccttgctcatatcagtcttcactgccatgaagcatcttttcttagctccagatattttcaggacaggttgcaatctctgagtgatgatcttagaaatgatcttgtagaagactgtacagagcgctatagggcggtaatctgcaacctttcttggtcctgggatttttggtatgagccttatgtgtgtattgttgatgttcctaggcaggataccagaagagaaaaaggattgaacttcaagtataacatgaggcgccactgttatccagttggattgaaagaaacttgctgagaatccgtctggtccaggggctttgtctgcatgtatggagaagcatgcatgtttgatttcctcaggggaaggtagagagatgagttgcagagatcaagttagaacacggatttgagctggacattgcctcttccaaggtttcacgatcgaagaaagttatcaatggacgatggtctgagccttcaaaagtcaggacaaaggattgcctgagtgtcttagatcatagaggtcacattcagagaagaaagatctgaggtcaacaaaggagccctcaggcctggcaaggccacctgttttctctgtggcatcaagtatgtcattgaagtctccagtcaacaaccaagcagattctcttgatcccgatatcagtcagtgagctccagataagttttctttttgttctatccggttctccatagagaaaagtagtgtgaaaagtcttcccttcagctttgatgattgtatcaataaaattatggcaggaggagagtacttctagctcgatgtgttgtttccagtagagggccaggcctccacccccagggctgtgcggagatatgagtaaatggtttgagaaattcgaccattgaagttttttaagcaccacttcatcagggtttttcgtctccatgaggaataggatgtctggagagattgttttctgaatctctctcagtcgttgaactgtcatgggattccccagcccacagcagttccagcttgcaagttttaaggaagaggaggaggtggattgggaaaatccacccttcctttcacagtggctgggataattggccttgtaggaggagctttgcttgaagaagccagatttgctgcaaccctggtgtgttgtcgtctctgagaagaggatttacttgaagtgctgacagagtcatcaccatggcgtctaataggttttgtaagtggaggtcggcccttctttttctttggtgggatcggagggatctgttgtatctgagcaggatgtactggcacatcaggagagagaggctgttctacagagaaatggttatcaaaaggagagggaattgctaggatcggcgcagctcgtgtattgaatagtgacatcacagagttctcccattacggcttctgtagttgggatgagaggcgaagttgtgagggttagagtgtcgactgctgtctctcaagaggtctgtctttctggtggcgggaggaagtctgctcaatggagggatctttatcctgttgcaggcctgggcagtctttcttgtcatgtgtgagtcggtggcagtgggtacagtagctttttagcctcttataatccaaggggtgagttcatggtccagcagctctcctactccttctccaatatctgtgagcatttttggtttccaaaagtggagggggagtttataaagatgcaaacatatatatatgttttataatctctttcatatgttatattttttaagagtcggaataaaatatttaacacacacatagatatatagttgttattacaaacaagaaaggtagtacttatagacaagcatgcattcttctccataagagaatttgcagcaacggattcggttgaacgttattgtaacattcaatacaatcaaccgattcgatccgtcgcttattttattattttgtataaacatgcatgtttgtatcattcactgatatctaaacacacatcacaatatggcagaatatataactggtagataggttcaac

SEQ ID NO: 210 - protein, 75 aa, Arabidopsis thaliana
  peptide (1)..(75): Ceres Seq. ID no. 15168936
MVVLPAVDRNFEDQLSALWRIRSMILLKRSFFFLPNSSGNPRILISSSQFFSLERQKNIVSSANRRAPREPHYRG

SEQ ID NO: 211 - protein, 66 aa, Arabidopsis thaliana
  peptide (1)..(66): Ceres Seq. ID no. 15168937
MGGRRSNMTLKERVVSAVFSQEGSGQEAGRFFQESPADFSQQSIIEVLDVSETESTISSGHGRLEA

SEQ ID NO: 212 - protein, 59 aa, Arabidopsis thaliana
  peptide (1)..(59): Ceres Seq. ID no. 15168938
MTLKERVVSAVFSQEGSGQEAGRFFQESPADFSQQSIIEVLDVSETESTISSGHGRLEA

SEQ ID NO: 213 - DNA, 1240 bp, Arabidopsis thaliana
  misc_feature (1)..(1240): Ceres Seq. ID no. 14309993
actagttctctctggctctttaaactctaagtataacacccattcgttttgattctcttctggcgcccagtacttgtctaatccttcttccaaaacattcttaggaccaaactgtgaactttgatcgccacgaatactgctcgagttaacgaatgctttacgggcgagattgttcgagaaaatggagttcttcatttcgctgaactcttcaagaaccttaatgtcttgctcagatatcaatcctgaagaattaggaggtacattaagcaagaagagacagtttcttccaactgagttatagtatatatccaaaagctgaacagccggtttaggcgactccgacgcatgccaaaaccaaccgggtcgaatcgatacatcacattccgctggtacccaatcttgcccatagccatcaccttcttgagaatacgaaggctcagtgtcaccaatctttgcattggttctgttaaagagtgaccagcaagtagagccagctagaccagcttcatcaccaatccacctgacatcaggaccagcgtcagagaatataacagctttaggctgaagctgatggatcaaactaaaccaagtatcaaagaaatattccatatctttctctccgtctcctttagctccatctaaccaaacttccttaatctctccatactttgttagtaactcggtcatttgactcagatagaactcgttatactccaatgtcttgccataacactgttcatgtcgatcccatggagaaaggtaaagaccaagtccaattccagcttcctttgccgcagaagctagttcagccactacatcgccggctccgtttctccattggctagatttgacggagtaatcagtgtattcgctaggccagagacagaatccatcatggtgcttagctgtgaggataacgcgggaaaagcctgagtctttagcgatttggacccattgacttgcgttgagatgggtcgggttgaaaatggatgggttggcttttccggtgccccattcggagtcggtgaaagtgttgggtccaaaatggaggaacatggccatggatccgagttgccattggagctgttgggaggatgggaggggtaaaattggacatgggtgtggttttagtagtgatgatgaatttgagatttgggagagggagaggattgagaagaagaagaagaaaagagtgatttgagagttcatgggtcttgaaagattttagtgactttcgttc

SEQ ID NO: 214 - protein, 71 aa, Arabidopsis thaliana
  peptide (1)..(71): Ceres Seq. ID no. 14309994
MDGLAFPVPHSESVKVLGPKWRNMAMDPSCHWSCWEDGRGKIGHGCGFSSDDEFEIWERERIEKKKKKRVI

SEQ ID NO: 215 - protein, 48 aa, Arabidopsis thaliana
  peptide (1)..(48): Ceres Seq. ID no. 14309995
MAMDPSCHWSCWEDGRGKIGHGCGFSSDDEFEIWERERIEKKKKKRVI

SEQ ID NO: 216 - protein, 46 aa, Arabidopsis thaliana
  peptide (1)..(46): Ceres Seq. ID no. 14309996
MDPSCHWSCWEDGRGKIGHGCGFSSDDEFEIWERERIEKKKKKRVI

SEQ ID NO: 217 - DNA, 1947 bp, Arabidopsis thaliana
  misc_feature (1)..(1947): Ceres Seq. ID no. 15168900
atagtcggagatgagaagcttctcttctttcccccaaacgaagccacgaaccctaacgagatttgggtgacgaagtttagcaattccctgaacctccttctcgaattccttaaatttcgccgccggacaactctccgccccaatccgccgcactgcaaaagccgcaccgttctctaacaccgctttatacaagattccgtcgcttctattggttccaagtacgtaagctgatgcctttagtagagtatctagctccagctgagtttctccatccactgtcactagttgagtttcagtgttgtgttttactcgcccaccacctgttcgatcaaatgcctcaacgggtttttggttctctatgtcactctcggatgacaccgacgtttcttcgaccttctgcttatccatgaaccgcatcccatttttgcaggtggagatttcgtgaactccgaggcggcggggacgttgtgtttcgatttcttgacggataatgtatcggttttctccagacatttttgtaagacgttgaaagtgctgtattcttggtagcttctacgtttcttgagctggtatatgtagaggatgaacatggctatgatagctagaccagctatatctgcaagtgtaatgccgacgattgtgcttggttttagtttgcttttggctgtttgatttgttgattctgttgaagagtttgttggtgttggagttgtgggcatgactgctattgcaggtgaagtagtttcagagatatttggtgggtctgatagagtagaagggattgaacaaagggtctttaatggctgaccacataagcctatgttaccagaaaaagactcggtcttttggttaagcaatggtggtgtgttagggattggtcctgttagattgttgaaggagagatcaatgatggcgcttgctggaaatttttcggcgaaaggtggagaaatcatgccggagatttgattgtttgataagttgaggtaaaagagacttgttcctctgaaatctggaggaagagatccgtctagaagatttgaggagatatctagaacctgtactgcttcaaacccgcttggaatatcgcctgaaaatgaattcttcgccaaggaaatgactgtcagattcttgggaagtgagagattgggagggatttttccggtcaaggcgttggcagagagattcaagagctgcagactagccacgttgttgatactacggggtagttcacccagaaaccttgttgttaccaagggacagaatgcgaagctcactggcgttggacacagaatccggcagtgatccatggaagaaattgtcggagagatccaagattcttagatgtaggattgaaaacaagtcgggagaaacagaaccaagaagctgtttgttgggaagaaccaaacttgtaactctaaacatgtcaggggtgttgggaatcccaagctctgtgcatgtaacaccggtccaagagcacggtgtttcatcgttgtagttccagtttcgtagaactaagagaggatcattgaggatggaatacttgaaagagagtaaagcaacaccatctgtgttaagagcttggataagagtagggagatgaagaaggagaagatggaggaagaggttgcttctgttggaagtcatggttcgagttcttaggttttctctgttctctgagtatgtttatgaaaatgcctatacataggatagagagatggtgaaccactgcaagtaatgattgttttgttcaccaaattttttaagatattggagcaaagcaaaactatgaggttatgcttagagaaggtgaggttgaaagtctgaaaggtataaagaaaggggttggtaagttttttattctttaaaaagtgtttcataacattaaaatcatgacaccgttgacctgaacttgtataaaactctgtccttatttagagtttttttttt

SEQ ID NO: 218 - protein, 77 aa, Arabidopsis thaliana
  peptide (1)..(77): Ceres Seq. ID no. 15168901
MRSSLALDTESGSDPWKKLSERSKILRCRIENKSGETEPRSCLLGRTKLVTLNMSGVLGIPSSVHVTPVQEHGVSSL

SEQ ID NO: 219 - protein, 62 aa, Arabidopsis thaliana
  peptide (1)..(62): Ceres Seq. ID no. 15168902
MTVRFLGSERLGGIFPVKALAERFKSCRLATLLILRGSSPRNLVVTKGQNAKLTGVGHRIRQ

SEQ ID NO: 220 - protein, 59 aa, Arabidopsis thaliana
  peptide (1)..(59): Ceres Seq. ID no. 15168903
MPLVEYLAPAEFLHPLSLVEFQCCVLLAHHLFDQMPQRVFGSLCHSRMTPTFLRPSAYP

SEQ ID NO: 221 - DNA, 2077 bp, Arabidopsis thaliana
  misc_feature (1)..(2077): Ceres Seq. ID no. 14310053
acttcggatggccgcgaggtattgcatgagcgcggggtcctttgctgcgtaatctttttcgacctggccggcaactatcttggagtctgttttgatgatacaggtggtgactccgagggcccttagcttgcggaggccgaggatgactgcttcatattctgctatattgtttgtgcatctgtcggattccagagcgaagctgaggcgtgctgcatatctgtgcttgaccccggctggtgaggtgatgattgcagcggcgcctgcccccgcatggcaccatgcgccgtcgcaatggatagtccaaaccttttctgtggacgggtctggttgtgttattggcccagtccaatcgatgacgaagtctgccaggacttgtgacttgatggttgtcctgggctcgaagctgatgtggtagccggatagttcggctgcccacttggcaatcctcaccgatgcctctaggtttctgaataattcgccgagtcccctgtctgaggtgactcggaccttgaatgcttcaaagtagtggcgcagtttgcgcgaagacataacgactgcgtaagcaatcttctccagctctgtcatgttgcacttggacggtgtcagtacctcggagacatagtagacagggcattgcctgaccacgccctcaactgtctgctcctgcactagtgccgcgctgacagcgtgcggcgaagccgcgacgtagagcaatagggggagcgaggagtcggggcttgtgaggatggccagctccgacaggtactgttttagtgaggcgaaggccgctgcctgctccggtttccaggcgaagtcctttgcaccgcggagtgttttgaggaaggggagacttcgctcggcggacctggagatgaatctgttgagagcggccaatctgcctgtcagtcgctggacgtccctgacggactgcggaggcgacatgtctacgatggcctggatcttggttgggttggcctcgatgccgcggcgtgataccaggtagcccaatattttgccctgacgaacgccgaagacgcacttttccgggtttaggcggagtcgtgcgtctcgcatgttcgcgaatgtctcggcgaggtcggtgaggtggtcctccttgttcttgctggcgacgacgatgtcgtccacatatgtaaatatatttctgccaacctgcccttcgagtactgttttggtgagtctggagaaggtggacccggcgttcttgagtccctccggcattctgatgaagcaatatgtgccgaagggtgttataaagctggtgctagccttgtcttccttcttcatgtatatctggtggtaaccggagaagtagtcgaggagtgacatgacctcgcatccggccgcgctatcgactattttgtcgatccacggcaacgggaaattgtcctttgggcaggccttattgagactggtgaagtctatgcacattcgccatttcccgctttttttctgcaccattacaacattggagagccaggtggggtaagctattggcttgatgaatttagcctctaggaggcggtgcacctccgccttggcagcctctgtcttttcgtcggacattttgcgaagcctctgcctttttggtcgcaccgaagggtcaattcccaagctgtgctcaattatggatcgactgactccgaccaggtcgagggcggaccaggcgaagacatctatattcttggacaggcagcagaggagtctctcttcttcatgcgaggtgaggtcttcgctgatagtgactgtctgcttgggcgtggcctgatcgagggggacagtcttggtcccgtcttggctctgcagctgtgccttgtcgtgctgtttatcggttgggctcgcgggcgctgggacctcgcgctggtctgaccgggcacgaagtcccgctctatgttgcgcgccgtctgctggttgccgtagaccgtgatggcgcctagcggacctggtatcttcatacataggtacagtccgtggatggcggcttcgaacttattgatggagccccgacccatgatggcgttgtatggatataccatatccacaatatcaaaagtcactt

SEQ ID NO: 222 - protein, 106 aa, Arabidopsis thaliana
  peptide (1)..(106): Ceres Seq. ID no. 14310054
MIQVVTPRALSLRRPRMTASYSAILFVHLSDSRAKLRRAAYLCLTPAGEVMIAAAPAPAWHHAPSQWIVQTFSVDGSGCVIGPVQSMTKSARTCDLMVVLGSKLMW

SEQ ID NO: 223 - protein, 90 aa, Arabidopsis thaliana
  peptide (1)..(90): Ceres Seq. ID no. 14310055
MTASYSAILFVHLSDSRAKLRRAAYLCLTPAGEVMIAAAPAPAWHHAPSQWIVQTFSVDGSGCVIGPVQSMTKSARTCDLMVVLGSKLMW

SEQ ID NO: 224 - protein, 88 aa, Arabidopsis thaliana
  peptide (1)..(88): Ceres Seq. ID no. 14310056
MNLASRRRCTSALAASVFSSDILRSLCLFGRTEGSIPKLCSIMDRLTPTRSRADQAKTSIFLDRQQRSLSSSCEVRSSLIVTVCLGVA

SEQ ID NO: 225 - DNA, 1834 bp, Arabidopsis thaliana
  misc_feature (1)..(1834): Ceres Seq. ID no. 14310057
gtaccgggcccccccttttggcaaagaaagaaatttggtccattgaaataaggttccaagatacagatcataatcttttcgaaaacattgctaaagcacaaatggtgacatgcttcctctggctctcaaggtttgatgtgaaactttccatgtttacttctcgtagatccaggggtgctggctgctctgccaatcagcagggccctcggggaaccacagggcaatctccttattagcactctcaatgctgtcacttccatgaatgacattcctatagcacaaaacaaggtcatgagaacttggcatcatagtagaatctgataccacagacataatccgagaggctttaacactacatttaaaaaatgggttttctagattaaatcagaagtacaatacagcaaaaccctcatggacaactacgcagaataagatacagtacaccccaactattcatggctaaagacgagttaaatggatgattaaacagcaaccagagcaaccagtccccacaacaccaggaaagtacatcacttacatccactgatgtctaaatgttttgtggactccacatcagattcagaacaagtataagctcagatctggtaaacacatgccagaggatgtacctactggacccacgagttggatgtaacaggtcataatgccaacattaaaacagttgatctgcagcatggctgcaatcatgagatgaccacaaatgttcattaccccaagatacaaacaaactaatgaactgagagccaacatttggtcataatcatctacatgcattgtctcttaacatctaatttgactacacaaaataaataaccgtagctctacataaatccaatgctagtcagtcaagaattttagcatcactatggaaaagagcaaattttaggatatataactacgccgaactcaggagtgtgaacattttttacattggatgtatggcagtcccaattggattgagcagctttaacacattaagcatctaagcataaccaatgcatgaataacggtgactgaaaaccataagatacaaaaatcggactgagatctaacctgccaatgtcgacagcaaagtcgccacggatggtgccgggctcagaagccagggggttggtggcgccaatgatcttgcggccagttgtgacgacgctcttgccctcccagaccatggccaccacagggccagagatgatgtagtccacgaggccctggaagaagggcttggaggcgagatcggcgtagtgcttctcagcaaacgacctctccacgttcacaagcttcaaggctgcatttcgagttggcaggttatcaagcacgacttgttttacaaaccgtaatcagattacaaaaaacttagcagctatgcaccaaaatctttatcaacagatttaggaaaagtgacatcttatttgagcacaaactgttgaatttccgtctaaagccacatctttagtctttaaatggagaaattgaaggctgtttcggaacataatggaagtttgaatcaaaacatggacgctagattacccttgaggtagaagcccttcttctcaaaacggctgatgatctcaccaatctgaaaaaaccaagcaggatggagtgaacacaaactagtacaaaatcgtatcacaaagcgcggggacatcaccaaatcgaatcgaatgaacagaaattaactgggaacatatgatgcttacgaggcccctctggacgccgtcaggcttgatcatgatgaaggtgctctccattgcggcgactgcgagagggcgctggcacttgtttgatggtctggttttgtcggcgccgtcggagc

SEQ ID NO: 226 - protein, 77 aa, Arabidopsis thaliana
  peptide (1)..(77): Ceres Seq. ID no. 14310058
TGPPLLAKKEIWSIEIRFQDTDHNLFENIAKAQMVTCFLWLSRFDVKLSMFTSRRSRGAGCSANQQGPRGTTGQSPY

SEQ ID NO: 227 - protein, 45 aa, Arabidopsis thaliana
  peptide (1)..(45): Ceres Seq. ID no. 14310059
MSTAKSPRMVPGSEARGLVAPMILRPVVTTLLPSQTMATTGPEMM

SEQ ID NO: 228 - protein, 44 aa, Arabidopsis thaliana
  peptide (1)..(44): Ceres Seq. ID no. 14310060
MVTCFLWLSRFDVKLSMFTSRRSRGAGCSANQQGPRGTTGQSPY

SEQ ID NO: 229 - DNA, 2021 bp, Arabidopsis thaliana
  misc_feature (1)..(2021): Ceres Seq. ID no. 14309779
ccaaaccaaaacctcacattgctcccaataattaaaatgaagagggacactttggtcaatacagcctcataaccctcctcgctatagagtggccgtgactattcgccttagccgccgtcttctcccacccaccaccaccaccaccgcctccgcctccaccactaccaccgctggtcttccagcttctcctcatcggagtcaaataaaacctcaacattccgttctctccatctttggacgaatacctcgaactcttattcctcgccgatcctccaccggagcttcgccagctcacattgctgttactcctcctcatcttcggtcctcctccttctccattcctcatctccggccatgattccgataaagacctctcaaccattccggcgctgttggatctgctatacctatcttcttcttcatcgtccttaccttttctgtatataaaccctaaaatgctccattttccccaccgtctcgatttcttatcgccgttttgattccctttgttctccgctgtttccatggaatttgagtctattgttgttgtcgaatttgataccgatttgacatcctctagctccgttacaatttttctaatagaattggatctgtcgaggctcttccgtctccgtgacgacggaggtccagtgtagtagtctcgagtttgattggatccgcctgggattatgataatcgggtcggagtcaccgctaatcggtttaattgacggagacgatggaatctgcatgtctgatcgattcaacggagcattttccacaactgataacatcgatggcggcagaggaaccctagacgccgttgtcctgccgattaagtgtccatcccacgacgctcttggctcatctaatgagtagcgagaatcgtccattgaaatccgacctatatcgacggagaatctcccggcgtcaagagagaatctcgggtcggtgtcgcttgatctccggcctattccgatttcagactgtggccgtcctccgccgacaccgtttctcggcttcttcaccttctgcttctgcttccatttctgaagcttcttgctgaaaacagaggccgccgaaaagaaactcccggcgaaatctttcaccgacggtttctttgtttgtgagtagagatccatgtaatccttcattggcttcaattcctcttcttcctcaccaatttcgctgcttttttcctcaactatctcgccgggatcgttctcaccgttttcttcatcctcctcaatttcagcttcttcagtcacctctaaaactatctcactcacgctagactccctagcctcctcctcgattttatcgacggaggcagcttcattgatgggaaggtttctttcgtcgtcacgaagtctgacgtcacaagaccgacgctgtggctcaaacccaccggaaaatccttcgttgttctttgcggaaaaggactttgtacgtcggagctccgggaagaaaccgggtctgacccgaccgtttccgttggagttgttggtaccactagaggagggcttgaagagagcttttaacgaaacagcggagatagagggaggtttccaggaagaagaagacggtggcggagcggcgttgtgatctaagacggagaggcggtcgcaaagacaagaaggacagaaaccggagaaacgctcttctgggtggagatcacatgatgtagataagcgatgcggttgagaaggcggagctagttcgtcgacggcggtgacgggagcttggtcggcggagagattcataagaggaaaggatgagtgataagacttctttctcttcgtctcatatcatcagtgtcttgtctgcttaattgcttagaggggagagagatgggaagagatgttatgtctgaaactttcgtcttttaccaacggaaattgaaagagaaaggagatgaagagaaataacaaacagttatttattatttaaagaaatttaaaatatttaatgaaatattttgcaggtgtcagattaaatctgcgctattttttgtttttaaag

SEQ ID NO: 230 - protein, 87 aa, Arabidopsis thaliana
  peptide (1)..(87): Ceres Seq. ID no. 14309780
MGRFLSSSRSLTSQDRRCGSNPPENPSLFFAEKDFVRRSSGKKPGLTRPFPLELLVPLEEGLKRAFNETAEIEGGFQEEEDGGGAAL

SEQ ID NO: 231 - protein, 64 aa, Arabidopsis thaliana
  peptide (1)..(64): Ceres Seq. ID no. 14309781
MSSENRPLKSDLYRRRISRRQERISGRCRLISGLFRFQTVAVLRRHRFSASSPSASASISEASC

SEQ ID NO: 232 - protein, 62 aa, Arabidopsis thaliana
  peptide (1)..(62): Ceres Seq. ID no. 14309782
MIIGSESPLIGLIDGDDGICMSDRFNGAFSTTDNIDGGRGTLDAVVLPIKCPSHDALGSSNE

SEQ ID NO: 233 - DNA, 1208 bp, Arabidopsis thaliana
  misc_feature (1)..(1208): Ceres Seq. ID no. 14310295
gtaccgggccccccctcccctgtttcctcgaagggcctggtctctgcgctagtcatgtcacgaggagcagatgatgcatatacttgatcagtttcactagctattattcgcctaactgaaggatcaactatcactgcagcattcacaagtggtgtatgaccagatactgccatatcaataacaactctcatgaacttgcagattgattgtgtttcctcctcgctgaacccaccgatgccatctatattgtaggttggtggatgaaatgaagtaggccatatcttactttgttcttcccactcttctttggataccgcagcatatttgcatacttgtgtaataaaaggactcaactcatagggatcaacgagtctctgcacatcaggtggcatgtcactcaactgatcgttgtgctcaggtgctagacataagatgacagtcaactgagtttcaccgcaatctggcagaatcttcttcttcacccttttaacatgacgaagatcttctagaggagcaatcttacataaatgcctcactatcgtattggcaaatctgggtttgattaggctagcatataccttcacagtgggctgatggtcaggtgacaatgaaggcttttcaggtatatggataatttcccatgcatctgaatccataattttattttatctatacttgagcgctggagagcttgctccaagcaacaagacacagagacgcagcgagcgatagccgatagagaggaaggaggagttcaccaaaaaggtcaagaagacgacagcttacacgtcgccgttttaggtcttatctaattaacctttaagaattttgtacggcaacagaaccagagaacgttgacggctaaaggcggcgaaatggacgttgatgagcggagcagctactgtatcgagggtatggtcgtctgttgagattgaactctccgattgatcatggcgttgaacttgcagtcctctcaactggttgcagtctttgatggtcagaactatgagttctgggctgcaagaatgaaaactactctcttgaatagagatctatgggaagtcgtcaaagatggcgtaccagaagctacaactcaatcaactgaaactccagataaaggaaaagatgctgccttgaaggctctaaaagctaaagacactgctgctctccaaatgggggggggggggggggactagtgagcctggtgc

SEQ ID NO: 234 - protein, 81 aa, Arabidopsis thaliana
  peptide (1)..(81): Ceres Seq. ID no. 14310296
MALNLQSSQLVAVFDGQNYEFWAARMKTTLLNRDLWEVVKDGVPEATTQSTETPDKGKDAALKALKAKDTAALQMGGGGGD

SEQ ID NO: 235 - protein, 56 aa, Arabidopsis thaliana
  peptide (1)..(56): Ceres Seq. ID no. 14310297
MKTTLLNRDLWEVVKDGVPEATTQSTETPDKGKDAALKALKAKDTAALQMGGGGGD

SEQ ID NO: 236 - DNA, 1522 bp, Arabidopsis thaliana
  misc_feature (1)..(1522): Ceres Seq. ID no. 15174947
accgtgatgatcgtcggtctcacacgtgcgtactgtggatccaggtaacgcgggagataagcctcgaggctgagctccgttgggtacggcctcgccgtgaaattgtaatttcgatgaggattgcttcctccgactaagactctgccgtctgacagaagaagagacgccgaatggtacattctagggattcgagtcggggtgagaatttcgaatctccgggtctggtcaggctcctcgggtaagtataaaatcgggttgagaacagcgttcgtcgcgtcttcccaaccagcggttccgttagcagcaccgttaatgatcaaaacgtcaccgtttggtaacagtaacatatcagacatgacacgtggcgatggcatttgctccatgacccatttcggatccgggtcggtcactttcaatctcccacacgtgcgtgatcccgcgacgaagattttaggaatcgtcctcgccgctttgaagaacgctcccggcggagcaccgccgcataccataacctcagcagttatcttcgttctgttaatgtctccggtgagaaagagagggaggagcacggaggagccagtgctgggataattccgtttatcgccgccgggaatctgtggaaactccttgatgattcggtgattgacgaaatcgaacaaaatcgatctccgattggcgaagatgaagagattaccgtcggggagaagatgaagaaacggataaagattgttttcttcattcggatctctcgtctccgccaagaatctgagattgaaaacggattctcccggatccttggggtaaaactcgtagttgaaagctcttcttccgccgacgatgataatccgaccatcgggaagaatctgattggtggaataccaccggcgagaggagagatacgctctgttctcaatccaatcacacgaaacgcttccaactcctccgtcgcaaggtgtgaaaacccgtacagttctttcgccgttgccataaccgccggtttggattaaagaaccggaagcgtttaaagaaccggaagagcaccacgtgtcgtaacgtagtgtttgagaagggagagaaacattcgaaggtccataatccgtacggtcaaagatgacgactttgttgttgtgtagaagctgcatgtgcattgcggatatacctacactcggctgcagaagatcccacctcccgccggtgagaatagctaacggtgaacgtggaaggagcaaatccgacgtggaacagaggaagaagaagaagaatgatatcacgacggcgttaaggttgttcttgaatctttcttgcgtcattattttcagctaagaatcttctttctccggtgaaagagatttaacatttaaagcttctttgagtaattattagtgtctttcttgaaatcggtaggagaagaaacatttatggtgttgtattgttttacttttctggtgaaatgtgtgatcaagactcgcagtgctctctgtacataatgatctggtagatttgtaacatatggtcaagattt

SEQ ID NO: 237 - protein, 99 aa, Arabidopsis thaliana
  peptide (1)..(99): Ceres Seq. ID no. 15174948
MKKRIKIVFFIRISRLRQESEIENGFSRILGVKLVVESSSSADDDNPTIGKNLIGGIPPARGEIRSVLNPITRNASNSSVARCENPYSSFAVAITAGLD

SEQ ID NO: 238 - protein, 92 aa, Arabidopsis thaliana
  peptide (1)..(92): Ceres Seq. ID no. 15174949
MIKTSPFGNSNISDMTRGDGICSMTHFGSGSVTFNLPHVRDPATKILGIVLAALKNAPGGAPPHTITSAVIFVLLMSPVRKRGRSTEEPVLG

SEQ ID NO: 239 - protein, 78 aa, Arabidopsis thaliana
  peptide (1)..(78): Ceres Seq. ID no. 15174950
MTRGDGICSMTHFGSGSVTFNLPHVRDPATKILGIVLAALKNAPGGAPPHTITSAVIFVLLMSPVRKRGRSTEEPVLG

SEQ ID NO: 240 - DNA, 1092 bp, Arabidopsis thaliana
  misc_feature (1)..(1092): Ceres Seq. ID no. 12396837
  misc_feature: MA Experiment ID: 108461 Result: Up-regulated in Transcription
  misc_feature: MA Experiment 108461 PARAMETER Experiment Name: At_Germinating_Seeds_cDNA_P Parameter: Age (day) Value: 1 vs. 0
  misc_feature: MA Experiment 108461 PARAMETER Experiment Name: At_Germinating_Seeds_cDNA_P Parameter: Tissue Value: Germinating Seeds
  misc_feature: MA Experiment ID: 108462 Result: Up-regulated in Transcription
  misc_feature: MA Experiment 108462 PARAMETER Experiment Name: At_Germinating_Seeds_cDNA_P Parameter: Age (day) Value: 2 vs. 0
  misc_feature: MA Experiment 108462 PARAMETER Experiment Name: At_Germinating_Seeds_cDNA_P Parameter: Tissue Value: Germinating Seeds
  misc_feature: MA Experiment ID: 108463 Result: Up-regulated in Transcription
  misc_feature: MA Experiment 108463 PARAMETER Experiment Name: At_Germinating_Seeds_cDNA_P Parameter: Age (day) Value: 3 vs. 0
  misc_feature: MA Experiment 108463 PARAMETER Experiment Name: At_Germinating_Seeds_cDNA_P Parameter: Tissue Value: Germinating Seeds
  misc_feature: MA Experiment ID: 108464 Result: Up-regulated in Transcription
  misc_feature: MA Experiment 108464 PARAMETER Experiment Name: At_Germinating_Seeds_cDNA_P Parameter: Age (day) Value: 4 vs. 0
  misc_feature: MA Experiment 108464 PARAMETER Experiment Name: At_Germinating_Seeds_cDNA_P Parameter: Tissue Value: Germinating Seeds
  misc_feature: MA Experiment ID: 108488 Result: Up-regulated in Transcription
  misc_feature: MA Experiment ID: 108561 Result: Down-regulated in Transcription
  misc_feature: MA Experiment 108561 PARAMETER Experiment Name: At_100uM_ABA_cDNA_P Parameter: Timepoint (hr) Value: 6
  misc_feature: MA Experiment 108561 PARAMETER Experiment Name: At_100uM_ABA_cDNA_P Parameter: Tissue Value: Aerial
  misc_feature: MA Experiment 108561 PARAMETER Experiment Name: At_100uM_ABA_cDNA_P Parameter: Treatment Value: 100uM ABA vs. No Treatment
  misc_feature: MA Experiment ID: 108595 Result: Down-regulated in Transcription
  misc_feature: MA Experiment 108595 PARAMETER Experiment Name: At_Ler-pi_Ovule_cDNA_P Parameter: Plant Line Value: null
  misc_feature: MA Experiment ID: 20000030 Result: Down-regulated in Transcription
  misc_feature: MA Experiment 20000030 PARAMETER Experiment Name: At_CS6630_Roots_cDNA_P Parameter: Plant Line Value: CS6630 vs. WS
  misc_feature: MA Experiment 20000030 PARAMETER Experiment Name: At_CS6630_Roots_cDNA_P Parameter: Tissue Value: Roots
  misc_feature: MA Experiment ID: 20000069 Result: Down-regulated in Transcription
  misc_feature: MA Experiment 20000069 PARAMETER Experiment Name: At_100uM_ABA_Mutants_cDNA_P Parameter: Plant Line Value: CS23
  misc_feature: MA Experiment 20000069 PARAMETER Experiment Name: At_100uM_ABA_Mutants_cDNA_P Parameter: Timepoint (hr) Value: 6
  misc_feature: MA Experiment 20000069 PARAMETER Experiment Name: At_100uM_ABA_Mutants_cDNA_P Parameter: Tissue Value: Aerial
  misc_feature: MA Experiment 20000069 PARAMETER Experiment Name: At_100uM_ABA_Mutants_cDNA_P Parameter: Treatment Value: 100uM ABA vs. No Treatment
  misc_feature: MA Experiment ID: 20000071 Result: Down-regulated in Transcription
  misc_feature: MA Experiment 20000071 PARAMETER Experiment Name: At_100uM_ABA_Mutants_cDNA_P Parameter: Plant Line Value: CS8104
  misc_feature: MA Experiment 20000071 PARAMETER Experiment Name: At_100uM_ABA_Mutants_cDNA_P Parameter: Timepoint (hr) Value: 6
  misc_feature: MA Experiment 20000071 PARAMETER Experiment Name: At_100uM_ABA_Mutants_cDNA_P Parameter: Tissue Value: Aerial
  misc_feature: MA Experiment 20000071 PARAMETER Experiment Name: At_100uM_ABA_Mutants_cDNA_P Parameter: Treatment Value: 100uM ABA vs. No Treatment
  misc_feature: MA Experiment ID: 20000072 Result: Down-regulated in Transcription
  misc_feature: MA Experiment 20000072 PARAMETER Experiment Name: At_100uM_ABA_Mutants_cDNA_P Parameter: Plant Line Value: CS8105
  misc_feature: MA Experiment 20000072 PARAMETER Experiment Name: At_100uM_ABA_Mutants_cDNA_P Parameter: Timepoint (hr) Value: 6
  misc_feature: MA Experiment 20000072 PARAMETER Experiment Name: At_100uM_ABA_Mutants_cDNA_P Parameter: Tissue Value: Aerial
  misc_feature: MA Experiment 20000072 PARAMETER Experiment Name: At_100uM_ABA_Mutants_cDNA_P Parameter: Treatment Value: 100uM ABA vs. No Treatment
  misc_feature: MA Experiment ID: 20000184 Result: Up-regulated in Transcription
  misc_feature: MA Experiment 20000184 PARAMETER Experiment Name: At_Shoots__P Parameter: Age (day) Value: 7
  misc_feature: MA Experiment 20000184 PARAMETER Experiment Name: At_Shoots__P Parameter: Tissue Value: Shoots vs. Whole Plant
  misc_feature: MA Experiment ID: 20000224 Result: Down-regulated in Transcription
  misc_feature: MA Experiment ID: 20000234 Result: Up-regulated in Transcription
  misc_feature: MA Experiment 20000234 PARAMETER Experiment Name: At_Siliques_P Parameter: Age (day) Value: 21
  misc_feature: MA Experiment 20000234 PARAMETER Experiment Name: At_Siliques_P Parameter: Organism Value: A. thaliana
  misc_feature: MA Experiment 20000234 PARAMETER Experiment Name: At_Siliques_P Parameter: Plant Line Value: WS
  misc_feature: MA Experiment 20000234 PARAMETER Experiment Name: At_Siliques_P Parameter: Tissue Value: Less Than 5mm Siliques vs. Whole Plant
  misc_feature: MA Experiment ID: 20000235 Result: Up-regulated in Transcription
  misc_feature: MA Experiment 20000235 PARAMETER Experiment Name: At_Siliques_P Parameter: Age (day) Value: 21
  misc_feature: MA Experiment 20000235 PARAMETER Experiment Name: At_Siliques_P Parameter: Organism Value: A. thaliana
  misc_feature: MA Experiment 20000235 PARAMETER Experiment Name: At_Siliques_P Parameter: Plant Line Value: WS
  misc_feature: MA Experiment 20000235 PARAMETER Experiment Name: At_Siliques_P Parameter: Tissue Value: 5-10mm Siliques vs. Whole Plant
  misc_feature: MA Experiment ID: 20000264 Result: Up-regulated in Transcription
  misc_feature: MA Experiment 20000264 PARAMETER Experiment Name: At_Open_Flower_P Parameter: Age (day) Value: 21
  misc_feature: MA Experiment 20000264 PARAMETER Experiment Name: At_Open_Flower_P Parameter: Plant Line Value: WS
  misc_feature: MA Experiment 20000264 PARAMETER Experiment Name: At_Open_Flower_P Parameter: Tissue Value: Open Flower vs. Whole Plant
  misc_feature: MA Experiment ID: 20000286 Result: Up-regulated in Transcription
  misc_feature: MA Experiment 20000286 PARAMETER Experiment Name: At_Open_Flower_P Parameter: Age (day) Value: 21
  misc_feature: MA Experiment 20000286 PARAMETER Experiment Name: At_Open_Flower_P Parameter: Plant Line Value: WS
  misc_feature: MA Experiment 20000286 PARAMETER Experiment Name: At_Open_Flower_P Parameter: Tissue Value: Half Open vs. Whole Plant
  misc_feature: MA Experiment ID: 20000451 Result: Down-regulated in Transcription
  misc_feature: MA Experiment 20000451 PARAMETER Experiment Name: At_CS6879_Shoots-Roots_P Parameter: Age (day) Value: 14
  misc_feature: MA Experiment 20000451 PARAMETER Experiment Name: At_CS6879_Shoots-Roots_P Parameter: Organism Value: A. thaliana
  misc_feature: MA Experiment 20000451 PARAMETER Experiment Name: At_CS6879_Shoots-Roots_P Parameter: Plant Line Value: CS6879 vs. WS
  misc_feature: MA Experiment 20000451 PARAMETER Experiment Name: At_CS6879_Shoots-Roots_P Parameter: Tissue Value: Roots
  misc_feature: MA Experiment ID: 20000452 Result: Down-regulated in Transcription
  misc_feature: MA Experiment 20000452 PARAMETER Experiment Name: At_CS6879_Shoots-Roots_P Parameter: Age (day) Value: 14
  misc_feature: MA Experiment 20000452 PARAMETER Experiment Name: At_CS6879_Shoots-Roots_P Parameter: Organism Value: A. thaliana
  misc_feature: MA Experiment 20000452 PARAMETER Experiment Name: At_CS6879_Shoots-Roots_P Parameter: Plant Line Value: CS6879 vs. WS
  misc_feature: MA Experiment 20000452 PARAMETER Experiment Name: At_CS6879_Shoots-Roots_P Parameter: Tissue Value: Shoots
aaaataatattaattttctcggcgaggcttgcagcgtggtcggcagtcagcttctccaatgaaagttgtttgcttgggactccgagatctgtggatctattggatgctctgtcttataaagtgtcggcgaaggctctggtctcattatgtttcctgttgcttgtagcggatctgtgtttgtttgtctcactctgttttgctagtccggtaagcagactttccaacctttcttcatagcctttttgttagggttagacggaatcgcttttgttgggttcttgagttggctgtaacagtttcagagatagtatcgtttagcttcttttcttctccgacggtctgggatgttgaaaaggcaatgtctttccggttttagttgtttaagtttcgttttgtctctgcatgttttggatagaagatgggattcccattttatgctttttgatgaatgaacgaatgctcgttgtggtgattatctggcctacaagttcttttgtattcttgggagatttctttggttcactctggttcgatcttctgctgctcttgattcttcgagaatggtgttacccggtgtggatttttcgctccttgtctctgcatttcagatctgatcgagatctggtcctatggttttgcttctatctaggtgtaaaatgtcgccttgtctccgacgtcaccgtatccggaagaaagtgtgaggttccatgtgtggttctgtctttgcggattatgaagattagcataggagttctgttacttttaggcagtttggcatctttagaggaggattagattatcgatggttggccacgggcatcttcgatatgtactatcaaaggatctcttgaagtatgctttccttgttgggttggtttatggtcccatttggttgagtgttttgttttggtctgttcttgtagtggggttcttctgctttcattatatgtttgtatcggtttgtagccttgtagtattgtttctttgcttccctcacatagggctttagactccagagatatctttgttttctgctagcatatggttgtaatcttccaaatatcattcatggtttttaataaaatctagatg

SEQ ID NO: 241 - protein, 130 aa, Arabidopsis thaliana
  peptide (1)..(130): Ceres Seq. ID no. 12396838
MFWIEDGIPILCFLMNERMLVVVIIWPTSSFVFLGDFFGSLWFDLLLLLILREWCYPVWIFRSLSLHFRSDRDLVLWFCFYLGVKCRLVSDVTVSGRKCEVPCVVLSLRIMKISIGVLLLLGSLASLEED

SEQ ID NO: 242 - protein, 116 aa, Arabidopsis thaliana
  peptide (1)..(116): Ceres Seq. ID no. 12396839
MNERMLVVVIIWPTSSFVFLGDFFGSLWFDLLLLLILREWCYPVWIFRSLSLHFRSDRDLVLWFCFYLGVKCRLVSDVTVSGRKCEVPCVVLSLRIMKISIGVLLLLGSLASLEED

SEQ ID NO: 243 - protein, 112 aa, Arabidopsis thaliana
  peptide (1)..(112): Ceres Seq. ID no. 12396840
MLVVVIIWPTSSFVFLGDFFGSLWFDLLLLLILREWCYPVWIFRSLSLHFRSDRDLVLWFCFYLGVKCRLVSDVTVSGRKCEVPCVVLSLRIMKISIGVLLLLGSLASLEED

SEQ ID NO: 244 - DNA, 758 bp, Arabidopsis thaliana
  misc_feature (1)..(758): Ceres Seq. ID no. 13499585
  misc_feature: MA Experiment ID: 108474 Result: Down-regulated in Transcription
  misc_feature: MA Experiment 108474 PARAMETER Experiment Name: At_Drought_Flowers_cDNA_P Parameter: Timepoint (hr) Value: null
  misc_feature: MA Experiment 108474 PARAMETER Experiment Name: At_Drought_Flowers_cDNA_P Parameter: Treatment Value: Drought vs. No Drought
  misc_feature: MA Experiment ID: 108576 Result: Up-regulated in Transcription
  misc_feature: MA Experiment 108576 PARAMETER Experiment Name: At_42deg_Heat_cDNA_P Parameter: Temperature (deg C) Value: 42 vs. 22
  misc_feature: MA Experiment 108576 PARAMETER Experiment Name: At_42deg_Heat_cDNA_P Parameter: Timepoint (hr) Value: 1
  misc_feature: MA Experiment 108576 PARAMETER Experiment Name: At_42deg_Heat_cDNA_P Parameter: Tissue Value: Aerial
  misc_feature: MA Experiment ID: 20000355 Result: Up-regulated in Transcription
  misc_feature: MA Experiment 20000355 PARAMETER Experiment Name: At_Siliques_Sub_P Parameter: Age (day) Value: 21
  misc_feature: MA Experiment 20000355 PARAMETER Experiment Name: At_Siliques_Sub_P Parameter: Organism Value: A. thaliana
  misc_feature: MA Experiment 20000355 PARAMETER Experiment Name: At_Siliques_Sub_P Parameter: Plant Line Value: WS
  misc_feature: MA Experiment 20000355 PARAMETER Experiment Name: At_Siliques_Sub_P Parameter: Tissue Value: Less Than 5mm Siliques vs. Whole Plant
  misc_feature: MA Experiment ID: 20000440 Result: Up-regulated in Transcription
  misc_feature: MA Experiment 20000440 PARAMETER Experiment Name: At_Closed-Flower__Sub_P Parameter: Tissue Value: Closed Flower vs. Whole Plant
atcgattgaggggccttctctctcttaacacactcttattcttcagagagagaatgagaattccggcgacaactggtttttttgttttatacatagtttctgacttttgacggatctctctttccgcttagtcagattttaataattttcggtttagcttggttcgtttccggttaagatcggattatttttagttttattttttttccctctttctacaggatttcagtgtaaatcccgcttgctgtcaattggtttctttcatgttcatctgttggcttgactcttctccaaagttagagtaatatcttcgccgtaatgtcttcgtcgttatgcgaagtggacctctctatcggtcttgggcggagcttcttcctttgaagttggggttgagatgaagatctacaaaatctcctattactcaaggtggaaacaacatacccaatttgatttgtggcggtaatatctgtagaaggatggctccaagagcgtgaattgaagccttcacctggtggttaagaccgtcgtcggacgtgacggcaaattaaaaatttggcggtgagcaaccaaaggtgttcccgcggttttctcgcttgtgccacatgaatccattaggttttagcatcaaacacgtgtctcttacgtatcttctttgtgtaattgagtttattttaaaattaggcttcaaaagactttgtatcacgtatcttgtaatctgtcctttatgaatttcgttataagacgaaaaattgcctgcc

SEQ ID NO: 245 - protein, 41 aa, Arabidopsis thaliana
  peptide (1)..(41): Ceres Seq. ID no. 15223081
MNPLGFSIKHVSLTYLLCVIEFILKLGFKRLCITYLVICPL

SEQ ID NO: 246 - protein, 35 aa, Arabidopsis thaliana
  peptide (1)..(35): Ceres Seq. ID no. 15223082
RLRGLLSLNTLLFFRERMRIPATTGFFVLYIVSDF

SEQ ID NO: 247 - DNA, 819 bp, Arabidopsis thaliana
  misc_feature (1)..(819): Ceres Seq. ID no. 12331947
  misc_feature: MA Experiment ID: 20000113 Result: Up-regulated in Transcription
  misc_feature: MA Experiment 20000113 PARAMETER Experiment Name: At_42deg_Heat_cDNA_P Parameter: Temperature (deg C) Value: 42 vs. 22
  misc_feature: MA Experiment 20000113 PARAMETER Experiment Name: At_42deg_Heat_cDNA_P Parameter: Timepoint (hr) Value: 8
  misc_feature: MA Experiment 20000113 PARAMETER Experiment Name: At_42deg_Heat_cDNA_P Parameter: Tissue Value: Aerial
acatcatctgcaataacttgagcttctttagtcgttgggaaaacacctcctccttcaatacatttatcaacatcaaattcatctctccgactaaaataagcattccctttcttacctacacttatcacaacacagtctattcctctctgcttcaactcttgaactcgcagagtagctttcttggtcactgcattgttgaaaccaccacacaatcctttatcgccagtaacaacaaccaaggcaactctcttcacgggtctaacaatgctcagaggaaaatcaatgtcttctaattgagcagattggttaattgagtagagaatctccacaagagtttcagtgaaaggtctaccctttatgactgcatcttgagctcgacgaactctagctgccgccacgagtctcatcgcttccgttatcttctgggtattcttcacactgtcgattcgttctcgtaactctcggattccagctcgaatttgaattgagggcaacggagatctcgacgaaatccggtttggtgtcagtgattgaaacggataataacgaaatggtttcaaggtagctatgaaagagtaggactctgagctcgaagccgaattcgaattcgaaggagacgacaagagccaagagatcgagatcgaacctgtcattttcgtttgggaaagaagaccctgaacttgagaggtttaagatttcatcttctcgtgaagaaatgagcaaagaaagagaacttgaggggttttctgtaattatcatgtttattaggggtcagtatgtaaaaattactacaaaagtcaaaagtagagtttttgtttt

SEQ ID NO: 248 - protein, 96 aa, Arabidopsis thaliana
  peptide (1)..(96): Ceres Seq. ID no. 12331948
IICNNLSFFSRWENTSSFNTFINIKFISPTKISIPFLTYTYHNTVYSSLLQLLNSQSSFLGHCIVETTTQSFIASNNNQGNSLHGSNNAQRKINVF

SEQ ID NO: 249 - DNA, 1401 bp, Arabidopsis thaliana
  misc_feature (1)..(1401): Ceres Seq. ID no. 12335078
  misc_feature: MA Experiment ID: 20000171 Result: Down-regulated in Transcription
  misc_feature: MA Experiment 20000171 PARAMETER Experiment Name: At_42deg_Heat_P Parameter: Age (day) Value: 14
  misc_feature: MA Experiment 20000171 PARAMETER Experiment Name: At_42deg_Heat_P Parameter: Organism Value: A. thaliana
  misc_feature: MA Experiment 20000171 PARAMETER Experiment Name: At_42deg_Heat_P Parameter: Plant Line Value: WS
  misc_feature: MA Experiment 20000171 PARAMETER Experiment Name: At_42deg_Heat_P Parameter: Temperature (deg C) Value: 42 vs. 22
  misc_feature: MA Experiment 20000171 PARAMETER Experiment Name: At_42deg_Heat_P Parameter: Timepoint (hr) Value: 1
  misc_feature: MA Experiment 20000171 PARAMETER Experiment Name: At_42deg_Heat_P Parameter: Tissue Value: Aerial
  misc_feature: MA Experiment ID: 20000173 Result: Down-regulated in Transcription
  misc_feature: MA Experiment 20000173 PARAMETER Experiment Name: At_42deg_Heat_P Parameter: Age (day) Value: 14
  misc_feature: MA Experiment 20000173 PARAMETER Experiment Name: At_42deg_Heat_P Parameter: Organism Value: A. thaliana
  misc_feature: MA Experiment 20000173 PARAMETER Experiment Name: At_42deg_Heat_P Parameter: Plant Line Value: WS
  misc_feature: MA Experiment 20000173 PARAMETER Experiment Name: At_42deg_Heat_P Parameter: Temperature (deg C) Value: 42 vs. 22
  misc_feature: MA Experiment 20000173 PARAMETER Experiment Name: At_42deg_Heat_P Parameter: Timepoint (hr) Value: 6
  misc_feature: MA Experiment 20000173 PARAMETER Experiment Name: At_42deg_Heat_P Parameter: Tissue Value: Aerial
  misc_feature: MA Experiment ID: 20000495 Result: Up-regulated in Transcription
  misc_feature: MA Experiment 20000495 PARAMETER Experiment Name: At_Guard_Cells_P Parameter: Harvest Date Value: 8/2/2002
  misc_feature: MA Experiment 20000495 PARAMETER Experiment Name: At_Guard_Cells_P Parameter: Organism Value: A. thaliana
  misc_feature: MA Experiment 20000495 PARAMETER Experiment Name: At_Guard_Cells_P Parameter: Tissue Value: Guard Cells vs. Leaves
  misc_feature: MA Experiment ID: 20000573 Result: Down-regulated in Transcription
  misc_feature: MA Experiment 20000573 PARAMETER Experiment Name: At_100uM_ABA_Mutants__P Parameter: Organism Value: A. thaliana
  misc_feature: MA Experiment 20000573 PARAMETER Experiment Name: At_100uM_ABA_Mutants__P Parameter: Plant Line Value: CS22 vs. Ler wt
  misc_feature: MA Experiment 20000573 PARAMETER Experiment Name: At_100uM_ABA_Mutants__P Parameter: Timepoint (hr) Value: N/A
  misc_feature: MA Experiment 20000573 PARAMETER Experiment Name: At_100uM_ABA_Mutants__P Parameter: Tissue Value: Whole Plant
  misc_feature: MA Experiment 20000573 PARAMETER Experiment Name: At_100uM_ABA_Mutants__P Parameter: Treatment Value: None
  misc_feature: MA Experiment ID: 20001451 Result: Up-regulated in Transcription
  misc_feature: MA Experiment 20001451 PARAMETER Experiment Name: At_Far-red-induction_P Parameter: Age (day) Value: 7
  misc_feature: MA Experiment 20001451 PARAMETER Experiment Name: At_Far-red-induction_P Parameter: Light Value: Far-red vs. White
  misc_feature: MA Experiment 20001451 PARAMETER Experiment Name: At_Far-red-induction_P Parameter: Organism Value: A. thaliana
  misc_feature: MA Experiment 20001451 PARAMETER Experiment Name: At_Far-red-induction_P Parameter: Plant Line Value: Columbia
  misc_feature: MA Experiment 20001451 PARAMETER Experiment Name: At_Far-red-induction_P Parameter: Timepoint (hr) Value: 24
  misc_feature: MA Experiment 20001451 PARAMETER Experiment Name: At_Far-red-induction_P Parameter: Tissue Value: Whole Plant
  misc_feature: MA Experiment ID: 20001757 Result: Down-regulated in Transcription
  misc_feature: MA Experiment 20001757 PARAMETER Experiment Name: At_50mM_NH4NO3_L-to-H_P Parameter: Timepoint (hr) Value: 6
  misc_feature: MA Experiment 20001757 PARAMETER Experiment Name: At_50mM_NH4NO3_L-to-H_P Parameter: Tissue Value: Leaf
  misc_feature: MA Experiment 20001757 PARAMETER Experiment Name: At_50mM_NH4NO3_L-to-H_P Parameter: Treatment Value: 50mM NH4NO3 vs 100mM Mannitol
  misc_feature: MA Experiment ID: 20001911 Result: Up-regulated in Transcription
  misc_feature: MA Experiment 20001911 PARAMETER Experiment Name: At_Drought_Reproduction_P Parameter: Age (day) Value: 40
  misc_feature: MA Experiment 20001911 PARAMETER Experiment Name: At_Drought_Reproduction_P Parameter: Organism Value: A. thaliana
  misc_feature: MA Experiment 20001911 PARAMETER Experiment Name: At_Drought_Reproduction_P Parameter: Plant Line Value: WS
  misc_feature: MA Experiment 20001911 PARAMETER Experiment Name: At_Drought_Reproduction_P Parameter: Timepoint (day) Value: 10
  misc_feature: MA Experiment 20001911 PARAMETER Experiment Name: At_Drought_Reproduction_P Parameter: Tissue Value: Flowers
  misc_feature: MA Experiment 20001911 PARAMETER Experiment Name: At_Drought_Reproduction_P Parameter: Treatment Value: Drought vs. No Drought
gtggcatcttaatcaaattcttcttcgccttcactttcaattgtctctccaatatcctcaccagatctgaaaccggcaccggcgacgtgtttccgaggttaaacactctcaattgcgccggacctctcttcttccctccactccctgtactcttctccgccgtatctagcgccgctaaacatcccttcactatatcgtctatgtaagtgaaatccctagccaccgttccgtgattcgccgattcgaatatcgaaatcgatttgccttttagaatatctttagtgaagaagaaatacgccatgtctggtcttccccaaggtccatacacggtgaaaaatcttaatccggttagagataatccatagatgtggttgtaggtatgtgcgatctcttcgccggcttttttagtggcggcgtataaactcgccggttgatctgttttatctttctccgagaacggaactttggtgttgagtccgtagacggagctagacgaagcccagactatagcaggttgtggattcacagatttgcagatctcgaggagattgacgaatccggcgatgatgctatgaacgtacgagctagggttttccattgcgtaccgtacaccagcttgagctgctaaatgcataacgtgtgtgaaggagacgatcttgaatagcttacggagtaattcgacgtcgtttatgtctccttctacgatgaagatcccacttctctcgagtaaagcttgtcttgctcgtttcagagatggatcgtagtaatcgttgaagttgtcgaggccgattacgccgtctccgcggcgttttaatgcggcggagacgtgtgttcggacgaaaccagctgctccggttactaaaactgtgattccgttgtttgttgaggttcggattcgagctgaggatctgagacgtttttcccaagctggtcctccgtaggtgttggttcggagtgaacggcgagatggatcggacggtgaagaagggttaatggacggtggagatcggaggaaagagtagagagatgagacagaggaggaagaaggagaaaaatgcaaactttgtgagagaagattggaatctgagacgatgcaagtaggaagatttctccatcttgaatttgcctgggcttgaagaacatggggattgaagattttagagatccaaatcatagggaaaatatgaagaagagagtcaaaaaaattactgtaaaaattggttgactcttctaaagatttgttgtcgagtcttgaaatttgattggtgagatactaatactccaagattttcgggaagccactcgtcccaaaagttttgaatttgaaccaaagttttaaacttttgttaatagatttgttttgcggatagttgctaaatacaaaaatggactctaaatttg

SEQ ID NO: 250 - protein, 67 aa, Arabidopsis thaliana
  peptide (1)..(67): Ceres Seq. ID no. 12335079
GILIKFFFAFTFNCLSNILTRSETGTGDVFPRLNTLNCAGPLFFPPLPVLFSAVSSAAKHPFTISSM

SEQ ID NO: 251 - DNA, 476 bp, Arabidopsis thaliana
  misc_feature (1)..(476): Ceres Seq. ID no. 5675962
  misc_feature: MA Experiment ID: 20000180 Result: Up-regulated in Transcription
  misc_feature: MA Experiment 20000180 PARAMETER Experiment Name: At_Germinating_Seeds_P Parameter: Age (hr) Value: 24 vs. 0
  misc_feature: MA Experiment 20000180 PARAMETER Experiment Name: At_Germinating_Seeds_P Parameter: Tissue Value: Germinating Seeds
  misc_feature: MA Experiment ID: 20000185 Result: Down-regulated in Transcription
  misc_feature: MA Experiment 20000185 PARAMETER Experiment Name: At_Roots__P Parameter: Age (day) Value: 7 vs. 21
  misc_feature: MA Experiment 20000185 PARAMETER Experiment Name: At_Roots__P Parameter: Organism Value: A. thaliana
  misc_feature: MA Experiment 20000185 PARAMETER Experiment Name: At_Roots__P Parameter: Tissue Value: Roots vs. Whole Plant
  misc_feature: MA Experiment ID: 20000227 Result: Down-regulated in Transcription
  misc_feature: MA Experiment 20000227 PARAMETER Experiment Name: At_Root-Tips-vs-Tops_P Parameter: Tissue Value: Root Tips vs. Root Tops
  misc_feature: MA Experiment ID: 20000264 Result: Down-regulated in Transcription
  misc_feature: MA Experiment 20000264 PARAMETER Experiment Name: At_Open_Flower_P Parameter: Age (day) Value: 21
  misc_feature: MA Experiment 20000264 PARAMETER Experiment Name: At_Open_Flower_P Parameter: Plant Line Value: WS
  misc_feature: MA Experiment 20000264 PARAMETER Experiment Name: At_Open_Flower_P Parameter: Tissue Value: Open Flower vs. Whole Plant
  misc_feature: MA Experiment ID: 20000286 Result: Down-regulated in Transcription
  misc_feature: MA Experiment 20000286 PARAMETER Experiment Name: At_Open_Flower_P Parameter: Age (day) Value: 21
  misc_feature: MA Experiment 20000286 PARAMETER Experiment Name: At_Open_Flower_P Parameter: Plant Line Value: WS
  misc_feature: MA Experiment 20000286 PARAMETER Experiment Name: At_Open_Flower_P Parameter: Tissue Value: Half Open vs. Whole Plant
  misc_feature: MA Experiment ID: 20000439 Result: Down-regulated in Transcription
  misc_feature: MA Experiment 20000439 PARAMETER Experiment Name: At_Roots__P Parameter: Age (day) Value: 14 vs. 21
  misc_feature: MA Experiment 20000439 PARAMETER Experiment Name: At_Roots__P Parameter: Organism Value: A. thaliana
  misc_feature: MA Experiment 20000439 PARAMETER Experiment Name: At_Roots__P Parameter: Tissue Value: Roots vs. Whole Plant
  misc_feature: MA Experiment ID: 20000794 Result: Down-regulated in Transcription
  misc_feature: MA Experiment 20000794 PARAMETER Experiment Name: At_Petals_P Parameter: Age (day) Value: 23-25 days
  misc_feature: MA Experiment 20000794 PARAMETER Experiment Name: At_Petals_P Parameter: Plant Line Value: WS
  misc_feature: MA Experiment 20000794 PARAMETER Experiment Name: At_Petals_P Parameter: Tissue Value: Petals vs. Whole plant
  misc_feature: MA Experiment ID: 20001557 Result: Down-regulated in Transcription
  misc_feature: MA Experiment 20001557 PARAMETER Experiment Name: At_Drought_Soil_Dry_P Parameter: Age (day) Value: 27
  misc_feature: MA Experiment 20001557 PARAMETER Experiment Name: At_Drought_Soil_Dry_P Parameter: Organism Value: A. thaliana
  misc_feature: MA Experiment 20001557 PARAMETER Experiment Name: At_Drought_Soil_Dry_P Parameter: Plant Line Value: WS
  misc_feature: MA Experiment 20001557 PARAMETER Experiment Name: At_Drought_Soil_Dry_P Parameter: Post Timepoint (hr) Value: 3
  misc_feature: MA Experiment 20001557 PARAMETER Experiment Name: At_Drought_Soil_Dry_P Parameter: Post-Treatment Value: Re-Water vs. No Drought
  misc_feature: MA Experiment 20001557 PARAMETER Experiment Name: At_Drought_Soil_Dry_P Parameter: Timepoint (day) Value: 13
  misc_feature: MA Experiment 20001557 PARAMETER Experiment Name: At_Drought_Soil_Dry_P Parameter: Treatment Value: Drought vs. No Drought
  misc_feature: MA Experiment ID: 20001757 Result: Up-regulated in Transcription
  misc_feature: MA Experiment 20001757 PARAMETER Experiment Name: At_50mM_NH4NO3_L-to-H_P Parameter: Timepoint (hr) Value: 6
  misc_feature: MA Experiment 20001757 PARAMETER Experiment Name: At_50mM_NH4NO3_L-to-H_P Parameter: Tissue Value: Leaf
  misc_feature: MA Experiment 20001757 PARAMETER Experiment Name: At_50mM_NH4NO3_L-to-H_P Parameter: Treatment Value: 50mM NH4NO3 vs 100mM Mannitol
  misc_feature: MA Experiment ID: 20001908 Result: Down-regulated in Transcription
  misc_feature: MA Experiment 20001908 PARAMETER Experiment Name: At_Drought_Reproduction_P Parameter: Age (day) Value: 40
  misc_feature: MA Experiment 20001908 PARAMETER Experiment Name: At_Drought_Reproduction_P Parameter: Organism Value: A. thaliana
  misc_feature: MA Experiment 20001908 PARAMETER Experiment Name: At_Drought_Reproduction_P Parameter: Plant Line Value: WS
  misc_feature: MA Experiment 20001908 PARAMETER Experiment Name: At_Drought_Reproduction_P Parameter: Timepoint (day) Value: 10
  misc_feature: MA Experiment 20001908 PARAMETER Experiment Name: At_Drought_Reproduction_P Parameter: Tissue Value: Siliques
  misc_feature: MA Experiment 20001908 PARAMETER Experiment Name: At_Drought_Reproduction_P Parameter: Treatment Value: Drought vs. No Drought
aatttcaatcaaacatatatatgcatatgataatcttgatttgtgatttctcgtatgttttttagcctttttaaaaccaacattaagcgccaagaaccctttgagactcgccggtgcatcgggaggaagagtcacttgctttgagaggaactggttgaggagagatttgaacgtggtaggatttgggctgatcggatggctagctccgtcgagcattccagcgataaatgggaagagcctgacgggtctcttcttcgatagcatcggaactgagctcgctcacttcccgactcctccagctctcacttcacagttctggttgtggttggttacgtggcacttaggcctcttcctctgcctcactttcggacaaatcggattcaagggcaggactgaggattacttctaaggataactattcttgttttcgtttgtactatatgctctctcttggttatgtgtaatattatcaatca

SEQ ID NO: 252 - DNA, 1168 bp, Arabidopsis thaliana
  misc_feature (1)..(1168): Ceres Seq. ID no. 12324442
  misc_feature: MA Experiment ID: 108605 Result: Down-regulated in Transcription
  misc_feature: MA Experiment 108605 PARAMETER Experiment Name: At_100uM_ABA_cDNA_P Parameter: Timepoint (hr) Value: 6
  misc_feature: MA Experiment 108605 PARAMETER Experiment Name: At_100uM_ABA_cDNA_P Parameter: Tissue Value: Aerial
  misc_feature: MA Experiment 108605 PARAMETER Experiment Name: At_100uM_ABA_cDNA_P Parameter: Treatment Value: 100uM ABA vs. No Treatment
  misc_feature: MA Experiment ID: 20000069 Result: Down-regulated in Transcription
  misc_feature: MA Experiment 20000069 PARAMETER Experiment Name: At_100uM_ABA_Mutants_cDNA_P Parameter: Plant Line Value: CS23
  misc_feature: MA Experiment 20000069 PARAMETER Experiment Name: At_100uM_ABA_Mutants_cDNA_P Parameter: Timepoint (hr) Value: 6
  misc_feature: MA Experiment 20000069 PARAMETER Experiment Name: At_100uM_ABA_Mutants_cDNA_P Parameter: Tissue Value: Aerial
  misc_feature: MA Experiment 20000069 PARAMETER Experiment Name: At_100uM_ABA_Mutants_cDNA_P Parameter: Treatment Value: 100uM ABA vs. No Treatment
  misc_feature: MA Experiment ID: 20000113 Result: Down-regulated in Transcription
  misc_feature: MA Experiment 20000113 PARAMETER Experiment Name: At_42deg_Heat_cDNA_P Parameter: Temperature (deg C) Value: 42 vs. 22
  misc_feature: MA Experiment 20000113 PARAMETER Experiment Name: At_42deg_Heat_cDNA_P Parameter: Timepoint (hr) Value: 8
  misc_feature: MA Experiment 20000113 PARAMETER Experiment Name: At_42deg_Heat_cDNA_P Parameter: Tissue Value: Aerial
  misc_feature: MA Experiment ID: 20000440 Result: Up-regulated in Transcription
  misc_feature: MA Experiment 20000440 PARAMETER Experiment Name: At_Closed-Flower__Sub_P Parameter: Tissue Value: Closed Flower vs. Whole Plant
aagtcttggaatcttcgggacgtttcttgttgctctctttgactttcttgaagtatttgtttatgttttcccatttctctttgcatctctttgagttcctgttgaatcctaaccttctcattcccgctgatatctcttcccacaatggtccttttggtccgttttcttgatatttcgaatcaagattcgtcctcagctttatcaatgcttctatctccactttcggccaccgcgacgagctcgctgaagctgcaggagtcatattctgatcaccaccattgtccgttttcgttgtgtctaacgtcgacacaaccgcttgaattggctgcggaagcggagcaggaggttgcggtggaggagaccgttgaggcggttgctgctgattgttgttattaagctgcattgatggtcgaacttgttgcggctgaggctgcggttgtggctgattcggttgtttctctgacagtttttgaagaaaggccataacagcagcgtcttttgcagcggacatagagcgttcttgagctaagatctcgtgctcgcggttgattctggcaatctcttgaactctccaagactcttctctaaccaatctctcgtgttctcgcttttcaacagcttccaagaatttgcgttgaagctcttcctgtttatcaactacttgtttcatcaaccgctcgaaaaacaccttccatttcctcttccttttcttccttgtagtcgcagttccaccacccatctccatgtcagaagaagtcgaataagaagacgaagacgatgtagaattatccgatagaaaatcaccggagatgtttggaaacgaaggtacattaatctgctgagtatacggaggaattgatgaagaaggaagcgtcggcataactgtcgttaccggaggaggagttgaaaatatggagctgttgttgttgttgttgttgttgttgttgttttgctgtggtcgaagaggcgtttgttgttgatgatggtggagtgaggttgtagattgagactcgagagcttctaattgatcaaagaagcgataagttttgccttcggattttccggtacgaccttctttggttcgtttgtggtatttgtaaacgttctcgaatttctctttgcatttctttgcgtttcttatgtaaccatgctccgccattttcctacc

SEQ ID NO: 253 - protein, 83 aa, Arabidopsis thaliana
  peptide (1)..(83): Ceres Seq. ID no. 12324443
MVLLVRFLDISNQDSSSALSMLLSPLSATATSSLKLQESYSDHHHCPFSLCLTSTQPLELAAEAEQEVAVEETVEAVAADCCY

SEQ ID NO: 254 - protein, 63 aa, Arabidopsis thaliana
  peptide (1)..(63): Ceres Seq. ID no. 12324444
MLLSPLSATATSSLKLQESYSDHHHCPFSLCLTSTQPLELAAEAEQEVAVEETVEAVAADCCY

SEQ ID NO: 255 - protein, 55 aa, Arabidopsis thaliana
  peptide (1)..(55): Ceres Seq. ID no. 12324445
VLESSGRFLLLSLTFLKYLFMFSHFSLHLFEFLLNPNLLIPADISSHNGPFGPFS

SEQ ID NO: 256 - DNA, 1002 bp, Arabidopsis thaliana
  misc_feature (1)..(1002): Ceres Seq. ID no. 12332492
  misc_feature: MA Experiment ID: 108461 Result: Up-regulated in Transcription
  misc_feature: MA Experiment 108461 PARAMETER Experiment Name: At_Germinating_Seeds_cDNA_P Parameter: Age (day) Value: 1 vs. 0
  misc_feature: MA Experiment 108461 PARAMETER Experiment Name: At_Germinating_Seeds_cDNA_P Parameter: Tissue Value: Germinating Seeds
  misc_feature: MA Experiment ID: 108463 Result: Up-regulated in Transcription
  misc_feature: MA Experiment 108463 PARAMETER Experiment Name: At_Germinating_Seeds_cDNA_P Parameter: Age (day) Value: 3 vs. 0
  misc_feature: MA Experiment 108463 PARAMETER Experiment Name: At_Germinating_Seeds_cDNA_P Parameter: Tissue Value: Germinating Seeds
gaattagacacattttaaagaagtttcagattttagaacttacagagccagagccaatagtgatctgcgagaagctaagatcaatcggagaagaagtgacatgaacaccaaagaaagtaccagtgttacggtacaacattctcagtgtcgcgttcatagtgatcatatcagttcctatacctccagcatcttgtccagcttgaaccttaagttgctcaaacgttatactctgcaaaattcaattctacaaacgtaagcacgactctagatctgaaatctgatctcgatctactaagtcaactctcacaaaccttaacagagatcttaggtttctgaggtttagcagctgcataaagaatcaaagagaagaaagcaaagagtagagagaatccaacaatgaaagctaaaacataacatcgacgaggcaaagcttcttgttctctatctccatcatcaagaagaccttcttcttcaatcatagcgaactgtttttctccagcgtggcccttacgttttgagccgttgatcttggagaagcggcttgaggaagagtgagaatgtggtggagatcccatcgggctggtgagtaccggtgttgagtggaatgatgttgctgttttctccccatcgtgggagtcacgtgatggagattggacgaagtaggctggtcgacggggagatctagtcggcgatgaagctgagaggcttgtcacctcggagtcggtcttcgcgtgcatcttgagattggaatggaagatgaacaagtagaagatgagaggttatgtgatgtttgtatttatgtattgaattatttagtcaatgagtggatttgagggccatttgcccattgctttgtatattaccgtaacgcattatagcatcatgatcgcttttttttttttttttttttaatacgattggtaatcaaaatttaagtcacctagtattttatagttgttgaaataggcaaaaagatatttgtagtaactttttgactttttt

SEQ ID NO: 257 - protein, 51 aa, Arabidopsis thaliana
  peptide (1)..(51): Ceres Seq. ID no. 12332493
MNTKESTSVTVQHSQCRVHSDHISSYTSSILSSLNLKLLKRYTLQNSILQT

SEQ ID NO: 258 - protein, 33 aa, Arabidopsis thaliana
  peptide (1)..(33): Ceres Seq. ID no. 12332494
IRHILKKFQILELTEPEPIVICEKLRSIGEEVT

SEQ ID NO: 259 - protein, 30 aa, Arabidopsis thaliana
  peptide (1)..(30): Ceres Seq. ID no. 12332495
MSGFEGHLPIALYITVTHYSIMIAFFFFFF

SEQ ID NO: 260 - DNA, 818 bp, Arabidopsis thaliana
  misc_feature (1)..(818): Ceres Seq. ID no. 13500182
  misc_feature: MA Experiment ID: 108433 Result: Up-regulated in Transcription
  misc_feature: MA Experiment 108433 PARAMETER Experiment Name: At_rhl_Mutant2_cDNA_P Parameter: Age (day) Value: 7
  misc_feature: MA Experiment 108433 PARAMETER Experiment Name: At_rhl_Mutant2_cDNA_P Parameter: Organism Value: A. thaliana
  misc_feature: MA Experiment 108433 PARAMETER Experiment Name: At_rhl_Mutant2_cDNA_P Parameter: Plant Line Value: rhl Mutant vs. wt landsburg
  misc_feature: MA Experiment 108433 PARAMETER Experiment Name: At_rhl_Mutant2_cDNA_P Parameter: Tissue Value: Roots
  misc_feature: MA Experiment ID: 108462 Result: Up-regulated in Transcription
  misc_feature: MA Experiment 108462 PARAMETER Experiment Name: At_Germinating_Seeds_cDNA_P Parameter: Age (day) Value: 2 vs. 0
  misc_feature: MA Experiment 108462 PARAMETER Experiment Name: At_Germinating_Seeds_cDNA_P Parameter: Tissue Value: Germinating Seeds
  misc_feature: MA Experiment ID: 108464 Result: Up-regulated in Transcription
  misc_feature: MA Experiment 108464 PARAMETER Experiment Name: At_Germinating_Seeds_cDNA_P Parameter: Age (day) Value: 4 vs. 0
  misc_feature: MA Experiment 108464 PARAMETER Experiment Name: At_Germinating_Seeds_cDNA_P Parameter: Tissue Value: Germinating Seeds
  misc_feature: MA Experiment ID: 20000436 Result: Up-regulated in Transcription
  misc_feature: MA Experiment 20000436 PARAMETER Experiment Name: At_Drought_P Parameter: Age (day) Value: 7
  misc_feature: MA Experiment 20000436 PARAMETER Experiment Name: At_Drought_P Parameter: Organism Value: A. thaliana
  misc_feature: MA Experiment 20000436 PARAMETER Experiment Name: At_Drought_P Parameter: Plant Line Value: WS
  misc_feature: MA Experiment 20000436 PARAMETER Experiment Name: At_Drought_P Parameter: Timepoint (hr) Value: 12
  misc_feature: MA Experiment 20000436 PARAMETER Experiment Name: At_Drought_P Parameter: Tissue Value: Whole Plant
  misc_feature: MA Experiment 20000436 PARAMETER Experiment Name: At_Drought_P Parameter: Treatment Value: Drought vs. No Drought
  misc_feature: MA Experiment ID: 20000437 Result: Up-regulated in Transcription
  misc_feature: MA Experiment 20000437 PARAMETER Experiment Name: At_Drought_P Parameter: Age (day) Value: 8
  misc_feature: MA Experiment 20000437 PARAMETER Experiment Name: At_Drought_P Parameter: Organism Value: A. thaliana
  misc_feature: MA Experiment 20000437 PARAMETER Experiment Name: At_Drought_P Parameter: Plant Line Value: WS
  misc_feature: MA Experiment 20000437 PARAMETER Experiment Name: At_Drought_P Parameter: Timepoint (hr) Value: 24
  misc_feature: MA Experiment 20000437 PARAMETER Experiment Name: At_Drought_P Parameter: Tissue Value: Whole Plant
  misc_feature: MA Experiment 20000437 PARAMETER Experiment Name: At_Drought_P Parameter: Treatment Value: Drought vs. No Drought
  misc_feature: MA Experiment ID: 20001450 Result: Up-regulated in Transcription
  misc_feature: MA Experiment 20001450 PARAMETER Experiment Name: At_Far-red-induction_P Parameter: Age (day) Value: 7
  misc_feature: MA Experiment 20001450 PARAMETER Experiment Name: At_Far-red-induction_P Parameter: Light Value: Far-red vs. White
  misc_feature: MA Experiment 20001450 PARAMETER Experiment Name: At_Far-red-induction_P Parameter: Organism Value: A. thaliana
  misc_feature: MA Experiment 20001450 PARAMETER Experiment Name: At_Far-red-induction_P Parameter: Plant Line Value: Columbia
  misc_feature: MA Experiment 20001450 PARAMETER Experiment Name: At_Far-red-induction_P Parameter: Timepoint (hr) Value: 8
  misc_feature: MA Experiment 20001450 PARAMETER Experiment Name: At_Far-red-induction_P Parameter: Tissue Value: Whole Plant
  misc_feature: MA Experiment ID: 20001557 Result: Down-regulated in Transcription
  misc_feature: MA Experiment 20001557 PARAMETER Experiment Name: At_Drought_Soil_Dry_P Parameter: Age (day) Value: 27
  misc_feature: MA Experiment 20001557 PARAMETER Experiment Name: At_Drought_Soil_Dry_P Parameter: Organism Value: A. thaliana
  misc_feature: MA Experiment 20001557 PARAMETER Experiment Name: At_Drought_Soil_Dry_P Parameter: Plant Line Value: WS
  misc_feature: MA Experiment 20001557 PARAMETER Experiment Name: At_Drought_Soil_Dry_P Parameter: Post Timepoint (hr) Value: 3
  misc_feature: MA Experiment 20001557 PARAMETER Experiment Name: At_Drought_Soil_Dry_P Parameter: Post-Treatment Value: Re-Water vs. No Drought
  misc_feature: MA Experiment 20001557 PARAMETER Experiment Name: At_Drought_Soil_Dry_P Parameter: Timepoint (day) Value: 13
  misc_feature: MA Experiment 20001557 PARAMETER Experiment Name: At_Drought_Soil_Dry_P Parameter: Treatment Value: Drought vs. No Drought
  misc_feature: MA Experiment ID: 20001558 Result: Down-regulated in Transcription
  misc_feature: MA Experiment 20001558 PARAMETER Experiment Name: At_Drought_Soil_Dry_P Parameter: Age (day) Value: 27
  misc_feature: MA Experiment 20001558 PARAMETER Experiment Name: At_Drought_Soil_Dry_P Parameter: Organism Value: A. thaliana
  misc_feature: MA Experiment 20001558 PARAMETER Experiment Name: At_Drought_Soil_Dry_P Parameter: Plant Line Value: WS
  misc_feature: MA Experiment 20001558 PARAMETER Experiment Name: At_Drought_Soil_Dry_P Parameter: Post Timepoint (hr) Value: 6
  misc_feature: MA Experiment 20001558 PARAMETER Experiment Name: At_Drought_Soil_Dry_P Parameter: Post-Treatment Value: Re-Water vs. No Drought
  misc_feature: MA Experiment 20001558 PARAMETER Experiment Name: At_Drought_Soil_Dry_P Parameter: Timepoint (day) Value: 13
  misc_feature: MA Experiment 20001558 PARAMETER Experiment Name: At_Drought_Soil_Dry_P Parameter: Treatment Value: Drought vs. No Drought
  misc_feature: MA Experiment ID: 20001560 Result: Down-regulated in Transcription
  misc_feature: MA Experiment 20001560 PARAMETER Experiment Name: At_Drought_Soil_Dry_P Parameter: Age (day) Value: 28
  misc_feature: MA Experiment 20001560 PARAMETER Experiment Name: At_Drought_Soil_Dry_P Parameter: Organism Value: A. thaliana
  misc_feature: MA Experiment 20001560 PARAMETER Experiment Name: At_Drought_Soil_Dry_P Parameter: Plant Line Value: WS
  misc_feature: MA Experiment 20001560 PARAMETER Experiment Name: At_Drought_Soil_Dry_P Parameter: Post Timepoint (hr) Value: None
  misc_feature: MA Experiment 20001560 PARAMETER Experiment Name: At_Drought_Soil_Dry_P Parameter: Post-Treatment Value: None
  misc_feature: MA Experiment 20001560 PARAMETER Experiment Name: At_Drought_Soil_Dry_P Parameter: Timepoint (day) Value: 14
  misc_feature: MA Experiment 20001560 PARAMETER Experiment Name: At_Drought_Soil_Dry_P Parameter: Treatment Value: Drought vs. No Drought
gaaaaagtgtgtgtcagagaataatgattcgagcggttctcctgttccttgtcttcgtcgttgagacgagagtacaagcgcagctagtgccgccggtgaggcaagatggtttcgtttaaccaccgggtcatcgtttcgacccggatactatactaattgaggcgtattttgacccggtttgcccggacagtagagactcttggccgccactgaagcaagctcttcatcactatggatctcgcgttgcccttctcctccatctccttcctttaccctaccatgacaatgcctatgtaacatcacgggccttacacattgtgaataccgtacacgccaatgctaccttcagtttgctggaagggttcttcaagcatcagtcattgttttacaacgcgcaaacacaactcctttcaagacctgcagttgtggagaaaatagtcgaacttggaacagtctcgttggggaactcatatcaatcggttcttaaatccggcttcagcgacaaaaaatcggatcgtgcaaccagagtttccttcaagtatagcgcttcaagaggggtttatggtacaccaaccttctacgttaacgggtttgtattgtctgatgctgcttccccttcaaattttggaggatggaagaaaatcattgatcctctggttcaagcacatgagatggaagataacttcattcccttcctttgaagattttaagtgcttttgctgtgtcaattgtcatggtataatactatctgtaatgtatagactttctcaaaacctgtatgttgctcattgtaaatttgtaataaaggaaagtgatcc

SEQ ID NO: 261 - protein, 85 aa, Arabidopsis thaliana
  peptide (1)..(85): Ceres Seq. ID no. 13500183
MVHQPSTLTGLYCLMLLPLQILEDGRKSLILWFKHMRWKITSFPSFEDFKCFCCVNCHGIILSVMYRLSQNLYVAHCKFVIKESD

SEQ ID NO: 262 - protein, 71 aa, Arabidopsis thaliana
  peptide (1)..(71): Ceres Seq. ID no. 13500184
MLLPLQILEDGRKSLILWFKHMRWKITSFPSFEDFKCFCCVNCHGIILSVMYRLSQNLYVAHCKFVIKESD

SEQ ID NO: 263 - protein, 50 aa, Arabidopsis thaliana
  peptide (1)..(50): Ceres Seq. ID no. 13500185
MRWKITSFPSFEDFKCFCCVNCHGIILSVMYRLSQNLYVAHCKFVIKESD

SEQ ID NO: 264 - DNA, 649 bp, Arabidopsis thaliana
  misc_feature (1)..(649): Ceres Seq. ID no. 12331732
  misc_feature: MA Experiment ID: 108433 Result: Up-regulated in Transcription
  misc_feature: MA Experiment 108433 PARAMETER Experiment Name: At_rhl_Mutant2_cDNA_P Parameter: Age (day) Value: 7
  misc_feature: MA Experiment 108433 PARAMETER Experiment Name: At_rhl_Mutant2_cDNA_P Parameter: Organism Value: A. thaliana
  misc_feature: MA Experiment 108433 PARAMETER Experiment Name: At_rhl_Mutant2_cDNA_P Parameter: Plant Line Value: rhl Mutant vs. wt landsburg
  misc_feature: MA Experiment 108433 PARAMETER Experiment Name: At_rhl_Mutant2_cDNA_P Parameter: Tissue Value: Roots
  misc_feature: MA Experiment ID: 108461 Result: Up-regulated in Transcription
  misc_feature: MA Experiment 108461 PARAMETER Experiment Name: At_Germinating_Seeds_cDNA_P Parameter: Age (day) Value: 1 vs. 0
  misc_feature: MA Experiment 108461 PARAMETER Experiment Name: At_Germinating_Seeds_cDNA_P Parameter: Tissue Value: Germinating Seeds
  misc_feature: MA Experiment ID: 108464 Result: Up-regulated in Transcription
  misc_feature: MA Experiment 108464 PARAMETER Experiment Name: At_Germinating_Seeds_cDNA_P Parameter: Age (day) Value: 4 vs. 0
  misc_feature: MA Experiment 108464 PARAMETER Experiment Name: At_Germinating_Seeds_cDNA_P Parameter: Tissue Value: Germinating Seeds
  misc_feature: MA Experiment ID: 108561 Result: Down-regulated in Transcription
  misc_feature: MA Experiment 108561 PARAMETER Experiment Name: At_100uM_ABA_cDNA_P Parameter: Timepoint (hr) Value: 6
  misc_feature: MA Experiment 108561 PARAMETER Experiment Name: At_100uM_ABA_cDNA_P Parameter: Tissue Value: Aerial
  misc_feature: MA Experiment 108561 PARAMETER Experiment Name: At_100uM_ABA_cDNA_P Parameter: Treatment Value: 100uM ABA vs. No Treatment
  misc_feature: MA Experiment ID: 108576 Result: Down-regulated in Transcription
  misc_feature: MA Experiment 108576 PARAMETER Experiment Name: At_42deg_Heat_cDNA_P Parameter: Temperature (deg C) Value: 42 vs. 22
  misc_feature: MA Experiment 108576 PARAMETER Experiment Name: At_42deg_Heat_cDNA_P Parameter: Timepoint (hr) Value: 1
  misc_feature: MA Experiment 108576 PARAMETER Experiment Name: At_42deg_Heat_cDNA_P Parameter: Tissue Value: Aerial
  misc_feature: MA Experiment ID: 108579 Result: Up-regulated in Transcription
  misc_feature: MA Experiment 108579 PARAMETER Experiment Name: At_4deg_Cold_cDNA_P Parameter: Temperature (deg C) Value: 4 vs. 22
  misc_feature: MA Experiment 108579 PARAMETER Experiment Name: At_4deg_Cold_cDNA_P Parameter: Timepoint (hr) Value: 6
  misc_feature: MA Experiment 108579 PARAMETER Experiment Name: At_4deg_Cold_cDNA_P Parameter: Tissue Value: Aerial
  misc_feature: MA Experiment ID: 108595 Result: Down-regulated in Transcription
  misc_feature: MA Experiment 108595 PARAMETER Experiment Name: At_Ler-pi_Ovule_cDNA_P Parameter: Plant Line Value: null
  misc_feature: MA Experiment ID: 20000069 Result: Down-regulated in Transcription
  misc_feature: MA Experiment 20000069 PARAMETER Experiment Name: At_100uM_ABA_Mutants_cDNA_P Parameter: Plant Line Value: CS23
  misc_feature: MA Experiment 20000069 PARAMETER Experiment Name: At_100uM_ABA_Mutants_cDNA_P Parameter: Timepoint (hr) Value: 6
  misc_feature: MA Experiment 20000069 PARAMETER Experiment Name: At_100uM_ABA_Mutants_cDNA_P Parameter: Tissue Value: Aerial
  misc_feature: MA Experiment 20000069 PARAMETER Experiment Name: At_100uM_ABA_Mutants_cDNA_P Parameter: Treatment Value: 100uM ABA vs. No Treatment
  misc_feature: MA Experiment ID: 20000072 Result: Down-regulated in Transcription
  misc_feature: MA Experiment 20000072 PARAMETER Experiment Name: At_100uM_ABA_Mutants_cDNA_P Parameter: Plant Line Value: CS8105
  misc_feature: MA Experiment 20000072 PARAMETER Experiment Name: At_100uM_ABA_Mutants_cDNA_P Parameter: Timepoint (hr) Value: 6
  misc_feature: MA Experiment 20000072 PARAMETER Experiment Name: At_100uM_ABA_Mutants_cDNA_P Parameter: Tissue Value: Aerial
  misc_feature: MA Experiment 20000072 PARAMETER Experiment Name: At_100uM_ABA_Mutants_cDNA_P Parameter: Treatment Value: 100uM ABA vs. No Treatment
  misc_feature: MA Experiment ID: 20000184 Result: Up-regulated in Transcription
  misc_feature: MA Experiment 20000184 PARAMETER Experiment Name: At_Shoots__P Parameter: Age (day) Value: 7
  misc_feature: MA Experiment 20000184 PARAMETER Experiment Name: At_Shoots__P Parameter: Tissue Value: Shoots vs. Whole Plant
  misc_feature: MA Experiment ID: 20000234 Result: Up-regulated in Transcription
  misc_feature: MA Experiment 20000234 PARAMETER Experiment Name: At_Siliques_P Parameter: Age (day) Value: 21
  misc_feature: MA Experiment 20000234 PARAMETER Experiment Name: At_Siliques_P Parameter: Organism Value: A. thaliana
  misc_feature: MA Experiment 20000234 PARAMETER Experiment Name: At_Siliques_P Parameter: Plant Line Value: WS
  misc_feature: MA Experiment 20000234 PARAMETER Experiment Name: At_Siliques_P Parameter: Tissue Value: Less Than 5mm Siliques vs. Whole Plant
  misc_feature: MA Experiment ID: 20000235 Result: Up-regulated in Transcription
  misc_feature: MA Experiment 20000235 PARAMETER Experiment Name: At_Siliques_P Parameter: Age (day) Value: 21
  misc_feature: MA Experiment 20000235 PARAMETER Experiment Name: At_Siliques_P Parameter: Organism Value: A. thaliana
  misc_feature: MA Experiment 20000235 PARAMETER Experiment Name: At_Siliques_P Parameter: Plant Line Value: WS
  misc_feature: MA Experiment 20000235 PARAMETER Experiment Name: At_Siliques_P Parameter: Tissue Value: 5-10mm Siliques vs. Whole Plant
  misc_feature: MA Experiment ID: 20000264 Result: Up-regulated in Transcription
  misc_feature: MA Experiment 20000264 PARAMETER Experiment Name: At_Open_Flower_P Parameter: Age (day) Value: 21
  misc_feature: MA Experiment 20000264 PARAMETER Experiment Name: At_Open_Flower_P Parameter: Plant Line Value: WS
  misc_feature: MA Experiment 20000264 PARAMETER Experiment Name: At_Open_Flower_P Parameter: Tissue Value: Open Flower vs. Whole Plant
  misc_feature: MA Experiment ID: 20000286 Result: Up-regulated in Transcription
  misc_feature: MA Experiment 20000286 PARAMETER Experiment Name: At_Open_Flower_P Parameter: Age (day) Value: 21
  misc_feature: MA Experiment 20000286 PARAMETER Experiment Name: At_Open_Flower_P Parameter: Plant Line Value: WS
  misc_feature: MA Experiment 20000286 PARAMETER Experiment Name: At_Open_Flower_P Parameter: Tissue Value: Half Open vs. Whole Plant
  misc_feature: MA Experiment ID: 20000451 Result: Down-regulated in Transcription
  misc_feature: MA Experiment 20000451 PARAMETER Experiment Name: At_CS6879_Shoots-Roots_P Parameter: Age (day) Value: 14
  misc_feature: MA Experiment 20000451 PARAMETER Experiment Name: At_CS6879_Shoots-Roots_P Parameter: Organism Value: A. thaliana
  misc_feature: MA Experiment 20000451 PARAMETER Experiment Name: At_CS6879_Shoots-Roots_P Parameter: Plant Line Value: CS6879 vs. WS
  misc_feature: MA Experiment 20000451 PARAMETER Experiment Name: At_CS6879_Shoots-Roots_P Parameter: Tissue Value: Roots
  misc_feature: MA Experiment ID: 20000452 Result: Down-regulated in Transcription
  misc_feature: MA Experiment 20000452 PARAMETER Experiment Name: At_CS6879_Shoots-Roots_P Parameter: Age (day) Value: 14
  misc_feature: MA Experiment 20000452 PARAMETER Experiment Name: At_CS6879_Shoots-Roots_P Parameter: Organism Value: A. thaliana
  misc_feature: MA Experiment 20000452 PARAMETER Experiment Name: At_CS6879_Shoots-Roots_P Parameter: Plant Line Value: CS6879 vs. WS
  misc_feature: MA Experiment 20000452 PARAMETER Experiment Name: At_CS6879_Shoots-Roots_P Parameter: Tissue Value: Shoots
aaaaataatattaattttctcggcgaggcttgcagcgtggtcggcagtcagcttctccaatgaaagttgtttgcttgggactccgagatctgtggatctattggatgctctgtcttataaagtgtcggcgaaggctctggtctcattatgtttcctgttgcttgtagcggatctgtggttgtttgtctcactctgttttgctagtccggtgtaaaatgtcgccttgtctccgacgtcaccgtatccggaagaaagtgtgaggttccatgtgtggttctgtctttgcggattatgaagattagcataggagttctgttacttttaggcagtttggcatctttagaggaggattagattatcgatggttggccacgggcatcttcgatatgtactatcaaaggatctcttgaagtatgctttccttgttgggttggtttatggtcccatttggttgagtgttttgttttggtctgttcttgtagtggggttcttctgctttcattatatgtttgtatcggtttgtagccttgtagtattgtttcttcttccctcacatagggctttagactccagagatatctttgttttctgctagcatatggttgtaatcttccaaatatcattcatggtttttaataaaatctagatg

SEQ ID NO: 265 - protein, 77 aa, Arabidopsis thaliana
  peptide (1)..(77): Ceres Seq. ID no. 12331733
MVGHGHLRYVLSKDLLKYAFLVGLVYGPIWLSVLFWSVLVVGFFCFHYMFVSVCSLVVLFLLPSHRALDSRDIFVFC

SEQ ID NO: 266 - protein, 70 aa, Arabidopsis thaliana
  peptide (1)..(70): Ceres Seq. ID no. 12331734
KIILIFSARLAAWSAVSFSNESCLLGTPRSVDLLDALSYKVSAKALVSLCFLLLVADLWLFVSLCFASPV

SEQ ID NO: 267 - DNA, 809 bp, Arabidopsis thaliana
  misc_feature (1)..(809): Ceres Seq. ID no. 12339176
  misc_feature: MA Experiment ID: 108462 Result: Up-regulated in Transcription
  misc_feature: MA Experiment 108462 PARAMETER Experiment Name: At_Germinating_Seeds_cDNA_P Parameter: Age (day) Value: 2 vs. 0
  misc_feature: MA Experiment 108462 PARAMETER Experiment Name: At_Germinating_Seeds_cDNA_P Parameter: Tissue Value: Germinating Seeds
  misc_feature: MA Experiment ID: 108464 Result: Up-regulated in Transcription
  misc_feature: MA Experiment 108464 PARAMETER Experiment Name: At_Germinating_Seeds_cDNA_P Parameter: Age (day) Value: 4 vs. 0
  misc_feature: MA Experiment 108464 PARAMETER Experiment Name: At_Germinating_Seeds_cDNA_P Parameter: Tissue Value: Germinating Seeds
  misc_feature: MA Experiment ID: 108501 Result: Down-regulated in Transcription
  misc_feature: MA Experiment 108501 PARAMETER Experiment Name: At_ap2_floral_buds_cDNA_P Parameter: Plant Line Value: ap2 (Ler.)
  misc_feature: MA Experiment 108501 PARAMETER Experiment Name: At_ap2_floral_buds_cDNA_P Parameter: Tissue Value: Closed Flower
  misc_feature: MA Experiment ID: 108574 Result: Down-regulated in Transcription
  misc_feature: MA Experiment 108574 PARAMETER Experiment Name: At_Wounding__cDNA_P Parameter: Timepoint (hr) Value: 1
  misc_feature: MA Experiment 108574 PARAMETER Experiment Name: At_Wounding__cDNA_P Parameter: Tissue Value: Aerial
  misc_feature: MA Experiment 108574 PARAMETER Experiment Name: At_Wounding__cDNA_P Parameter: Treatment Value: Wounding vs. No Wounding
  misc_feature: MA Experiment ID: 108585 Result: Up-regulated in Transcription
  misc_feature: MA Experiment 108585 PARAMETER Experiment Name: At_5mM_NaNP_cDNA_P Parameter: Timepoint (hr) Value: 6
  misc_feature: MA Experiment 108585 PARAMETER Experiment Name: At_5mM_NaNP_cDNA_P Parameter: Tissue Value: Aerial
  misc_feature: MA Experiment 108585 PARAMETER Experiment Name: At_5mM_NaNP_cDNA_P Parameter: Treatment Value: null
  misc_feature: MA Experiment ID: 108594 Result: Up-regulated in Transcription
  misc_feature: MA Experiment 108594 PARAMETER Experiment Name: At_Ler-rhl_Root_cDNA_P Parameter: Plant Line Value: null
  misc_feature: MA Experiment ID: 20000144 Result: Down-regulated in Transcription
  misc_feature: MA Experiment 20000144 PARAMETER Experiment Name: At_42deg_Heat_cDNA_P Parameter: Temperature (deg C) Value: 42 vs. 22
  misc_feature: MA Experiment 20000144 PARAMETER Experiment Name: At_42deg_Heat_cDNA_P Parameter: Timepoint (hr) Value: 1
  misc_feature: MA Experiment 20000144 PARAMETER Experiment Name: At_42deg_Heat_cDNA_P Parameter: Tissue Value: Aerial
  misc_feature: MA Experiment ID: 20000224 Result: Down-regulated in Transcription
  misc_feature: MA Experiment ID: 20000441 Result: Up-regulated in Transcription
  misc_feature: MA Experiment 20000441 PARAMETER Experiment Name: At_1uM_BR-BRZ__P Parameter: Tissue Value: Shoot Apices
  misc_feature: MA Experiment 20000441 PARAMETER Experiment Name: At_1uM_BR-BRZ__P Parameter: Treatment Value: 1uM BR vs. No Treatment
  misc_feature: MA Experiment ID: 20000573 Result: Down-regulated in Transcription
  misc_feature: MA Experiment 20000573 PARAMETER Experiment Name: At_100uM_ABA_Mutants__P Parameter: Organism Value: A. thaliana
  misc_feature: MA Experiment 20000573 PARAMETER Experiment Name: At_100uM_ABA_Mutants__P Parameter: Plant Line Value: CS22 vs. Ler wt
  misc_feature: MA Experiment 20000573 PARAMETER Experiment Name: At_100uM_ABA_Mutants__P Parameter: Timepoint (hr) Value: N/A
  misc_feature: MA Experiment 20000573 PARAMETER Experiment Name: At_100uM_ABA_Mutants__P Parameter: Tissue Value: Whole Plant
  misc_feature: MA Experiment 20000573 PARAMETER Experiment Name: At_100uM_ABA_Mutants__P Parameter: Treatment Value: None
  misc_feature: MA Experiment ID: 20001247 Result: Up-regulated in Transcription
  misc_feature: MA Experiment 20001247 PARAMETER Experiment Name: At_Far-red-induction_P Parameter: Age (day) Value: 7
  misc_feature: MA Experiment 20001247 PARAMETER Experiment Name: At_Far-red-induction_P Parameter: Light Value: Far-red vs. White
  misc_feature: MA Experiment 20001247 PARAMETER Experiment Name: At_Far-red-induction_P Parameter: Organism Value: A. thaliana
  misc_feature: MA Experiment 20001247 PARAMETER Experiment Name: At_Far-red-induction_P Parameter: Plant Line Value: Columbia
  misc_feature: MA Experiment 20001247 PARAMETER Experiment Name: At_Far-red-induction_P Parameter: Timepoint (hr) Value: 1
  misc_feature: MA Experiment 20001247 PARAMETER Experiment Name: At_Far-red-induction_P Parameter: Tissue Value: Whole Plant
  misc_feature: MA Experiment ID: 20001450 Result: Up-regulated in Transcription
  misc_feature: MA Experiment 20001450 PARAMETER Experiment Name: At_Far-red-induction_P Parameter: Age (day) Value: 7
  misc_feature: MA Experiment 20001450 PARAMETER Experiment Name: At_Far-red-induction_P Parameter: Light Value: Far-red vs. White
  misc_feature: MA Experiment 20001450 PARAMETER Experiment Name: At_Far-red-induction_P Parameter: Organism Value: A. thaliana
  misc_feature: MA Experiment 20001450 PARAMETER Experiment Name: At_Far-red-induction_P Parameter: Plant Line Value: Columbia
  misc_feature: MA Experiment 20001450 PARAMETER Experiment Name: At_Far-red-induction_P Parameter: Timepoint (hr) Value: 8
  misc_feature: MA Experiment 20001450 PARAMETER Experiment Name: At_Far-red-induction_P Parameter: Tissue Value: Whole Plant
  misc_feature: MA Experiment ID: 20001451 Result: Up-regulated in Transcription
  misc_feature: MA Experiment 20001451 PARAMETER Experiment Name: At_Far-red-induction_P Parameter: Age (day) Value: 7
  misc_feature: MA Experiment 20001451 PARAMETER Experiment Name: At_Far-red-induction_P Parameter: Light Value: Far-red vs. White
  misc_feature: MA Experiment 20001451 PARAMETER Experiment Name: At_Far-red-induction_P Parameter: Organism Value: A. thaliana
  misc_feature: MA Experiment 20001451 PARAMETER Experiment Name: At_Far-red-induction_P Parameter: Plant Line Value: Columbia
  misc_feature: MA Experiment 20001451 PARAMETER Experiment Name: At_Far-red-induction_P Parameter: Timepoint (hr) Value: 24
  misc_feature: MA Experiment 20001451 PARAMETER Experiment Name: At_Far-red-induction_P Parameter: Tissue Value: Whole Plant
aactcgacacatcgagtcaactcgctaccagcactgatcggtttcccaattccgtccaccgtaactgccgtatccagccgttaacggccgactccgaagaagagtcctccgatcataaacggcgcgtttctcgggatccgaaagcgtgcaatacgctgcgtggatcttcatgaaatcgtccgccgacgagttatcccgactatttctcgctacatcgggatgacagatcctggctagtcgccggtaagctgatttgatctcttgactcgtcgagccgacgggaatttcaaggatctcgtagagagacgccggttgctgaaaatcgctgcgggatttggcgtaatctcggtagatcttcggcgcaggtgtaggacgcggtggttgtagaaagcgacggcgagatccgggaaatgcgtgacggtggtgaagtagaagagaacgacggagaagaagaagaagaagaagagagaaatggagtagcgaagaaggttggggaagaagaaagcatcgtgaaacgacggcgtttttgtttgtcttttggtttaagttccgatttgggttttgtgatgcagtgtgatttgagatgagaaattagaagggtttatttataggggaagaagtgattagtacgtataacgtttagttagcttttaaataattgaagattaggcagattaatgtatcttgtccggttaagcaaaatcgaaccgggttgggtcagtgtgttttcggatcttgagaaagctgagtcagactaaaaggcttatccacagttgtaaataatgggagaagtgagataagattcaacg

SEQ ID NO: 268 - protein, 58 aa, Arabidopsis thaliana
  peptide (1)..(58): Ceres Seq. ID no. 12339177
MRDGGEVEENDGEEEEEEERNGVAKKVGEEESIVKRRRFCLSFGLSSDLGFVMQCDLR

SEQ ID NO: 269 - protein, 56 aa, Arabidopsis thaliana
  peptide (1)..(56): Ceres Seq. ID no. 12339178
LDTSSQLATSTDRFPNSVHRNCRIQPLTADSEEESSDHKRRVSRDPKACNTLRGSS

SEQ ID NO: 270 - DNA, 642 bp, Arabidopsis thaliana
  misc_feature (1)..(642): Ceres Seq. ID no. 12423227
  misc_feature: MA Experiment ID: 108473 Result: Up-regulated in Transcription
  misc_feature: MA Experiment 108473 PARAMETER Experiment Name: At_Drought_Flowers_cDNA_P Parameter: Timepoint (hr) Value: 7 d
  misc_feature: MA Experiment 108473 PARAMETER Experiment Name: At_Drought_Flowers_cDNA_P Parameter: Tissue Value: Flower
  misc_feature: MA Experiment 108473 PARAMETER Experiment Name: At_Drought_Flowers_cDNA_P Parameter: Treatment Value: Drought vs. No Drought
  misc_feature: MA Experiment ID: 108579 Result: Down-regulated in Transcription
  misc_feature: MA Experiment 108579 PARAMETER Experiment Name: At_4deg_Cold_cDNA_P Parameter: Temperature (deg C) Value: 4 vs. 22
  misc_feature: MA Experiment 108579 PARAMETER Experiment Name: At_4deg_Cold_cDNA_P Parameter: Timepoint (hr) Value: 6
  misc_feature: MA Experiment 108579 PARAMETER Experiment Name: At_4deg_Cold_cDNA_P Parameter: Tissue Value: Aerial
  misc_feature: MA Experiment ID: 20000030 Result: Down-regulated in Transcription
  misc_feature: MA Experiment 20000030 PARAMETER Experiment Name: At_CS6630_Roots_cDNA_P Parameter: Plant Line Value: CS6630 vs. WS
  misc_feature: MA Experiment 20000030 PARAMETER Experiment Name: At_CS6630_Roots_cDNA_P Parameter: Tissue Value: Roots
  misc_feature: MA Experiment ID: 20000111 Result: Down-regulated in Transcription
  misc_feature: MA Experiment 20000111 PARAMETER Experiment Name: At_42deg_Heat_cDNA_P Parameter: Temperature (deg C) Value: 42 vs. 22
  misc_feature: MA Experiment 20000111 PARAMETER Experiment Name: At_42deg_Heat_cDNA_P Parameter: Timepoint (hr) Value: 6
  misc_feature: MA Experiment 20000111 PARAMETER Experiment Name: At_42deg_Heat_cDNA_P Parameter: Tissue Value: Aerial
  misc_feature: MA Experiment ID: 20000306 Result: Up-regulated in Transcription
  misc_feature: MA Experiment 20000306 PARAMETER Experiment Name: At_Germinating_Seeds_Sub_P Parameter: Age (hr) Value: 6 vs. 0
  misc_feature: MA Experiment 20000306 PARAMETER Experiment Name: At_Germinating_Seeds_Sub_P Parameter: Organism Value: A. thaliana
  misc_feature: MA Experiment 20000306 PARAMETER Experiment Name: At_Germinating_Seeds_Sub_P Parameter: Plant Line Value: WS
  misc_feature: MA Experiment 20000306 PARAMETER Experiment Name: At_Germinating_Seeds_Sub_P Parameter: Tissue Value: Germinating Seeds
  misc_feature: MA Experiment ID: 20000307 Result: Up-regulated in Transcription
  misc_feature: MA Experiment 20000307 PARAMETER Experiment Name: At_Germinating_Seeds_Sub_P Parameter: Age (hr) Value: 24 vs. 0
  misc_feature: MA Experiment 20000307 PARAMETER Experiment Name: At_Germinating_Seeds_Sub_P Parameter: Organism Value: A. thaliana
  misc_feature: MA Experiment 20000307 PARAMETER Experiment Name: At_Germinating_Seeds_Sub_P Parameter: Plant Line Value: WS
  misc_feature: MA Experiment 20000307 PARAMETER Experiment Name: At_Germinating_Seeds_Sub_P Parameter: Tissue Value: Germinating Seeds
  misc_feature: MA Experiment ID: 20000315 Result: Down-regulated in Transcription
  misc_feature: MA Experiment 20000315 PARAMETER Experiment Name: At_14day_Shoots-Roots_Sub_P Parameter: Age (day) Value: 14
  misc_feature: MA Experiment 20000315 PARAMETER Experiment Name: At_14day_Shoots-Roots_Sub_P Parameter: Organism Value: A. thaliana
  misc_feature: MA Experiment 20000315 PARAMETER Experiment Name: At_14day_Shoots-Roots_Sub_P Parameter: Plant Line Value: WS
  misc_feature: MA Experiment 20000315 PARAMETER Experiment Name: At_14day_Shoots-Roots_Sub_P Parameter: Tissue Value: Shoots vs. Whole Plant
  misc_feature: MA Experiment ID: 20000328 Result: Down-regulated in Transcription
  misc_feature: MA Experiment 20000328 PARAMETER Experiment Name: At_42deg_Heat_Sub_P Parameter: Age (day) Value: 14
  misc_feature: MA Experiment 20000328 PARAMETER Experiment Name: At_42deg_Heat_Sub_P Parameter: Organism Value: A. thaliana
  misc_feature: MA Experiment 20000328 PARAMETER Experiment Name: At_42deg_Heat_Sub_P Parameter: Plant Line Value: WS
  misc_feature: MA Experiment 20000328 PARAMETER Experiment Name: At_42deg_Heat_Sub_P Parameter: Temperature (deg C) Value: 42 vs. 22
  misc_feature: MA Experiment 20000328 PARAMETER Experiment Name: At_42deg_Heat_Sub_P Parameter: Timepoint (hr) Value: 6
  misc_feature: MA Experiment 20000328 PARAMETER Experiment Name: At_42deg_Heat_Sub_P Parameter: Tissue Value: Aerial
  misc_feature: MA Experiment ID: 20000329 Result: Down-regulated in Transcription
  misc_feature: MA Experiment 20000329 PARAMETER Experiment Name: At_4deg_Cold_Sub_P Parameter: Age (day) Value: 14
  misc_feature: MA Experiment 20000329 PARAMETER Experiment Name: At_4deg_Cold_Sub_P Parameter: Organism Value: A. thaliana
  misc_feature: MA Experiment 20000329 PARAMETER Experiment Name: At_4deg_Cold_Sub_P Parameter: Plant Line Value: WS
  misc_feature: MA Experiment 20000329 PARAMETER Experiment Name: At_4deg_Cold_Sub_P Parameter: Temperature (deg C) Value: 4 vs. 22
  misc_feature: MA Experiment 20000329 PARAMETER Experiment Name: At_4deg_Cold_Sub_P Parameter: Timepoint (hr) Value: 6
  misc_feature: MA Experiment 20000329 PARAMETER Experiment Name: At_4deg_Cold_Sub_P Parameter: Tissue Value: Aerial
aaaactaaacaacgtaaaaacataagaaaaacagagtaaacaaagtaatgcgccgattgtcgacggagagtatgagatgagaagagaaattgatattgatattgtttgatatctactgtagttgattcgtcttgacaaagaggaaggaggctgcttgacatcgaccaccctgaaggtccttttggtacaaaggaatctcctgctgtcgtacagtcctactttgacaagagaaatatcggatgccgtggtggtgaaggcgaggatggacacgacgtcgtttggttctggctagataaaggaaagtcatttgaatgtccagtgtgctcccaatactttgagcacgaagtggttggtccaggcggaccaccagacggtcatggtgacgatgaagaccaccaccattgattccggtcttttcttaacggcgaaatgttttcttctattgtagtgagtggaataaatatttctcgttggtgaaaacacttaaatatgttttttttgatcctcgagaagacaccaccactttatttgcctcaggctctaaccctttttgctttcttgagacttttgtttttatgaatgattctcgagtcagaatcattcttctttttttgaattatataatatatagtttttggtgtt

SEQ ID NO: 271 - DNA, 709 bp, Arabidopsis thaliana
  misc_feature (1)..(709): Ceres Seq. ID no. 13580626
  misc_feature: MA Experiment ID: 20001558 Result: Up-regulated in Transcription
  misc_feature: MA Experiment 20001558 PARAMETER Experiment Name: At_Drought_Soil_Dry_P Parameter: Age (day) Value: 27
  misc_feature: MA Experiment 20001558 PARAMETER Experiment Name: At_Drought_Soil_Dry_P Parameter: Organism Value: A. thaliana
  misc_feature: MA Experiment 20001558 PARAMETER Experiment Name: At_Drought_Soil_Dry_P Parameter: Plant Line Value: WS
  misc_feature: MA Experiment 20001558 PARAMETER Experiment Name: At_Drought_Soil_Dry_P Parameter: Post Timepoint (hr) Value: 6
  misc_feature: MA Experiment 20001558 PARAMETER Experiment Name: At_Drought_Soil_Dry_P Parameter: Post-Treatment Value: Re-Water vs. No Drought
  misc_feature: MA Experiment 20001558 PARAMETER Experiment Name: At_Drought_Soil_Dry_P Parameter: Timepoint (day) Value: 13
  misc_feature: MA Experiment 20001558 PARAMETER Experiment Name: At_Drought_Soil_Dry_P Parameter: Treatment Value: Drought vs. No Drought
  misc_feature: MA Experiment ID: 20001757 Result: Up-regulated in Transcription
  misc_feature: MA Experiment 20001757 PARAMETER Experiment Name: At_50mM_NH4NO3_L-to-H_P Parameter: Timepoint (hr) Value: 6
  misc_feature: MA Experiment 20001757 PARAMETER Experiment Name: At_50mM_NH4NO3_L-to-H_P Parameter: Tissue Value: Leaf
  misc_feature: MA Experiment 20001757 PARAMETER Experiment Name: At_50mM_NH4NO3_L-to-H_P Parameter: Treatment Value: 50mM NH4NO3 vs 100mM Mannitol
agtctagtgtttccgggagcagcctgagcaggaggaagaagacgaagaagaagacgtgccaccaagaagccatactcaaggtccattgttggtgctaccttggaagtaattcagaagaagagagctgagaaccctgaagttcgtgatgcagccagggaagctgctctgcgtgagatcaaggaaagaatcaaaaagaccaaagatgaaaagaaggctaagaaggttgaatttgcttctaagcaacagaaggtcaaggctaatttccccaaagctgctgctgcatccaagggtcctaaggtgggaggtggtggtggcaaacgctgaagagcttaaagccatcttttctcactctgcgtcttttctgctagtagctacttttagtagttgatgttcatttctgaatatttgcaaaacataaaccttgttatttcgtttttgtctctcacttttgctactcttataatatcagacttgagaattttgctgcttatgaactttatttttttttttttttttttgttgacgatattaattaatttatgagcatgacgtgggacaaacaccgtacttagtacgtaatacaagtagttataacgtgggaacaaactagtaagtaacacatttaaataaggaaatagtaatagttgccgtagaagccaagcaagcataataatcatatcttctttgtgactgtgactttaagaccatt

SEQ ID NO: 272 - protein, 80 aa, Arabidopsis thaliana
  peptide (1)..(80): Ceres Seq. ID no. 13580627
MQPGKLLCVRSRKESKRPKMKRRLRRLNLLLSNRRSRLISPKLLLHPRVLRWEVVVANAEELKAIFSHSASFLLVATFSS

SEQ ID NO: 273 - protein, 61 aa, Arabidopsis thaliana
  peptide (1)..(61): Ceres Seq. ID no. 13580628
MKRRLRRLNLLLSNRRSRLISPKLLLHPRVLRWEVVVANAEELKAIFSHSASFLLVATFSS

SEQ ID NO: 274 - protein, 51 aa, Arabidopsis thaliana
  peptide (1)..(51): Ceres Seq. ID no. 13580629
MFISEYLQNINLVISFLSLTFATLIISDLRILLLMNFIFFFFFLLTILINL

SEQ ID NO: 275 - DNA, 789 bp, Arabidopsis thaliana
  misc_feature (1)..(789): Ceres Seq. ID no. 12369935
  misc_feature: MA Experiment ID: 108461 Result: Up-regulated in Transcription
  misc_feature: MA Experiment 108461 PARAMETER Experiment Name: At_Germinating_Seeds_cDNA_P Parameter: Age (day) Value: 1 vs. 0
  misc_feature: MA Experiment 108461 PARAMETER Experiment Name: At_Germinating_Seeds_cDNA_P Parameter: Tissue Value: Germinating Seeds
  misc_feature: MA Experiment ID: 108462 Result: Up-regulated in Transcription
  misc_feature: MA Experiment 108462 PARAMETER Experiment Name: At_Germinating_Seeds_cDNA_P Parameter: Age (day) Value: 2 vs. 0
  misc_feature: MA Experiment 108462 PARAMETER Experiment Name: At_Germinating_Seeds_cDNA_P Parameter: Tissue Value: Germinating Seeds
  misc_feature: MA Experiment ID: 108463 Result: Up-regulated in Transcription
  misc_feature: MA Experiment 108463 PARAMETER Experiment Name: At_Germinating_Seeds_cDNA_P Parameter: Age (day) Value: 3 vs. 0
  misc_feature: MA Experiment 108463 PARAMETER Experiment Name: At_Germinating_Seeds_cDNA_P Parameter: Tissue Value: Germinating Seeds
  misc_feature: MA Experiment ID: 20000117 Result: Down-regulated in Transcription
  misc_feature: MA Experiment 20000117 PARAMETER Experiment Name: At_100uM_ABA_Mutants_cDNA_P Parameter: Plant Line Value: Columbia
  misc_feature: MA Experiment 20000117 PARAMETER Experiment Name: At_100uM_ABA_Mutants_cDNA_P Parameter: Timepoint (hr) Value: 6
  misc_feature: MA Experiment 20000117 PARAMETER Experiment Name: At_100uM_ABA_Mutants_cDNA_P Parameter: Tissue Value: Aerial
  misc_feature: MA Experiment 20000117 PARAMETER Experiment Name: At_100uM_ABA_Mutants_cDNA_P Parameter: Treatment Value: 100uM ABA vs. No Treatment
attgcttgcttgttattatgcatccaaaccttaaaaacttgtctcctcagattcaccatcctacaaaacttatcaatctcttcttcatctttcttctgcatcctccaccctaatctctctgcaaattccttcatcttctccttttgttcttcattgatctttgtcctcactctcttcttcttcctcatcatcatcatcatcaaacttttcccatcaacgttttggttacgatgactcagaatcttcttcatatcctcgcttgaagatgaagtcctccgtccaatctcacccgttggatgcattacacgtggcttgtacgagctgttactgctgtaaaacgccggagttatcatcagctgataatcttgtttactgttcatgtgtccgtacacttctttccggtggaagctccggtgacagttacaggcggcgcattttaaagcaccgagtgtaccttcttctccgccggccatgaactcgcagcatccgtccaccacgtgtcctccggttgaggccgcgtggttcttctgacattcccggtacttagctccttggtcgacacgtgtctttggtttttggttttctttcttgatcgggaataaagccatggatggatctgattcgggtttggcttctggttccggatccgtatgtggctttacttctgttgagattattgttgtggttgtaattgcattgcattttcctccaagctccattgtgaatctgacccaaaacaacaaaactttgttaaatattaatacgtataaatcattcaataatgcatgc

SEQ ID NO: 276 - protein, 77 aa, Arabidopsis thaliana
  peptide (1)..(77): Ceres Seq. ID no. 12369936
IACLLLCIQTLKTCLLRFTILQNLSISSSSFFCILHPNLSANSFIFSFCSSLIFVLTLFFFLIIIIIKLFPSTFWLR

SEQ ID NO: 277 - protein, 69 aa, Arabidopsis thaliana
  peptide (1)..(69): Ceres Seq. ID no. 12369937
MKSSVQSHPLDALHVACTSCYCCKTPELSSADNLVYCSCVRTLLSGGSSGDSYRRRILKHRVYLLLRRP

SEQ ID NO: 278 - protein, 61 aa, Arabidopsis thaliana
  peptide (1)..(61): Ceres Seq. ID no. 12369938
MDGSDSGLASGSGSVCGFTSVEIIVVVVIALHFPPSSIVNLTQNNKTLLNINTYKSFNNAC

SEQ ID NO: 279 - DNA, 679 bp, Arabidopsis thaliana
  misc_feature (1)..(679): Ceres Seq. ID no. 12384513
  misc_feature: MA Experiment ID: 108434 Result: Up-regulated in Transcription
  misc_feature: MA Experiment 108434 PARAMETER Experiment Name: At_Root_Tips_cDNA_P Parameter: Tissue Value: Root Tips
  misc_feature: MA Experiment ID: 108462 Result: Down-regulated in Transcription
  misc_feature: MA Experiment 108462 PARAMETER Experiment Name: At_Germinating_Seeds_cDNA_P Parameter: Age (day) Value: 2 vs. 0
  misc_feature: MA Experiment 108462 PARAMETER Experiment Name: At_Germinating_Seeds_cDNA_P Parameter: Tissue Value: Germinating Seeds
  misc_feature: MA Experiment ID: 108463 Result: Down-regulated in Transcription
  misc_feature: MA Experiment 108463 PARAMETER Experiment Name: At_Germinating_Seeds_cDNA_P Parameter: Age (day) Value: 3 vs. 0
  misc_feature: MA Experiment 108463 PARAMETER Experiment Name: At_Germinating_Seeds_cDNA_P Parameter: Tissue Value: Germinating Seeds
  misc_feature: MA Experiment ID: 108464 Result: Down-regulated in Transcription
  misc_feature: MA Experiment 108464 PARAMETER Experiment Name: At_Germinating_Seeds_cDNA_P Parameter: Age (day) Value: 4 vs. 0
  misc_feature: MA Experiment 108464 PARAMETER Experiment Name: At_Germinating_Seeds_cDNA_P Parameter: Tissue Value: Germinating Seeds
  misc_feature: MA Experiment ID: 20000068 Result: Up-regulated in Transcription
agaaatgatgggcgactgtgaatcatatagggtgaccatttgccagcgtttgaactcgtcgtgtgtcgtcgacgttcccagccgaagaagcacaactgatggtccaagagatactcctgccatcaacgaaaaccggtgagaagaaaccaaaggtggtgttggtgctagtccagatctagagctttttgataagttgatgaagtcttgctctgatgtttgagaagaggagctgttggactgttgtgaattttcttgttttgggttcgaagacagagatgcatccaagatctgagtcagatcggagccaatagagcatcgatatactcttccgtcacaaagaaaactttcagtgaagaagctcacataaaaaaggagatttagatattttgagagatttgagataacggaggaagattcaatgaagataaagcttatatagaacacatgaaggttgatgggagttgataagtcccgacgctggcgatcggaaccaccaccggcgtcagagagtatggttgtcgagagtgtctcgattttggtgcctaggagcttttttagtcacgaatagactagacaaaaaattccccatgttaattttgtacaaatactaaaatgtaatactagttgaactttacatatatgtttatgaaggcaaatcttaacaaactcaaagatttgt

SEQ ID NO: 280 - protein, 45 aa, Arabidopsis thaliana
  peptide (1)..(45): Ceres Seq. ID no. 12384514
EMMGDCESYRVTICQRLNSSCVVDVPSRRSTTDGPRDTPAINENR

SEQ ID NO: 281 - protein, 44 aa, Arabidopsis thaliana
  peptide (1)..(44): Ceres Seq. ID no. 12384515
MMGDCESYRVTICQRLNSSCVVDVPSRRSTTDGPRDTPAINENR

SEQ ID NO: 282 - protein, 43 aa, Arabidopsis thaliana
  peptide (1)..(43): Ceres Seq. ID no. 12384516
MGDCESYRVTICQRLNSSCVVDVPSRRSTTDGPRDTPAINENR

SEQ ID NO: 283 - DNA, 1040 bp, Arabidopsis thaliana
  misc_feature (1)..(1040): Ceres Seq. ID no. 13492499
  misc_feature: MA Experiment ID: 108434 Result: Down-regulated in Transcription
  misc_feature: MA Experiment 108434 PARAMETER Experiment Name: At_Root_Tips_cDNA_P Parameter: Tissue Value: Root Tips
  misc_feature: MA Experiment ID: 108464 Result: Up-regulated in Transcription
  misc_feature: MA Experiment 108464 PARAMETER Experiment Name: At_Germinating_Seeds_cDNA_P Parameter: Age (day) Value: 4 vs. 0
  misc_feature: MA Experiment 108464 PARAMETER Experiment Name: At_Germinating_Seeds_cDNA_P Parameter: Tissue Value: Germinating Seeds
  misc_feature: MA Experiment ID: 20000185 Result: Up-regulated in Transcription
  misc_feature: MA Experiment 20000185 PARAMETER Experiment Name: At_Roots__P Parameter: Age (day) Value: 7 vs. 21
  misc_feature: MA Experiment 20000185 PARAMETER Experiment Name: At_Roots__P Parameter: Organism Value: A. thaliana
  misc_feature: MA Experiment 20000185 PARAMETER Experiment Name: At_Roots__P Parameter: Tissue Value: Roots vs. Whole Plant
  misc_feature: MA Experiment ID: 20000439 Result: Up-regulated in Transcription
  misc_feature: MA Experiment 20000439 PARAMETER Experiment Name: At_Roots__P Parameter: Age (day) Value: 14 vs. 21
  misc_feature: MA Experiment 20000439 PARAMETER Experiment Name: At_Roots__P Parameter: Organism Value: A. thaliana
  misc_feature: MA Experiment 20000439 PARAMETER Experiment Name: At_Roots__P Parameter: Tissue Value: Roots vs. Whole Plant
  misc_feature: MA Experiment ID: 20000451 Result: Down-regulated in Transcription
  misc_feature: MA Experiment 20000451 PARAMETER Experiment Name: At_CS6879_Shoots-Roots_P Parameter: Age (day) Value: 14
  misc_feature: MA Experiment 20000451 PARAMETER Experiment Name: At_CS6879_Shoots-Roots_P Parameter: Organism Value: A. thaliana
  misc_feature: MA Experiment 20000451 PARAMETER Experiment Name: At_CS6879_Shoots-Roots_P Parameter: Plant Line Value: CS6879 vs. WS
  misc_feature: MA Experiment 20000451 PARAMETER Experiment Name: At_CS6879_Shoots-Roots_P Parameter: Tissue Value: Roots
  misc_feature: MA Experiment ID: 20001451 Result: Up-regulated in Transcription
  misc_feature: MA Experiment 20001451 PARAMETER Experiment Name: At_Far-red-induction_P Parameter: Age (day) Value: 7
  misc_feature: MA Experiment 20001451 PARAMETER Experiment Name: At_Far-red-induction_P Parameter: Light Value: Far-red vs. White
  misc_feature: MA Experiment 20001451 PARAMETER Experiment Name: At_Far-red-induction_P Parameter: Organism Value: A. thaliana
  misc_feature: MA Experiment 20001451 PARAMETER Experiment Name: At_Far-red-induction_P Parameter: Plant Line Value: Columbia
  misc_feature: MA Experiment 20001451 PARAMETER Experiment Name: At_Far-red-induction_P Parameter: Timepoint (hr) Value: 24
  misc_feature: MA Experiment 20001451 PARAMETER Experiment Name: At_Far-red-induction_P Parameter: Tissue Value: Whole Plant
acacctttatagttgtagctaggttttcgaatttcttgagtttttttgtttaaggatttaaaaacattttttgaaattcggagaaaaactttttaagatttcattagtgggtgattttccttaaaaaagagaagaaaaaaaagatacctggcaaaagtcgttcaagacaaaatctgggacataatcgagtctcttagaagaaaccatcccagagaatctcctaagatctgttgcagaagcaggaagcatcacctccttgatacggtggcacttagccctagcgataaacgcctcgttgtcactcctccgcaaattaacaccggagctcgcaagcaccaccttctccactttctccggaaacattttcgccatattatacgccacaaacccgccgtagctcgtcccaacgacactgaatctctcgacctcgagcttctccataagcttccccatgcacaacgcttgaaacatctccgaccggttctcaccggaggaagaggagccgccgaagaagactaggtcggggacgtagagacgaaagaagtgagagagtggcttgacctgatggctccattgccatacagcggaaggtccaaaaccatggaggaggaggagcgacggtttttgtgtattttccgatgatgaagacggtggtggtccccagaactgtatggtggtttcggagtcgatggatagggtttgtaaggagagaccagcggaggagaatctccggcggagtagtgcctcaacgaatcttgcgacgcttagaaacgagggagccatatttttgtagagtgctagaaaacgaaacaataagtaagctttttgagtattattggaaagataggagaactaaagagaaagagatgtttagtttgaaattattgcatttatagacagttataaaataaatgcatttattggctgcatgcaccatacaatgatagaggctaaccttttgttaattcttgtttccttgtttgattcttgtaagttgtaacgtttgattattcttttgtttaattttggatttatttgtt

SEQ ID NO: 284 - protein, 85 aa, Arabidopsis thaliana
  peptide (1)..(85): Ceres Seq. ID no. 13492500
MMKTVVVPRTVWWFRSRWIGFVRRDQRRRISGGVVPQRILRRLETREPYFCRVLENETISKLFEYYWKDRRTKEKEMFSLKLLHL

SEQ ID NO: 285 - protein, 84 aa, Arabidopsis thaliana
  peptide (1)..(84): Ceres Seq. ID no. 13492501
MKTVVVPRTVWWFRSRWIGFVRRDQRRRISGGVVPQRILRRLETREPYFCRVLENETISKLFEYYWKDRRTKEKEMFSLKLLHL

SEQ ID NO: 286 - DNA, 519 bp, Arabidopsis thaliana
  misc_feature (1)..(519): Ceres Seq. ID no. 4911155
  misc_feature: MA Experiment ID: 108461 Result: Down-regulated in Transcription
  misc_feature: MA Experiment 108461 PARAMETER Experiment Name: At_Germinating_Seeds_cDNA_P Parameter: Age (day) Value: 1 vs. 0
  misc_feature: MA Experiment 108461 PARAMETER Experiment Name: At_Germinating_Seeds_cDNA_P Parameter: Tissue Value: Germinating Seeds
  misc_feature: MA Experiment ID: 108488 Result: Down-regulated in Transcription
  misc_feature: MA Experiment ID: 108595 Result: Up-regulated in Transcription
  misc_feature: MA Experiment 108595 PARAMETER Experiment Name: At_Ler-pi_Ovule_cDNA_P Parameter: Plant Line Value: null
  misc_feature: MA Experiment ID: 108605 Result: Up-regulated in Transcription
  misc_feature: MA Experiment 108605 PARAMETER Experiment Name: At_100uM_ABA_cDNA_P Parameter: Timepoint (hr) Value: 6
  misc_feature: MA Experiment 108605 PARAMETER Experiment Name: At_100uM_ABA_cDNA_P Parameter: Tissue Value: Aerial
  misc_feature: MA Experiment 108605 PARAMETER Experiment Name: At_100uM_ABA_cDNA_P Parameter: Treatment Value: 100uM ABA vs. No Treatment
  misc_feature: MA Experiment ID: 108607 Result: Up-regulated in Transcription
  misc_feature: MA Experiment 108607 PARAMETER Experiment Name: At_100uM_ABA_cDNA_P Parameter: Timepoint (hr) Value: 4
  misc_feature: MA Experiment 108607 PARAMETER Experiment Name: At_100uM_ABA_cDNA_P Parameter: Tissue Value: Aerial
  misc_feature: MA Experiment 108607 PARAMETER Experiment Name: At_100uM_ABA_cDNA_P Parameter: Treatment Value: 100uM ABA vs. No Treatment
  misc_feature: MA Experiment ID: 108608 Result: Up-regulated in Transcription
  misc_feature: MA Experiment 108608 PARAMETER Experiment Name: At_100uM_ABA_cDNA_P Parameter: Timepoint (hr) Value: 1
  misc_feature: MA Experiment 108608 PARAMETER Experiment Name: At_100uM_ABA_cDNA_P Parameter: Tissue Value: Aerial
  misc_feature: MA Experiment 108608 PARAMETER Experiment Name: At_100uM_ABA_cDNA_P Parameter: Treatment Value: 100uM ABA vs. No Treatment
  misc_feature: MA Experiment ID: 108609 Result: Up-regulated in Transcription
  misc_feature: MA Experiment 108609 PARAMETER Experiment Name: At_100uM_ABA_cDNA_P Parameter: Timepoint (hr) Value: 24
  misc_feature: MA Experiment 108609 PARAMETER Experiment Name: At_100uM_ABA_cDNA_P Parameter: Tissue Value: Aerial
  misc_feature: MA Experiment 108609 PARAMETER Experiment Name: At_100uM_ABA_cDNA_P Parameter: Treatment Value: 100uM ABA vs. No Treatment
  misc_feature: MA Experiment ID: 20000069 Result: Up-regulated in Transcription
  misc_feature: MA Experiment 20000069 PARAMETER Experiment Name: At_100uM_ABA_Mutants_cDNA_P Parameter: Plant Line Value: CS23
  misc_feature: MA Experiment 20000069 PARAMETER Experiment Name: At_100uM_ABA_Mutants_cDNA_P Parameter: Timepoint (hr) Value: 6
  misc_feature: MA Experiment 20000069 PARAMETER Experiment Name: At_100uM_ABA_Mutants_cDNA_P Parameter: Tissue Value: Aerial
  misc_feature: MA Experiment 20000069 PARAMETER Experiment Name: At_100uM_ABA_Mutants_cDNA_P Parameter: Treatment Value: 100uM ABA vs. No Treatment
  misc_feature: MA Experiment ID: 20000070 Result: Up-regulated in Transcription
  misc_feature: MA Experiment 20000070 PARAMETER Experiment Name: At_100uM_ABA_Mutants_cDNA_P Parameter: Plant Line Value: CS24
  misc_feature: MA Experiment 20000070 PARAMETER Experiment Name: At_100uM_ABA_Mutants_cDNA_P Parameter: Timepoint (hr) Value: 6
  misc_feature: MA Experiment 20000070 PARAMETER Experiment Name: At_100uM_ABA_Mutants_cDNA_P Parameter: Tissue Value: Aerial
  misc_feature: MA Experiment 20000070 PARAMETER Experiment Name: At_100uM_ABA_Mutants_cDNA_P Parameter: Treatment Value: 100uM ABA vs. No Treatment
  misc_feature: MA Experiment ID: 20000071 Result: Up-regulated in Transcription
  misc_feature: MA Experiment 20000071 PARAMETER Experiment Name: At_100uM_ABA_Mutants_cDNA_P Parameter: Plant Line Value: CS8104
  misc_feature: MA Experiment 20000071 PARAMETER Experiment Name: At_100uM_ABA_Mutants_cDNA_P Parameter: Timepoint (hr) Value: 6
  misc_feature: MA Experiment 20000071 PARAMETER Experiment Name: At_100uM_ABA_Mutants_cDNA_P Parameter: Tissue Value: Aerial
  misc_feature: MA Experiment 20000071 PARAMETER Experiment Name: At_100uM_ABA_Mutants_cDNA_P Parameter: Treatment Value: 100uM ABA vs. No Treatment
  misc_feature: MA Experiment ID: 20000111 Result: Up-regulated in Transcription
  misc_feature: MA Experiment 20000111 PARAMETER Experiment Name: At_42deg_Heat_cDNA_P Parameter: Temperature (deg C) Value: 42 vs. 22
  misc_feature: MA Experiment 20000111 PARAMETER Experiment Name: At_42deg_Heat_cDNA_P Parameter: Timepoint (hr) Value: 6
  misc_feature: MA Experiment 20000111 PARAMETER Experiment Name: At_42deg_Heat_cDNA_P Parameter: Tissue Value: Aerial
  misc_feature: MA Experiment ID: 20000113 Result: Up-regulated in Transcription
  misc_feature: MA Experiment 20000113 PARAMETER Experiment Name: At_42deg_Heat_cDNA_P Parameter: Temperature (deg C) Value: 42 vs. 22
  misc_feature: MA Experiment 20000113 PARAMETER Experiment Name: At_42deg_Heat_cDNA_P Parameter: Timepoint (hr) Value: 8
  misc_feature: MA Experiment 20000113 PARAMETER Experiment Name: At_42deg_Heat_cDNA_P Parameter: Tissue Value: Aerial
  misc_feature: MA Experiment ID: 20000117 Result: Up-regulated in Transcription
  misc_feature: MA Experiment 20000117 PARAMETER Experiment Name: At_100uM_ABA_Mutants_cDNA_P Parameter: Plant Line Value: Columbia
  misc_feature: MA Experiment 20000117 PARAMETER Experiment Name: At_100uM_ABA_Mutants_cDNA_P Parameter: Timepoint (hr) Value: 6
  misc_feature: MA Experiment 20000117 PARAMETER Experiment Name: At_100uM_ABA_Mutants_cDNA_P Parameter: Tissue Value: Aerial
  misc_feature: MA Experiment 20000117 PARAMETER Experiment Name: At_100uM_ABA_Mutants_cDNA_P Parameter: Treatment Value: 100uM ABA vs. No Treatment
  misc_feature: MA Experiment ID: 20000224 Result: Down-regulated in Transcription
  misc_feature: MA Experiment ID: 20001556 Result: Up-regulated in Transcription
  misc_feature: MA Experiment 20001556 PARAMETER Experiment Name: At_Drought_Soil_Dry_P Parameter: Age (day) Value: 26
  misc_feature: MA Experiment 20001556 PARAMETER Experiment Name: At_Drought_Soil_Dry_P Parameter: Organism Value: A. thaliana
  misc_feature: MA Experiment 20001556 PARAMETER Experiment Name: At_Drought_Soil_Dry_P Parameter: Plant Line Value: WS
  misc_feature: MA Experiment 20001556 PARAMETER Experiment Name: At_Drought_Soil_Dry_P Parameter: Post Timepoint (hr) Value: None
  misc_feature: MA Experiment 20001556 PARAMETER Experiment Name: At_Drought_Soil_Dry_P Parameter: Post-Treatment Value: None
  misc_feature: MA Experiment 20001556 PARAMETER Experiment Name: At_Drought_Soil_Dry_P Parameter: Timepoint (day) Value: 12
  misc_feature: MA Experiment 20001556 PARAMETER Experiment Name: At_Drought_Soil_Dry_P Parameter: Treatment Value: Drought vs. No Drought
  misc_feature: MA Experiment ID: 20001904 Result: Up-regulated in Transcription
  misc_feature: MA Experiment 20001904 PARAMETER Experiment Name: At_Drought_Reproduction_P Parameter: Age (day) Value: 37
  misc_feature: MA Experiment 20001904 PARAMETER Experiment Name: At_Drought_Reproduction_P Parameter: Organism Value: A. thaliana
  misc_feature: MA Experiment 20001904 PARAMETER Experiment Name: At_Drought_Reproduction_P Parameter: Plant Line Value: WS
  misc_feature: MA Experiment 20001904 PARAMETER Experiment Name: At_Drought_Reproduction_P Parameter: Timepoint (day) Value: 7
  misc_feature: MA Experiment 20001904 PARAMETER Experiment Name: At_Drought_Reproduction_P Parameter: Tissue Value: Rosettes
  misc_feature: MA Experiment 20001904 PARAMETER Experiment Name: At_Drought_Reproduction_P Parameter: Treatment Value: Drought vs. No Drought
gattgatactgaagcaatacaagcaacaaaactatcaacgccgccactccccacggcgagcttccaccgtcacctccggctccgggactcacgtaagttgtccgacgactgcttgaaaacatcccgagaagcgcatcagggttctccatggaagataaccaccggaccaagactataagaaacagaggaatcaagagaagcgcaaaatttatctgctcttccgctgattcggctgcttcttccaagctgaagtaccatgaactcaacaagaacactgaagcaacggctaggatcaaaagaactgggtatggtagtggcgatagcgagaatgaatccaggatcgatgatcttctctcttcataagccatagttcctaacttcctataataatgatgatgagagaaggtcttcttggttcttttatgtgctgagggaaacttatagaaaccgactttaggttataatattatatgtttgaccgacagatgaaagattatattaatgtttttgttcaaattc

SEQ ID NO: 287 - protein, 71 aa, Arabidopsis thaliana
  peptide (1)..(71): Ceres Seq. ID no. 4911156
MEDNHRTKTIRNRGIKRSAKFICSSADSAASSKLKYHELNKNTEATARIKRTGYGSGDSENESRIDDLLSS

SEQ ID NO: 288 - protein, 58 aa, Arabidopsis thaliana
  peptide (1)..(58): Ceres Seq. ID no. 4911157
IDTEAIQATKLSTPPLPTASFHRHLRLRDSRKLSDDCLKTSREAHQGSPWKITTGPRL

SEQ ID NO: 289 - protein, 37 aa, Arabidopsis thaliana
  peptide (1)..(37): Ceres Seq. ID no. 4911158
MNSTRTLKQRLGSKELGMVVAIARMNPGSMIFSLHKP

SEQ ID NO: 290 - DNA, 1168 bp, Arabidopsis thaliana; identical to SEQ ID NO: 252
  misc_feature (1)..(1168): Ceres Seq. ID no. 12324442
  misc_feature: MA Experiment ID: 108605 Result: Down-regulated in Transcription
  misc_feature: MA Experiment 108605 PARAMETER Experiment Name: At_100uM_ABA_cDNA_P Parameter: Timepoint (hr) Value: 6
  misc_feature: MA Experiment 108605 PARAMETER Experiment Name: At_100uM_ABA_cDNA_P Parameter: Tissue Value: Aerial
  misc_feature: MA Experiment 108605 PARAMETER Experiment Name: At_100uM_ABA_cDNA_P Parameter: Treatment Value: 100uM ABA vs. No Treatment
  misc_feature: MA Experiment ID: 20000069 Result: Down-regulated in Transcription
  misc_feature: MA Experiment 20000069 PARAMETER Experiment Name: At_100uM_ABA_Mutants_cDNA_P Parameter: Plant Line Value: CS23
  misc_feature: MA Experiment 20000069 PARAMETER Experiment Name: At_100uM_ABA_Mutants_cDNA_P Parameter: Timepoint (hr) Value: 6
  misc_feature: MA Experiment 20000069 PARAMETER Experiment Name: At_100uM_ABA_Mutants_cDNA_P Parameter: Tissue Value: Aerial
  misc_feature: MA Experiment 20000069 PARAMETER Experiment Name: At_100uM_ABA_Mutants_cDNA_P Parameter: Treatment Value: 100uM ABA vs. No Treatment
  misc_feature: MA Experiment ID: 20000113 Result: Down-regulated in Transcription
  misc_feature: MA Experiment 20000113 PARAMETER Experiment Name: At_42deg_Heat_cDNA_P Parameter: Temperature (deg C) Value: 42 vs. 22
  misc_feature: MA Experiment 20000113 PARAMETER Experiment Name: At_42deg_Heat_cDNA_P Parameter: Timepoint (hr) Value: 8
  misc_feature: MA Experiment 20000113 PARAMETER Experiment Name: At_42deg_Heat_cDNA_P Parameter: Tissue Value: Aerial
  misc_feature: MA Experiment ID: 20000440 Result: Up-regulated in Transcription
  misc_feature: MA Experiment 20000440 PARAMETER Experiment Name: At_Closed-Flower__Sub_P Parameter: Tissue Value: Closed Flower vs. Whole Plant

SEQ ID NO: 291 - protein, 83 aa, Arabidopsis thaliana; identical to SEQ ID NO: 253
  peptide (1)..(83): Ceres Seq. ID no. 12324443

SEQ ID NO: 292 - protein, 63 aa, Arabidopsis thaliana; identical to SEQ ID NO: 254
  peptide (1)..(63): Ceres Seq. ID no. 12324444

SEQ ID NO: 293 - protein, 55 aa, Arabidopsis thaliana; identical to SEQ ID NO: 255
  peptide (1)..(55): Ceres Seq. ID no. 12324445

SEQ ID NO: 294 - DNA, 1134 bp, Arabidopsis thaliana
  misc_feature (1)..(1134): Ceres Seq. ID no. 12327481
  misc_feature: MA Experiment ID: 108434 Result: Down-regulated in Transcription
  misc_feature: MA Experiment 108434 PARAMETER Experiment Name: At_Root_Tips_cDNA_P Parameter: Tissue Value: Root Tips
  misc_feature: MA Experiment ID: 108461 Result: Down-regulated in Transcription
  misc_feature: MA Experiment 108461 PARAMETER Experiment Name: At_Germinating_Seeds_cDNA_P Parameter: Age (day) Value: 1 vs. 0
  misc_feature: MA Experiment 108461 PARAMETER Experiment Name: At_Germinating_Seeds_cDNA_P Parameter: Tissue Value: Germinating Seeds
  misc_feature: MA Experiment ID: 108488 Result: Down-regulated in Transcription
  misc_feature: MA Experiment ID: 108668 Result: Up-regulated in Transcription
  misc_feature: MA Experiment 108668 PARAMETER Experiment Name: At_2mM_SA_cDNA_P Parameter: Plant Line Value: WS
  misc_feature: MA Experiment 108668 PARAMETER Experiment Name: At_2mM_SA_cDNA_P Parameter: Timepoint (hr) Value: 6
  misc_feature: MA Experiment 108668 PARAMETER Experiment Name: At_2mM_SA_cDNA_P Parameter: Treatment Value: 2mM SA vs. No Treatment
  misc_feature: MA Experiment ID: 20000070 Result: Up-regulated in Transcription
  misc_feature: MA Experiment 20000070 PARAMETER Experiment Name: At_100uM_ABA_Mutants_cDNA_P Parameter: Plant Line Value: CS24
  misc_feature: MA Experiment 20000070 PARAMETER Experiment Name: At_100uM_ABA_Mutants_cDNA_P Parameter: Timepoint (hr) Value: 6
  misc_feature: MA Experiment 20000070 PARAMETER Experiment Name: At_100uM_ABA_Mutants_cDNA_P Parameter: Tissue Value: Aerial
  misc_feature: MA Experiment 20000070 PARAMETER Experiment Name: At_100uM_ABA_Mutants_cDNA_P Parameter: Treatment Value: 100uM ABA vs. No Treatment
  misc_feature: MA Experiment ID: 20000071 Result: Up-regulated in Transcription
  misc_feature: MA Experiment 20000071 PARAMETER Experiment Name: At_100uM_ABA_Mutants_cDNA_P Parameter: Plant Line Value: CS8104
  misc_feature: MA Experiment 20000071 PARAMETER Experiment Name: At_100uM_ABA_Mutants_cDNA_P Parameter: Timepoint (hr) Value: 6
  misc_feature: MA Experiment 20000071 PARAMETER Experiment Name: At_100uM_ABA_Mutants_cDNA_P Parameter: Tissue Value: Aerial
  misc_feature: MA Experiment 20000071 PARAMETER Experiment Name: At_100uM_ABA_Mutants_cDNA_P Parameter: Treatment Value: 100uM ABA vs. No Treatment
  misc_feature: MA Experiment ID: 20000089 Result: Up-regulated in Transcription
  misc_feature: MA Experiment ID: 20000113 Result: Down-regulated in Transcription
  misc_feature: MA Experiment 20000113 PARAMETER Experiment Name: At_42deg_Heat_cDNA_P Parameter: Temperature (deg C) Value: 42 vs. 22
  misc_feature: MA Experiment 20000113 PARAMETER Experiment Name: At_42deg_Heat_cDNA_P Parameter: Timepoint (hr) Value: 8
  misc_feature: MA Experiment 20000113 PARAMETER Experiment Name: At_42deg_Heat_cDNA_P Parameter: Tissue Value: Aerial
  misc_feature: MA Experiment ID: 20000173 Result: Down-regulated in Transcription
  misc_feature: MA Experiment 20000173 PARAMETER Experiment Name: At_42deg_Heat_P Parameter: Age (day) Value: 14
  misc_feature: MA Experiment 20000173 PARAMETER Experiment Name: At_42deg_Heat_P Parameter: Organism Value: A. thaliana
  misc_feature: MA Experiment 20000173 PARAMETER Experiment Name: At_42deg_Heat_P Parameter: Plant Line Value: WS
  misc_feature: MA Experiment 20000173 PARAMETER Experiment Name: At_42deg_Heat_P Parameter: Temperature (deg C) Value: 42 vs. 22
  misc_feature: MA Experiment 20000173 PARAMETER Experiment Name: At_42deg_Heat_P Parameter: Timepoint (hr) Value: 6
  misc_feature: MA Experiment 20000173 PARAMETER Experiment Name: At_42deg_Heat_P Parameter: Tissue Value: Aerial
  misc_feature: MA Experiment ID: 20000184 Result: Down-regulated in Transcription
  misc_feature: MA Experiment 20000184 PARAMETER Experiment Name: At_Shoots__P Parameter: Age (day) Value: 7
  misc_feature: MA Experiment 20000184 PARAMETER Experiment Name: At_Shoots__P Parameter: Tissue Value: Shoots vs. Whole Plant
  misc_feature: MA Experiment ID: 20000185 Result: Down-regulated in Transcription
  misc_feature: MA Experiment 20000185 PARAMETER Experiment Name: At_Roots__P Parameter: Age (day) Value: 7 vs. 21
  misc_feature: MA Experiment 20000185 PARAMETER Experiment Name: At_Roots__P Parameter: Organism Value: A. thaliana
  misc_feature: MA Experiment 20000185 PARAMETER Experiment Name: At_Roots__P Parameter: Tissue Value: Roots vs. Whole Plant
  misc_feature: MA Experiment ID: 20000224 Result: Up-regulated in Transcription
  misc_feature: MA Experiment ID: 20000495 Result: Up-regulated in Transcription
  misc_feature: MA Experiment 20000495 PARAMETER Experiment Name: At_Guard_Cells_P Parameter: Harvest Date Value: 8/2/2002
  misc_feature: MA Experiment 20000495 PARAMETER Experiment Name: At_Guard_Cells_P Parameter: Organism Value: A. thaliana
  misc_feature: MA Experiment 20000495 PARAMETER Experiment Name: At_Guard_Cells_P Parameter: Tissue Value: Guard Cells vs. Leaves
  misc_feature: MA Experiment ID: 20001248 Result: Up-regulated in Transcription
  misc_feature: MA Experiment 20001248 PARAMETER Experiment Name: At_Far-red-induction_P Parameter: Age (day) Value: 7
  misc_feature: MA Experiment 20001248 PARAMETER Experiment Name: At_Far-red-induction_P Parameter: Light Value: Far-red vs. White
  misc_feature: MA Experiment 20001248 PARAMETER Experiment Name: At_Far-red-induction_P Parameter: Organism Value: A. thaliana
  misc_feature: MA Experiment 20001248 PARAMETER Experiment Name: At_Far-red-induction_P Parameter: Plant Line Value: Columbia
  misc_feature: MA Experiment 20001248 PARAMETER Experiment Name: At_Far-red-induction_P Parameter: Timepoint (hr) Value: 4
  misc_feature: MA Experiment 20001248 PARAMETER Experiment Name: At_Far-red-induction_P Parameter: Tissue Value: Whole Plant
atgcgtcttcatcgctgctcgccatcgccggccaccggggttgccgctgatgcgattcgatccagtgggaacttttgtcaccttgcctcttctctctttcctaacactcaaatctctcctcagccttcagatagatagtctttgaagcaaaccaaaggtgaaaactgttctgcagttggtgatgacaagaagaatcacaagcttttgacttatgtttagaatcatcatgggacaaggcttccgcaatcgaaatgggactttttcagcagcatcctagaaagactctttgcctttatcgcttcacctagacaacgagcaaggataactccatcctccatggctgagcaacctccttgtccgatatcaggagtcattgggtgaagtgcatctcctgcaacgcacacgttgtcttttgtgatgtttgaccatagcagttcccatggaggtcggtacttcagttgagacatcaccatgctatcaagatcagtggtctccaccacattcttaatgttttcagagaagaagaaacatactcggattctggaaacagcatctctgtgggaggagttcctgcagaaattgttccaaccacccatctgcagcaaaatcaaagatgagtccccttttttactgagctgattatatatgaatagtaataatagtgttagtttgatacccttcaaggcgatcatggagactgcgaatatgctgagaaacgccgagagcttccatggccttccaagcattgaaccaagtggtaaatgcaaatcctgtcgctctcagtgtctccgaagattccagcaccatgcttctgatcccaagcctgtgacacacaccactttagttaacttactctgcttaataacaactcaaaaggcacgccacacacacctgtgtagtccaacagcggtggaaaggccggagataccggcgccaacgatgatgatatctgggctgccttcttcttccatggtgcgttgatgatcttagaaagaaagctctgtttttcttcctctctagtatttatttttaactttcaagtaaacaaaaagaaatgtggttgaagttggcaagtcaaacaaggcaccccgttctaggcaggcggctacagtcatcaaatatcgaatctttaat

SEQ ID NO: 295 - protein, 111 aa, Arabidopsis thaliana
  peptide (1)..(111): Ceres Seq. ID no. 12327482
MNSNNSVSLIPFKAIMETANMLRNAESFHGLPSIEPSGKCKSCRSQCLRRFQHHASDPKPVTHTTLVNLLCLITTQKARHTHLCSPTAVERPEIPAPTMMISGLPSSSMVR

SEQ ID NO: 296 - protein, 96 aa, Arabidopsis thaliana
  peptide (1)..(96): Ceres Seq. ID no. 12327483
METANMLRNAESFHGLPSIEPSGKCKSCRSQCLRRFQHHASDPKPVTHTTLVNLLCLITTQKARHTHLCSPTAVERPEIPAPTMMISGLPSSSMVR

SEQ ID NO: 297 - protein, 91 aa, Arabidopsis thaliana
  peptide (1)..(91): Ceres Seq. ID no. 12327484
MLRNAESFHGLPSIEPSGKCKSCRSQCLRRFQHHASDPKPVTHTTLVNLLCLITTQKARHTHLCSPTAVERPEIPAPTMMISGLPSSSMVR

SEQ ID NO: 298 - DNA, 760 bp, Arabidopsis thaliana
  misc_feature (1)..(760): Ceres Seq. ID no. 12396366
  misc_feature: MA Experiment ID: 108461 Result: Up-regulated in Transcription
  misc_feature: MA Experiment 108461 PARAMETER Experiment Name: At_Germinating_Seeds_cDNA_P Parameter: Age (day) Value: 1 vs. 0
  misc_feature: MA Experiment 108461 PARAMETER Experiment Name: At_Germinating_Seeds_cDNA_P Parameter: Tissue Value: Germinating Seeds
  misc_feature: MA Experiment ID: 108462 Result: Up-regulated in Transcription
  misc_feature: MA Experiment 108462 PARAMETER Experiment Name: At_Germinating_Seeds_cDNA_P Parameter: Age (day) Value: 2 vs. 0
  misc_feature: MA Experiment 108462 PARAMETER Experiment Name: At_Germinating_Seeds_cDNA_P Parameter: Tissue Value: Germinating Seeds
  misc_feature: MA Experiment ID: 108463 Result: Up-regulated in Transcription
  misc_feature: MA Experiment 108463 PARAMETER Experiment Name: At_Germinating_Seeds_cDNA_P Parameter: Age (day) Value: 3 vs. 0
  misc_feature: MA Experiment 108463 PARAMETER Experiment Name: At_Germinating_Seeds_cDNA_P Parameter: Tissue Value: Germinating Seeds
  misc_feature: MA Experiment ID: 108464 Result: Up-regulated in Transcription
  misc_feature: MA Experiment 108464 PARAMETER Experiment Name: At_Germinating_Seeds_cDNA_P Parameter: Age (day) Value: 4 vs. 0
  misc_feature: MA Experiment 108464 PARAMETER Experiment Name: At_Germinating_Seeds_cDNA_P Parameter: Tissue Value: Germinating Seeds
  misc_feature: MA Experiment ID: 108488 Result: Up-regulated in Transcription
  misc_feature: MA Experiment ID: 108561 Result: Down-regulated in Transcription
  misc_feature: MA Experiment 108561 PARAMETER Experiment Name: At_100uM_ABA_cDNA_P Parameter: Timepoint (hr) Value: 6
  misc_feature: MA Experiment 108561 PARAMETER Experiment Name: At_100uM_ABA_cDNA_P Parameter: Tissue Value: Aerial
  misc_feature: MA Experiment 108561 PARAMETER Experiment Name: At_100uM_ABA_cDNA_P Parameter: Treatment Value: 100uM ABA vs. No Treatment
  misc_feature: MA Experiment ID: 108573 Result: Down-regulated in Transcription
  misc_feature: MA Experiment 108573 PARAMETER Experiment Name: At_Drought_cDNA_P Parameter: Timepoint (hr) Value: 6
  misc_feature: MA Experiment 108573 PARAMETER Experiment Name: At_Drought_cDNA_P Parameter: Tissue Value: Aerial
  misc_feature: MA Experiment 108573 PARAMETER Experiment Name: At_Drought_cDNA_P Parameter: Treatment Value: Drought vs. No Drought
  misc_feature: MA Experiment ID: 108577 Result: Down-regulated in Transcription
  misc_feature: MA Experiment 108577 PARAMETER Experiment Name: At_42deg_Heat_cDNA_P Parameter: Temperature (deg C) Value: 42 vs. 22
  misc_feature: MA Experiment 108577 PARAMETER Experiment Name: At_42deg_Heat_cDNA_P Parameter: Timepoint (hr) Value: 6
  misc_feature: MA Experiment 108577 PARAMETER Experiment Name: At_42deg_Heat_cDNA_P Parameter: Tissue Value: Aerial
  misc_feature: MA Experiment ID: 108579 Result: Up-regulated in Transcription
  misc_feature: MA Experiment 108579 PARAMETER Experiment Name: At_4deg_Cold_cDNA_P Parameter: Temperature (deg C) Value: 4 vs. 22
  misc_feature: MA Experiment 108579 PARAMETER Experiment Name: At_4deg_Cold_cDNA_P Parameter: Timepoint (hr) Value: 6
  misc_feature: MA Experiment 108579 PARAMETER Experiment Name: At_4deg_Cold_cDNA_P Parameter: Tissue Value: Aerial
  misc_feature: MA Experiment ID: 108595 Result: Down-regulated in Transcription
  misc_feature: MA Experiment 108595 PARAMETER Experiment Name: At_Ler-pi_Ovule_cDNA_P Parameter: Plant Line Value: null
  misc_feature: MA Experiment ID: 108605 Result: Down-regulated in Transcription
  misc_feature: MA Experiment 108605 PARAMETER Experiment Name: At_100uM_ABA_cDNA_P Parameter: Timepoint (hr) Value: 6
  misc_feature: MA Experiment 108605 PARAMETER Experiment Name: At_100uM_ABA_cDNA_P Parameter: Tissue Value: Aerial
  misc_feature: MA Experiment 108605 PARAMETER Experiment Name: At_100uM_ABA_cDNA_P Parameter: Treatment Value: 100uM ABA vs. No Treatment
  misc_feature: MA Experiment ID: 20000069 Result: Down-regulated in Transcription
  misc_feature: MA Experiment 20000069 PARAMETER Experiment Name: At_100uM_ABA_Mutants_cDNA_P Parameter: Plant Line Value: CS23
  misc_feature: MA Experiment 20000069 PARAMETER Experiment Name: At_100uM_ABA_Mutants_cDNA_P Parameter: Timepoint (hr) Value: 6
  misc_feature: MA Experiment 20000069 PARAMETER Experiment Name: At_100uM_ABA_Mutants_cDNA_P Parameter: Tissue Value: Aerial
  misc_feature: MA Experiment 20000069 PARAMETER Experiment Name: At_100uM_ABA_Mutants_cDNA_P Parameter: Treatment Value: 100uM ABA vs. No Treatment
  misc_feature: MA Experiment ID: 20000070 Result: Down-regulated in Transcription
  misc_feature: MA Experiment 20000070 PARAMETER Experiment Name: At_100uM_ABA_Mutants_cDNA_P Parameter: Plant Line Value: CS24
  misc_feature: MA Experiment 20000070 PARAMETER Experiment Name: At_100uM_ABA_Mutants_cDNA_P Parameter: Timepoint (hr) Value: 6
  misc_feature: MA Experiment 20000070 PARAMETER Experiment Name: At_100uM_ABA_Mutants_cDNA_P Parameter: Tissue Value: Aerial
  misc_feature: MA Experiment 20000070 PARAMETER Experiment Name: At_100uM_ABA_Mutants_cDNA_P Parameter: Treatment Value: 100uM ABA vs. No Treatment
  misc_feature: MA Experiment ID: 20000071 Result: Down-regulated in Transcription
  misc_feature: MA Experiment 20000071 PARAMETER Experiment Name: At_100uM_ABA_Mutants_cDNA_P Parameter: Plant Line Value: CS8104
  misc_feature: MA Experiment 20000071 PARAMETER Experiment Name: At_100uM_ABA_Mutants_cDNA_P Parameter: Timepoint (hr) Value: 6
  misc_feature: MA Experiment 20000071 PARAMETER Experiment Name: At_100uM_ABA_Mutants_cDNA_P Parameter: Tissue Value: Aerial
  misc_feature: MA Experiment 20000071 PARAMETER Experiment Name: At_100uM_ABA_Mutants_cDNA_P Parameter: Treatment Value: 100uM ABA vs. No Treatment
  misc_feature: MA Experiment ID: 20000086 Result: Down-regulated in Transcription
  misc_feature: MA Experiment 20000086 PARAMETER Experiment Name: At_100uM_ABA_Mutants_cDNA_P Parameter: Plant Line Value: CS22
  misc_feature: MA Experiment 20000086 PARAMETER Experiment Name: At_100uM_ABA_Mutants_cDNA_P Parameter: Timepoint (hr) Value: 6
  misc_feature: MA Experiment 20000086 PARAMETER Experiment Name: At_100uM_ABA_Mutants_cDNA_P Parameter: Tissue Value: Aerial
  misc_feature: MA Experiment 20000086 PARAMETER Experiment Name: At_100uM_ABA_Mutants_cDNA_P Parameter: Treatment Value: 100uM ABA vs. No Treatment
  misc_feature: MA Experiment ID: 20000088 Result: Down-regulated in Transcription
  misc_feature: MA Experiment 20000088 PARAMETER Experiment Name: At_100uM_ABA_Mutants_cDNA_P Parameter: Plant Line Value: Landsberg
  misc_feature: MA Experiment 20000088 PARAMETER Experiment Name: At_100uM_ABA_Mutants_cDNA_P Parameter: Timepoint (hr) Value: 6
  misc_feature: MA Experiment 20000088 PARAMETER Experiment Name: At_100uM_ABA_Mutants_cDNA_P Parameter: Tissue Value: Aerial
  misc_feature: MA Experiment 20000088 PARAMETER Experiment Name: At_100uM_ABA_Mutants_cDNA_P Parameter: Treatment Value: 100uM ABA vs. No Treatment
  misc_feature: MA Experiment ID: 20000111 Result: Down-regulated in Transcription
  misc_feature: MA Experiment 20000111 PARAMETER Experiment Name: At_42deg_Heat_cDNA_P Parameter: Temperature (deg C) Value: 42 vs. 22
  misc_feature: MA Experiment 20000111 PARAMETER Experiment Name: At_42deg_Heat_cDNA_P Parameter: Timepoint (hr) Value: 6
  misc_feature: MA Experiment 20000111 PARAMETER Experiment Name: At_42deg_Heat_cDNA_P Parameter: Tissue Value: Aerial
  misc_feature: MA Experiment ID: 20000117 Result: Down-regulated in Transcription
  misc_feature: MA Experiment 20000117 PARAMETER Experiment Name: At_100uM_ABA_Mutants_cDNA_P Parameter: Plant Line Value: Columbia
  misc_feature: MA Experiment 20000117 PARAMETER Experiment Name: At_100uM_ABA_Mutants_cDNA_P Parameter: Timepoint (hr) Value: 6
  misc_feature: MA Experiment 20000117 PARAMETER Experiment Name: At_100uM_ABA_Mutants_cDNA_P Parameter: Tissue Value: Aerial
  misc_feature: MA Experiment 20000117 PARAMETER Experiment Name: At_100uM_ABA_Mutants_cDNA_P Parameter: Treatment Value: 100uM ABA vs. No Treatment
  misc_feature: MA Experiment ID: 20000144 Result: Down-regulated in Transcription
  misc_feature: MA Experiment 20000144 PARAMETER Experiment Name: At_42deg_Heat_cDNA_P Parameter: Temperature (deg C) Value: 42 vs. 22
  misc_feature: MA Experiment 20000144 PARAMETER Experiment Name: At_42deg_Heat_cDNA_P Parameter: Timepoint (hr) Value: 1
  misc_feature: MA Experiment 20000144 PARAMETER Experiment Name: At_42deg_Heat_cDNA_P Parameter: Tissue Value: Aerial
aaaaatttagacaaatatttctttaactccaatacaaaagtacacatagcattaggttattcctaagatttctgggcttctggtcctaaaatcccattcactactgacgtagcgacaagaactccgacgaactcagccgccacgacggctccagcttgtgtcaatccattaaaactaaccgccgtcacgatttccttctccgccgtctctacacctctctccgccgcttctaatcctttctccgccgcatcaacgcctttctccgccgtctcaaagccttctttcacgatctccaccgcttcttcttctgctttcttcagtttctttcttataccaaataacggaatattctcagccattgatgcagactgaagtcccgtcactaccgtcgctgccgtcaacgaaaataacagattcctgcgagaggcgccggtcagcgagaacgaagcaagcgcgggtttgttagaatgcgccgctcgtgggctaacatgcgcggttcttgcgcaacgcgcctgaagagctccactgccgccgctgagtaaagaaagcgaaacagtcgaagccattttttagatgatctcacaagaaacgaaaaaagctctcagatgtgaaatagaaaatacgaaaagttttgataatatataagataacaaaataatttcattgtcaattgacgtgacacgtcatctccattgagattctttgataaatgggtataaaaaagattataattaaagaataataaaacattttgtacgtt

SEQ ID NO: 299 - protein, 34 aa, Arabidopsis thaliana
  peptide (1)..(34): Ceres Seq. ID no. 12396367
MQTEVPSLPSLPSTKITDSCERRRSARTKQARVC

SEQ ID NO: 300 - DNA, 1528 bp, Arabidopsis thaliana
  misc_feature (1)..(1528): Ceres Seq. ID no. 12385074
  misc_feature: MA Experiment ID: 108434 Result: Down-regulated in Transcription
  misc_feature: MA Experiment 108434 PARAMETER Experiment Name: At_Root_Tips_cDNA_P Parameter: Tissue Value: Root Tips
  misc_feature: MA Experiment ID: 108461 Result: Down-regulated in Transcription
  misc_feature: MA Experiment 108461 PARAMETER Experiment Name: At_Germinating_Seeds_cDNA_P Parameter: Age (day) Value: 1 vs. 0
  misc_feature: MA Experiment 108461 PARAMETER Experiment Name: At_Germinating_Seeds_cDNA_P Parameter: Tissue Value: Germinating Seeds
  misc_feature: MA Experiment ID: 108462 Result: Up-regulated in Transcription
  misc_feature: MA Experiment 108462 PARAMETER Experiment Name: At_Germinating_Seeds_cDNA_P Parameter: Age (day) Value: 2 vs. 0
  misc_feature: MA Experiment 108462 PARAMETER Experiment Name: At_Germinating_Seeds_cDNA_P Parameter: Tissue Value: Germinating Seeds
  misc_feature: MA Experiment ID: 108463 Result: Up-regulated in Transcription
  misc_feature: MA Experiment 108463 PARAMETER Experiment Name: At_Germinating_Seeds_cDNA_P Parameter: Age (day) Value: 3 vs. 0
  misc_feature: MA Experiment 108463 PARAMETER Experiment Name: At_Germinating_Seeds_cDNA_P Parameter: Tissue Value: Germinating Seeds
  misc_feature: MA Experiment ID: 108464 Result: Up-regulated in Transcription
  misc_feature: MA Experiment 108464 PARAMETER Experiment Name: At_Germinating_Seeds_cDNA_P Parameter: Age (day) Value: 4 vs. 0
  misc_feature: MA Experiment 108464 PARAMETER Experiment Name: At_Germinating_Seeds_cDNA_P Parameter: Tissue Value: Germinating Seeds
  misc_feature: MA Experiment ID: 108594 Result: Down-regulated in Transcription
  misc_feature: MA Experiment 108594 PARAMETER Experiment Name: At_Ler-rhl_Root_cDNA_P Parameter: Plant Line Value: null
  misc_feature: MA Experiment ID: 108595 Result: Up-regulated in Transcription
  misc_feature: MA Experiment 108595 PARAMETER Experiment Name: At_Ler-pi_Ovule_cDNA_P Parameter: Plant Line Value: null
  misc_feature: MA Experiment ID: 108608 Result: Up-regulated in Transcription
  misc_feature: MA Experiment 108608 PARAMETER Experiment Name: At_100uM_ABA_cDNA_P Parameter: Timepoint (hr) Value: 1
  misc_feature: MA Experiment 108608 PARAMETER Experiment Name: At_100uM_ABA_cDNA_P Parameter: Tissue Value: Aerial
  misc_feature: MA Experiment 108608 PARAMETER Experiment Name: At_100uM_ABA_cDNA_P Parameter: Treatment Value: 100uM ABA vs. No Treatment
  misc_feature: MA Experiment ID: 108668 Result: Up-regulated in Transcription
  misc_feature: MA Experiment 108668 PARAMETER Experiment Name: At_2mM_SA_cDNA_P Parameter: Plant Line Value: WS
  misc_feature: MA Experiment 108668 PARAMETER Experiment Name: At_2mM_SA_cDNA_P Parameter: Timepoint (hr) Value: 6
  misc_feature: MA Experiment 108668 PARAMETER Experiment Name: At_2mM_SA_cDNA_P Parameter: Treatment Value: 2mM SA vs. No Treatment
  misc_feature: MA Experiment ID: 20000184 Result: Down-regulated in Transcription
  misc_feature: MA Experiment 20000184 PARAMETER Experiment Name: At_Shoots__P Parameter: Age (day) Value: 7
  misc_feature: MA Experiment 20000184 PARAMETER Experiment Name: At_Shoots__P Parameter: Tissue Value: Shoots vs. Whole Plant
  misc_feature: MA Experiment ID: 20000185 Result: Down-regulated in Transcription
  misc_feature: MA Experiment 20000185 PARAMETER Experiment Name: At_Roots__P Parameter: Age (day) Value: 7 vs. 21
  misc_feature: MA Experiment 20000185 PARAMETER Experiment Name: At_Roots__P Parameter: Organism Value: A. thaliana
  misc_feature: MA Experiment 20000185 PARAMETER Experiment Name: At_Roots__P Parameter: Tissue Value: Roots vs. Whole Plant
  misc_feature: MA Experiment ID: 20000234 Result: Down-regulated in Transcription
  misc_feature: MA Experiment 20000234 PARAMETER Experiment Name: At_Siliques_P Parameter: Age (day) Value: 21
  misc_feature: MA Experiment 20000234 PARAMETER Experiment Name: At_Siliques_P Parameter: Organism Value: A. thaliana
  misc_feature: MA Experiment 20000234 PARAMETER Experiment Name: At_Siliques_P Parameter: Plant Line Value: WS
  misc_feature: MA Experiment 20000234 PARAMETER Experiment Name: At_Siliques_P Parameter: Tissue Value: Less Than 5mm Siliques vs. Whole Plant
  misc_feature: MA Experiment ID: 20000235 Result: Down-regulated in Transcription
  misc_feature: MA Experiment 20000235 PARAMETER Experiment Name: At_Siliques_P Parameter: Age (day) Value: 21
  misc_feature: MA Experiment 20000235 PARAMETER Experiment Name: At_Siliques_P Parameter: Organism Value: A. thaliana
  misc_feature: MA Experiment 20000235 PARAMETER Experiment Name: At_Siliques_P Parameter: Plant Line Value: WS
  misc_feature: MA Experiment 20000235 PARAMETER Experiment Name: At_Siliques_P Parameter: Tissue Value: 5-10mm Siliques vs. Whole Plant
  misc_feature: MA Experiment ID: 20000264 Result: Down-regulated in Transcription
  misc_feature: MA Experiment 20000264 PARAMETER Experiment Name: At_Open_Flower_P Parameter: Age (day) Value: 21
  misc_feature: MA Experiment 20000264 PARAMETER Experiment Name: At_Open_Flower_P Parameter: Plant Line Value: WS
  misc_feature: MA Experiment 20000264 PARAMETER Experiment Name: At_Open_Flower_P Parameter: Tissue Value: Open Flower vs. Whole Plant
  misc_feature: MA Experiment ID: 20000265 Result: Down-regulated in Transcription
  misc_feature: MA Experiment 20000265 PARAMETER Experiment Name: At_Open_Flower_P Parameter: Age (day) Value: 21
  misc_feature: MA Experiment 20000265 PARAMETER Experiment Name: At_Open_Flower_P Parameter: Plant Line Value: WS
  misc_feature: MA Experiment 20000265 PARAMETER Experiment Name: At_Open_Flower_P Parameter: Tissue Value: Closed Flower vs. Whole Plant
  misc_feature: MA Experiment ID: 20000286 Result: Down-regulated in Transcription
  misc_feature: MA Experiment 20000286 PARAMETER Experiment Name: At_Open_Flower_P Parameter: Age (day) Value: 21
  misc_feature: MA Experiment 20000286 PARAMETER Experiment Name: At_Open_Flower_P Parameter: Plant Line Value: WS
  misc_feature: MA Experiment 20000286 PARAMETER Experiment Name: At_Open_Flower_P Parameter: Tissue Value: Half Open vs. Whole Plant
  misc_feature: MA Experiment ID: 20000437 Result: Down-regulated in Transcription
  misc_feature: MA Experiment 20000437 PARAMETER Experiment Name: At_Drought_P Parameter: Age (day) Value: 8
  misc_feature: MA Experiment 20000437 PARAMETER Experiment Name: At_Drought_P Parameter: Organism Value: A. thaliana
  misc_feature: MA Experiment 20000437 PARAMETER Experiment Name: At_Drought_P Parameter: Plant Line Value: WS
  misc_feature: MA Experiment 20000437 PARAMETER Experiment Name: At_Drought_P Parameter: Timepoint (hr) Value: 24
  misc_feature: MA Experiment 20000437 PARAMETER Experiment Name: At_Drought_P Parameter: Tissue Value: Whole Plant
  misc_feature: MA Experiment 20000437 PARAMETER Experiment Name: At_Drought_P Parameter: Treatment Value: Drought vs. No Drought
  misc_feature: MA Experiment ID: 20000439 Result: Down-regulated in Transcription
  misc_feature: MA Experiment 20000439 PARAMETER Experiment Name: At_Roots__P Parameter: Age (day) Value: 14 vs. 21
  misc_feature: MA Experiment 20000439 PARAMETER Experiment Name: At_Roots__P Parameter: Organism Value: A. thaliana
  misc_feature: MA Experiment 20000439 PARAMETER Experiment Name: At_Roots__P Parameter: Tissue Value: Roots vs. Whole Plant
  misc_feature: MA Experiment ID: 20000527 Result: Up-regulated in Transcription
  misc_feature: MA Experiment 20000527 PARAMETER Experiment Name: At_10percent_PEG_P Parameter: Age (day) Value: 20
  misc_feature: MA Experiment 20000527 PARAMETER Experiment Name: At_10percent_PEG_P Parameter: Organism Value: A. thaliana
  misc_feature: MA Experiment 20000527 PARAMETER Experiment Name: At_10percent_PEG_P Parameter: Plant Line Value: WS
  misc_feature: MA Experiment 20000527 PARAMETER Experiment Name: At_10percent_PEG_P Parameter: Timepoint (day) Value: 20
  misc_feature: MA Experiment 20000527 PARAMETER Experiment Name: At_10percent_PEG_P Parameter: Tissue Value: Whole Plant
  misc_feature: MA Experiment 20000527 PARAMETER Experiment Name: At_10percent_PEG_P Parameter: Treatment Value: 10percent PEG vs. No Treatment
  misc_feature: MA Experiment ID: 20001247 Result: Up-regulated in Transcription
  misc_feature: MA Experiment 20001247 PARAMETER Experiment Name: At_Far-red-induction_P Parameter: Age (day) Value: 7
  misc_feature: MA Experiment 20001247 PARAMETER Experiment Name: At_Far-red-induction_P Parameter: Light Value: Far-red vs. White
  misc_feature: MA Experiment 20001247 PARAMETER Experiment Name: At_Far-red-induction_P Parameter: Organism Value: A. thaliana
  misc_feature: MA Experiment 20001247 PARAMETER Experiment Name: At_Far-red-induction_P Parameter: Plant Line Value: Columbia
  misc_feature: MA Experiment 20001247 PARAMETER Experiment Name: At_Far-red-induction_P Parameter: Timepoint (hr) Value: 1
  misc_feature: MA Experiment 20001247 PARAMETER Experiment Name: At_Far-red-induction_P Parameter: Tissue Value: Whole Plant
  misc_feature: MA Experiment ID: 20001557 Result: Down-regulated in Transcription
  misc_feature: MA Experiment 20001557 PARAMETER Experiment Name: At_Drought_Soil_Dry_P Parameter: Age (day) Value: 27
  misc_feature: MA Experiment 20001557 PARAMETER Experiment Name: At_Drought_Soil_Dry_P Parameter: Organism Value: A. thaliana
  misc_feature: MA Experiment 20001557 PARAMETER Experiment Name: At_Drought_Soil_Dry_P Parameter: Plant Line Value: WS
  misc_feature: MA Experiment 20001557 PARAMETER Experiment Name: At_Drought_Soil_Dry_P Parameter: Post Timepoint (hr) Value: 3
  misc_feature: MA Experiment 20001557 PARAMETER Experiment Name: At_Drought_Soil_Dry_P Parameter: Post-Treatment Value: Re-Water vs. No Drought
  misc_feature: MA Experiment 20001557 PARAMETER Experiment Name: At_Drought_Soil_Dry_P Parameter: Timepoint (day) Value: 13
  misc_feature: MA Experiment 20001557 PARAMETER Experiment Name: At_Drought_Soil_Dry_P Parameter: Treatment Value: Drought vs. No Drought
  misc_feature: MA Experiment ID: 20001904 Result: Down-regulated in Transcription
  misc_feature: MA Experiment 20001904 PARAMETER Experiment Name: At_Drought_Reproduction_P Parameter: Age (day) Value: 37
  misc_feature: MA Experiment 20001904 PARAMETER Experiment Name: At_Drought_Reproduction_P Parameter: Organism Value: A. thaliana
  misc_feature: MA Experiment 20001904 PARAMETER Experiment Name: At_Drought_Reproduction_P Parameter: Plant Line Value: WS
  misc_feature: MA Experiment 20001904 PARAMETER Experiment Name: At_Drought_Reproduction_P Parameter: Timepoint (day) Value: 7
  misc_feature: MA Experiment 20001904 PARAMETER Experiment Name: At_Drought_Reproduction_P Parameter: Tissue Value: Rosettes
  misc_feature: MA Experiment 20001904 PARAMETER Experiment Name: At_Drought_Reproduction_P Parameter: Treatment Value: Drought vs. No Drought
  misc_feature: MA Experiment ID: 20001905 Result: Down-regulated in Transcription
  misc_feature: MA Experiment 20001905 PARAMETER Experiment Name: At_Drought_Reproduction_P Parameter: Age (day) Value: 40
  misc_feature: MA Experiment 20001905 PARAMETER Experiment Name: At_Drought_Reproduction_P Parameter: Organism Value: A. thaliana
  misc_feature: MA Experiment 20001905 PARAMETER Experiment Name: At_Drought_Reproduction_P Parameter: Plant Line Value: WS
  misc_feature: MA Experiment 20001905 PARAMETER Experiment Name: At_Drought_Reproduction_P Parameter: Timepoint (day) Value: 10
  misc_feature: MA Experiment 20001905 PARAMETER Experiment Name: At_Drought_Reproduction_P Parameter: Tissue Value: Rosettes
  misc_feature: MA Experiment 20001905 PARAMETER Experiment Name: At_Drought_Reproduction_P Parameter: Treatment Value: Drought vs. No Drought
ataaggaaattagggtttttctcttcttttcttttttgtttaaaccaatctggttttacttttcaagtttggatataaacccaaatcgaatcgagaaaccataccaaaccactcagagattccgttatccatatttcccctgtttttccattaaggtaggattaatccatcaaataaaacattttgaaaatgtgctatgaatacatcaaatgagaggtttggttcatgttttattaatcaatccgaataacattacatatttgtctatattattgactcaaatatattttttcgtaatcctagagataagcttggtttacttgcaaatttcaagaggagcaccacacaaacacttgttgtgaaaataggaataagaatcaaatgtctgaagtttccctccagttgggatgtgtccacacagtttgttgtagctaacattgaagaactgaagaggagcttcagtccactgcaccggaatattcccagtgatcccattgtggttcaagtccaagataccaagtgttttagggatatcaacctttgagatatcgaactggaacatgtttcttgataagtcaatagaccaggttgttttgttggaaccaaacaacatcgaagcatcaccttggagcttgttgcgggataaatcgatccggttaaagtcgatgttgcctaatgatttgggtattggaccggagagctggttatgtgataggcgaaggtcagggactgttcctggaaacgacccaaatgactctggtatggaacctacaacataaagatcgttgtttagacaagacactgaatgatgtaataaaggaaaagatcgttctttacctgtaagtttgttcctgctaagttcaagagccaagattttaggtaacgtagagagagaacttggaatggaaccagagagatcattgaaggaaagttctaagaactcgagattcttgagctgacttataaagtcaggaattggacctgtcagattcgtccagctgagcctgagcattcggaggttcttgagtttggcgatggtgggttggattgtaccggtgaggttagagagtttgcggaagacaagggtctcaagatacggcaagtcaccgacttcagccgggatctgaccggagatctggccggagaatatggttaaggcggtaacacggtggttaacggtggcgtcgccgcactcaaggcagtaccaggagcaacagtcggtttgagggtcccatgaagcgaggtgataagggttgtttagagatttcttgatcttgaggagggtgtttttgtcattttggttacagagatctttagacaaacaggtcgtgaggaatgtgaacaagaacaagagagtggaaagtaatgtcgctgtcttatccatggtgttggttttgaattttgatggaaagtgttagtgatacatatacatactatatagtgagtgatatagacttagagagacggattcgatttgatctctgtttccacatggaccgtaataatagtcaatacatatcatatagcc

SEQ ID NO: 301 - protein, 72 aa, Arabidopsis thaliana
  peptide (1)..(72): Ceres Seq. ID no. 12385075
MFLDKSIDQVVLLEPNNIEASPWSLLRDKSIRLKSMLPNDLGIGPESWLCDRRRSGTVPGNDPNDSGMEPTT

SEQ ID NO: 302 - protein, 65 aa, Arabidopsis thaliana
  peptide (1)..(65): Ceres Seq. ID no. 12385076
KEIRVFLFFSFLFKPIWFYFSSLDINPNRIEKPYQTTQRFRYPYFPCFSIKVGLIHQIKHFENVL

SEQ ID NO: 303 - protein, 55 aa, Arabidopsis thaliana
  peptide (1)..(55): Ceres Seq. ID no. 12385077
MIWVLDRRAGYVIGEGQGLFLETTQMTLVWNLQHKDRCLDKTLNDVIKEKIVLYL

SEQ ID NO: 304 - DNA, 695 bp, Arabidopsis thaliana
  misc_feature (1)..(695): Ceres Seq. ID no. 12580203
  misc_feature: MA Experiment ID: 108434 Result: Up-regulated in Transcription
  misc_feature: MA Experiment 108434 PARAMETER Experiment Name: At_Root_Tips_cDNA_P Parameter: Tissue Value: Root Tips
  misc_feature: MA Experiment ID: 108463 Result: Down-regulated in Transcription
  misc_feature: MA Experiment 108463 PARAMETER Experiment Name: At_Germinating_Seeds_cDNA_P Parameter: Age (day) Value: 3 vs. 0
  misc_feature: MA Experiment 108463 PARAMETER Experiment Name: At_Germinating_Seeds_cDNA_P Parameter: Tissue Value: Germinating Seeds
  misc_feature: MA Experiment ID: 108561 Result: Down-regulated in Transcription
  misc_feature: MA Experiment 108561 PARAMETER Experiment Name: At_100uM_ABA_cDNA_P Parameter: Timepoint (hr) Value: 6
  misc_feature: MA Experiment 108561 PARAMETER Experiment Name: At_100uM_ABA_cDNA_P Parameter: Tissue Value: Aerial
  misc_feature: MA Experiment 108561 PARAMETER Experiment Name: At_100uM_ABA_cDNA_P Parameter: Treatment Value: 100uM ABA vs. No Treatment
  misc_feature: MA Experiment ID: 108573 Result: Down-regulated in Transcription
  misc_feature: MA Experiment 108573 PARAMETER Experiment Name: At_Drought_cDNA_P Parameter: Timepoint (hr) Value: 6
  misc_feature: MA Experiment 108573 PARAMETER Experiment Name: At_Drought_cDNA_P Parameter: Tissue Value: Aerial
  misc_feature: MA Experiment 108573 PARAMETER Experiment Name: At_Drought_cDNA_P Parameter: Treatment Value: Drought vs. No Drought
  misc_feature: MA Experiment ID: 108576 Result: Down-regulated in Transcription
  misc_feature: MA Experiment 108576 PARAMETER Experiment Name: At_42deg_Heat_cDNA_P Parameter: Temperature (deg C) Value: 42 vs. 22
  misc_feature: MA Experiment 108576 PARAMETER Experiment Name: At_42deg_Heat_cDNA_P Parameter: Timepoint (hr) Value: 1
  misc_feature: MA Experiment 108576 PARAMETER Experiment Name: At_42deg_Heat_cDNA_P Parameter: Tissue Value: Aerial
  misc_feature: MA Experiment ID: 108577 Result: Down-regulated in Transcription
  misc_feature: MA Experiment 108577 PARAMETER Experiment Name: At_42deg_Heat_cDNA_P Parameter: Temperature (deg C) Value: 42 vs. 22
  misc_feature: MA Experiment 108577 PARAMETER Experiment Name: At_42deg_Heat_cDNA_P Parameter: Timepoint (hr) Value: 6
  misc_feature: MA Experiment 108577 PARAMETER Experiment Name: At_42deg_Heat_cDNA_P Parameter: Tissue Value: Aerial
  misc_feature: MA Experiment ID: 108579 Result: Up-regulated in Transcription
  misc_feature: MA Experiment 108579 PARAMETER Experiment Name: At_4deg_Cold_cDNA_P Parameter: Temperature (deg C) Value: 4 vs. 22
  misc_feature: MA Experiment 108579 PARAMETER Experiment Name: At_4deg_Cold_cDNA_P Parameter: Timepoint (hr) Value: 6
  misc_feature: MA Experiment 108579 PARAMETER Experiment Name: At_4deg_Cold_cDNA_P Parameter: Tissue Value: Aerial
  misc_feature: MA Experiment ID: 20000184 Result: Up-regulated in Transcription
  misc_feature: MA Experiment 20000184 PARAMETER Experiment Name: At_Shoots__P Parameter: Age (day) Value: 7
  misc_feature: MA Experiment 20000184 PARAMETER Experiment Name: At_Shoots__P Parameter: Tissue Value: Shoots vs. Whole Plant
  misc_feature: MA Experiment ID: 20000185 Result: Down-regulated in Transcription
  misc_feature: MA Experiment 20000185 PARAMETER Experiment Name: At_Roots__P Parameter: Age (day) Value: 7 vs. 21
  misc_feature: MA Experiment 20000185 PARAMETER Experiment Name: At_Roots__P Parameter: Organism Value: A. thaliana
  misc_feature: MA Experiment 20000185 PARAMETER Experiment Name: At_Roots__P Parameter: Tissue Value: Roots vs. Whole Plant
  misc_feature: MA Experiment ID: 20000214 Result: Up-regulated in Transcription
  misc_feature: MA Experiment 20000214 PARAMETER Experiment Name: At_4deg_Cold_P Parameter: Timepoint (hr) Value: 6
  misc_feature: MA Experiment ID: 20000234 Result: Up-regulated in Transcription
  misc_feature: MA Experiment 20000234 PARAMETER Experiment Name: At_Siliques_P Parameter: Age (day) Value: 21
  misc_feature: MA Experiment 20000234 PARAMETER Experiment Name: At_Siliques_P Parameter: Organism Value: A. thaliana
  misc_feature: MA Experiment 20000234 PARAMETER Experiment Name: At_Siliques_P Parameter: Plant Line Value: WS
  misc_feature: MA Experiment 20000234 PARAMETER Experiment Name: At_Siliques_P Parameter: Tissue Value: Less Than 5mm Siliques vs. Whole Plant
  misc_feature: MA Experiment ID: 20000235 Result: Up-regulated in Transcription
  misc_feature: MA Experiment 20000235 PARAMETER Experiment Name: At_Siliques_P Parameter: Age (day) Value: 21
  misc_feature: MA Experiment 20000235 PARAMETER Experiment Name: At_Siliques_P Parameter: Organism Value: A. thaliana
  misc_feature: MA Experiment 20000235 PARAMETER Experiment Name: At_Siliques_P Parameter: Plant Line Value: WS
  misc_feature: MA Experiment 20000235 PARAMETER Experiment Name: At_Siliques_P Parameter: Tissue Value: 5-10mm Siliques vs. Whole Plant
  misc_feature: MA Experiment ID: 20000264 Result: Up-regulated in Transcription
  misc_feature: MA Experiment 20000264 PARAMETER Experiment Name: At_Open_Flower_P Parameter: Age (day) Value: 21
  misc_feature: MA Experiment 20000264 PARAMETER Experiment Name: At_Open_Flower_P Parameter: Plant Line Value: WS
  misc_feature: MA Experiment 20000264 PARAMETER Experiment Name: At_Open_Flower_P Parameter: Tissue Value: Open Flower vs. Whole Plant
  misc_feature: MA Experiment ID: 20000265 Result: Up-regulated in Transcription
  misc_feature: MA Experiment 20000265 PARAMETER Experiment Name: At_Open_Flower_P Parameter: Age (day) Value: 21
  misc_feature: MA Experiment 20000265 PARAMETER Experiment Name: At_Open_Flower_P Parameter: Plant Line Value: WS
  misc_feature: MA Experiment 20000265 PARAMETER Experiment Name: At_Open_Flower_P Parameter: Tissue Value: Closed Flower vs. Whole Plant
  misc_feature: MA Experiment ID: 20000286 Result: Up-regulated in Transcription
  misc_feature: MA Experiment 20000286 PARAMETER Experiment Name: At_Open_Flower_P Parameter: Age (day) Value: 21
  misc_feature: MA Experiment 20000286 PARAMETER Experiment Name: At_Open_Flower_P Parameter: Plant Line Value: WS
  misc_feature: MA Experiment 20000286 PARAMETER Experiment Name: At_Open_Flower_P Parameter: Tissue Value: Half Open vs. Whole Plant
  misc_feature: MA Experiment ID: 20000438 Result: Up-regulated in Transcription
  misc_feature: MA Experiment 20000438 PARAMETER Experiment Name: At_Shoots__P Parameter: Age (day) Value: 14
  misc_feature: MA Experiment 20000438 PARAMETER Experiment Name: At_Shoots__P Parameter: Tissue Value: Shoots vs. Whole Plant
  misc_feature: MA Experiment ID: 20000439 Result: Down-regulated in Transcription
  misc_feature: MA Experiment 20000439 PARAMETER Experiment Name: At_Roots__P Parameter: Age (day) Value: 14 vs. 21
  misc_feature: MA Experiment 20000439 PARAMETER Experiment Name: At_Roots__P Parameter: Organism Value: A. thaliana
  misc_feature: MA Experiment 20000439 PARAMETER Experiment Name: At_Roots__P Parameter: Tissue Value: Roots vs. Whole Plant
  misc_feature: MA Experiment ID: 20000441 Result: Up-regulated in Transcription
  misc_feature: MA Experiment 20000441 PARAMETER Experiment Name: At_1uM_BR-BRZ__P Parameter: Tissue Value: Shoot Apices
  misc_feature: MA Experiment 20000441 PARAMETER Experiment Name: At_1uM_BR-BRZ__P Parameter: Treatment Value: 1uM BR vs. No Treatment
  misc_feature: MA Experiment ID: 20000451 Result: Up-regulated in Transcription
  misc_feature: MA Experiment 20000451 PARAMETER Experiment Name: At_CS6879_Shoots-Roots_P Parameter: Age (day) Value: 14
  misc_feature: MA Experiment 20000451 PARAMETER Experiment Name: At_CS6879_Shoots-Roots_P Parameter: Organism Value: A. thaliana
  misc_feature: MA Experiment 20000451 PARAMETER Experiment Name: At_CS6879_Shoots-Roots_P Parameter: Plant Line Value: CS6879 vs. WS
  misc_feature: MA Experiment 20000451 PARAMETER Experiment Name: At_CS6879_Shoots-Roots_P Parameter: Tissue Value: Roots
  misc_feature: MA Experiment ID: 20000495 Result: Up-regulated in Transcription
  misc_feature: MA Experiment 20000495 PARAMETER Experiment Name: At_Guard_Cells_P Parameter: Harvest Date Value: 8/2/2002
  misc_feature: MA Experiment 20000495 PARAMETER Experiment Name: At_Guard_Cells_P Parameter: Organism Value: A. thaliana
  misc_feature: MA Experiment 20000495 PARAMETER Experiment Name: At_Guard_Cells_P Parameter: Tissue Value: Guard Cells vs. Leaves
  misc_feature: MA Experiment ID: 20000573 Result: Up-regulated in Transcription
  misc_feature: MA Experiment 20000573 PARAMETER Experiment Name: At_100uM_ABA_Mutants__P Parameter: Organism Value: A. thaliana
  misc_feature: MA Experiment 20000573 PARAMETER Experiment Name: At_100uM_ABA_Mutants__P Parameter: Plant Line Value: CS22 vs. Ler wt
  misc_feature: MA Experiment 20000573 PARAMETER Experiment Name: At_100uM_ABA_Mutants__P Parameter: Timepoint (hr) Value: N/A
  misc_feature: MA Experiment 20000573 PARAMETER Experiment Name: At_100uM_ABA_Mutants__P Parameter: Tissue Value: Whole Plant
  misc_feature: MA Experiment 20000573 PARAMETER Experiment Name: At_100uM_ABA_Mutants__P Parameter: Treatment Value: None
  misc_feature: MA Experiment ID: 20000574 Result: Up-regulated in Transcription
  misc_feature: MA Experiment 20000574 PARAMETER Experiment Name: At_100uM_ABA_Mutants__P Parameter: Organism Value: A. thaliana
  misc_feature: MA Experiment 20000574 PARAMETER Experiment Name: At_100uM_ABA_Mutants__P Parameter: Plant Line Value: CS23 vs. Ler wt
  misc_feature: MA Experiment 20000574 PARAMETER Experiment Name: At_100uM_ABA_Mutants__P Parameter: Timepoint (hr) Value: N/A
  misc_feature: MA Experiment 20000574 PARAMETER Experiment Name: At_100uM_ABA_Mutants__P Parameter: Tissue Value: Whole Plant
  misc_feature: MA Experiment 20000574 PARAMETER Experiment Name: At_100uM_ABA_Mutants__P Parameter: Treatment Value: None
  misc_feature: MA Experiment ID: 20001555 Result: Down-regulated in Transcription
  misc_feature: MA Experiment 20001555 PARAMETER Experiment Name: At_Drought_Soil_Dry_P Parameter: Age (day) Value: 24
  misc_feature: MA Experiment 20001555 PARAMETER Experiment Name: At_Drought_Soil_Dry_P Parameter: Organism Value: A. thaliana
  misc_feature: MA Experiment 20001555 PARAMETER Experiment Name: At_Drought_Soil_Dry_P Parameter: Plant Line Value: WS
  misc_feature: MA Experiment 20001555 PARAMETER Experiment Name: At_Drought_Soil_Dry_P Parameter: Post Timepoint (hr) Value: None
  misc_feature: MA Experiment 20001555 PARAMETER Experiment Name: At_Drought_Soil_Dry_P Parameter: Post-Treatment Value: None
  misc_feature: MA Experiment 20001555 PARAMETER Experiment Name: At_Drought_Soil_Dry_P Parameter: Timepoint (day) Value: 10
  misc_feature: MA Experiment 20001555 PARAMETER Experiment Name: At_Drought_Soil_Dry_P Parameter: Treatment Value: Drought vs. No Drought
  misc_feature: MA Experiment ID: 20001557 Result: Up-regulated in Transcription
  misc_feature: MA Experiment 20001557 PARAMETER Experiment Name: At_Drought_Soil_Dry_P Parameter: Age (day) Value: 27
  misc_feature: MA Experiment 20001557 PARAMETER Experiment Name: At_Drought_Soil_Dry_P Parameter: Organism Value: A. thaliana
  misc_feature: MA Experiment 20001557 PARAMETER Experiment Name: At_Drought_Soil_Dry_P Parameter: Plant Line Value: WS
  misc_feature: MA Experiment 20001557 PARAMETER Experiment Name: At_Drought_Soil_Dry_P Parameter: Post Timepoint (hr) Value: 3
  misc_feature: MA Experiment 20001557 PARAMETER Experiment Name: At_Drought_Soil_Dry_P Parameter: Post-Treatment Value: Re-Water vs. No Drought
  misc_feature: MA Experiment 20001557 PARAMETER Experiment Name: At_Drought_Soil_Dry_P Parameter: Timepoint (day) Value: 13
  misc_feature: MA Experiment 20001557 PARAMETER Experiment Name: At_Drought_Soil_Dry_P Parameter: Treatment Value: Drought vs. No Drought
  misc_feature: MA Experiment ID: 20001558 Result: Up-regulated in Transcription
  misc_feature: MA Experiment 20001558 PARAMETER Experiment Name: At_Drought_Soil_Dry_P Parameter: Age (day) Value: 27
  misc_feature: MA Experiment 20001558 PARAMETER Experiment Name: At_Drought_Soil_Dry_P Parameter: Organism Value: A. thaliana
  misc_feature: MA Experiment 20001558 PARAMETER Experiment Name: At_Drought_Soil_Dry_P Parameter: Plant Line Value: WS
  misc_feature: MA Experiment 20001558 PARAMETER Experiment Name: At_Drought_Soil_Dry_P Parameter: Post Timepoint (hr) Value: 6
  misc_feature: MA Experiment 20001558 PARAMETER Experiment Name: At_Drought_Soil_Dry_P Parameter: Post-Treatment Value: Re-Water vs. No Drought
  misc_feature: MA Experiment 20001558 PARAMETER Experiment Name: At_Drought_Soil_Dry_P Parameter: Timepoint (day) Value: 13
  misc_feature: MA Experiment 20001558 PARAMETER Experiment Name: At_Drought_Soil_Dry_P Parameter: Treatment Value: Drought vs. No Drought
  misc_feature: MA Experiment ID: 20001560 Result: Up-regulated in Transcription
  misc_feature: MA Experiment 20001560 PARAMETER Experiment Name: At_Drought_Soil_Dry_P Parameter: Age (day) Value: 28
  misc_feature: MA Experiment 20001560 PARAMETER Experiment Name: At_Drought_Soil_Dry_P Parameter: Organism Value: A. thaliana
  misc_feature: MA Experiment 20001560 PARAMETER Experiment Name: At_Drought_Soil_Dry_P Parameter: Plant Line Value: WS
  misc_feature: MA Experiment 20001560 PARAMETER Experiment Name: At_Drought_Soil_Dry_P Parameter: Post Timepoint (hr) Value: None
  misc_feature: MA Experiment 20001560 PARAMETER Experiment Name: At_Drought_Soil_Dry_P Parameter: Post-Treatment Value: None
  misc_feature: MA Experiment 20001560 PARAMETER Experiment Name: At_Drought_Soil_Dry_P Parameter: Timepoint (day) Value: 14
  misc_feature: MA Experiment 20001560 PARAMETER Experiment Name: At_Drought_Soil_Dry_P Parameter: Treatment Value: Drought vs. No Drought
  misc_feature: MA Experiment ID: 20001904 Result: Down-regulated in Transcription
  misc_feature: MA Experiment 20001904 PARAMETER Experiment Name: At_Drought_Reproduction_P Parameter: Age (day) Value: 37
  misc_feature: MA Experiment 20001904 PARAMETER Experiment Name: At_Drought_Reproduction_P Parameter: Organism Value: A. thaliana
  misc_feature: MA Experiment 20001904 PARAMETER Experiment Name: At_Drought_Reproduction_P Parameter: Plant Line Value: WS
  misc_feature: MA Experiment 20001904 PARAMETER Experiment Name: At_Drought_Reproduction_P Parameter: Timepoint (day) Value: 7
  misc_feature: MA Experiment 20001904 PARAMETER Experiment Name: At_Drought_Reproduction_P Parameter: Tissue Value: Rosettes
  misc_feature: MA Experiment 20001904 PARAMETER Experiment Name: At_Drought_Reproduction_P Parameter: Treatment Value: Drought vs. No Drought
  misc_feature: MA Experiment ID: 20001905 Result: Down-regulated in Transcription
  misc_feature: MA Experiment 20001905 PARAMETER Experiment Name: At_Drought_Reproduction_P Parameter: Age (day) Value: 40
  misc_feature: MA Experiment 20001905 PARAMETER Experiment Name: At_Drought_Reproduction_P Parameter: Organism Value: A. thaliana
  misc_feature: MA Experiment 20001905 PARAMETER Experiment Name: At_Drought_Reproduction_P Parameter: Plant Line Value: WS
  misc_feature: MA Experiment 20001905 PARAMETER Experiment Name: At_Drought_Reproduction_P Parameter: Timepoint (day) Value: 10
  misc_feature: MA Experiment 20001905 PARAMETER Experiment Name: At_Drought_Reproduction_P Parameter: Tissue Value: Rosettes
  misc_feature: MA Experiment 20001905 PARAMETER Experiment Name: At_Drought_Reproduction_P Parameter: Treatment Value: Drought vs. No Drought
  misc_feature: MA Experiment ID: 20001906 Result: Down-regulated in Transcription
  misc_feature: MA Experiment 20001906 PARAMETER Experiment Name: At_Drought_Reproduction_P Parameter: Age (day) Value: 35
  misc_feature: MA Experiment 20001906 PARAMETER Experiment Name: At_Drought_Reproduction_P Parameter: Organism Value: A. thaliana
  misc_feature: MA Experiment 20001906 PARAMETER Experiment Name: At_Drought_Reproduction_P Parameter: Plant Line Value: WS
  misc_feature: MA Experiment 20001906 PARAMETER Experiment Name: At_Drought_Reproduction_P Parameter: Timepoint (day) Value: 5
  misc_feature: MA Experiment 20001906 PARAMETER Experiment Name: At_Drought_Reproduction_P Parameter: Tissue Value: Siliques
  misc_feature: MA Experiment 20001906 PARAMETER Experiment Name: At_Drought_Reproduction_P Parameter: Treatment Value: Drought vs. No Drought
acataagtctctctcttacattttgaaaccctaatttccaccatcaccgccaacgccaactccacccgtcattacaccaccaacaccaactccacccgtcattacaccaccaacaccaacaccacccgtcgtgacacctccaacaccaacaccacccgtagtaacaccaccaacaccaactcctcctacgcctattccagagacttgcccaattgacacgctgaagctaggcgcttgtgtggacgttcttggaggtttgattcacatcggacttggaaaaagccacgccaaggcagaatgttgtccggttttaggaggtttacttgacctagacgcagccgtttgtctatgtaccaccattaagctcaaacttctcaacatcgaccttgttctccccattgctcttgagcttcttctcgactgtggaaaaactccaccatctgacttcaaatgtcccgcttaatcgatgtagaacgttgagagtctctggacgactccaaaagtttcgtttcttcaagaaatttgttagtttcatgatctatttggtaatgggaggttaatctgcatatgtgcgacctttagttacatgtttcatttgatacaataaaaggcgttgtaatttgggtttgagatctcaatttctttgggttttcttgttatgttgtacttttaagaagaagaaaaaaaaaactgtt

SEQ ID NO: 305 - DNA, 410 bp, Arabidopsis thaliana
  misc_feature (1)..(410): Ceres Seq. ID no. 12343401
  misc_feature: MA Experiment ID: 108434 Result: Up-regulated in Transcription
  misc_feature: MA Experiment 108434 PARAMETER Experiment Name: At_Root_Tips_cDNA_P Parameter: Tissue Value: Root Tips
  misc_feature: MA Experiment ID: 108461 Result: Up-regulated in Transcription
  misc_feature: MA Experiment 108461 PARAMETER Experiment Name: At_Germinating_Seeds_cDNA_P Parameter: Age (day) Value: 1 vs. 0
  misc_feature: MA Experiment 108461 PARAMETER Experiment Name: At_Germinating_Seeds_cDNA_P Parameter: Tissue Value: Germinating Seeds
  misc_feature: MA Experiment ID: 108462 Result: Up-regulated in Transcription
  misc_feature: MA Experiment 108462 PARAMETER Experiment Name: At_Germinating_Seeds_cDNA_P Parameter: Age (day) Value: 2 vs. 0
  misc_feature: MA Experiment 108462 PARAMETER Experiment Name: At_Germinating_Seeds_cDNA_P Parameter: Tissue Value: Germinating Seeds
  misc_feature: MA Experiment ID: 108464 Result: Up-regulated in Transcription
  misc_feature: MA Experiment 108464 PARAMETER Experiment Name: At_Germinating_Seeds_cDNA_P Parameter: Age (day) Value: 4 vs. 0
  misc_feature: MA Experiment 108464 PARAMETER Experiment Name: At_Germinating_Seeds_cDNA_P Parameter: Tissue Value: Germinating Seeds
  misc_feature: MA Experiment ID: 108474 Result: Down-regulated in Transcription
  misc_feature: MA Experiment 108474 PARAMETER Experiment Name: At_Drought_Flowers_cDNA_P Parameter: Timepoint (hr) Value: null
  misc_feature: MA Experiment 108474 PARAMETER Experiment Name: At_Drought_Flowers_cDNA_P Parameter: Treatment Value: Drought vs. No Drought
  misc_feature: MA Experiment ID: 108569 Result: Down-regulated in Transcription
  misc_feature: MA Experiment 108569 PARAMETER Experiment Name: At_0.001%_MeJA__cDNA_P Parameter: Timepoint (hr) Value: 6
  misc_feature: MA Experiment 108569 PARAMETER Experiment Name: At_0.001%_MeJA__cDNA_P Parameter: Tissue Value: Aerial
  misc_feature: MA Experiment 108569 PARAMETER Experiment Name: At_0.001%_MeJA__cDNA_P Parameter: Treatment Value: 0.001% MeJA vs. No Treatment
  misc_feature: MA Experiment ID: 108573 Result: Down-regulated in Transcription
  misc_feature: MA Experiment 108573 PARAMETER Experiment Name: At_Drought_cDNA_P Parameter: Timepoint (hr) Value: 6
  misc_feature: MA Experiment 108573 PARAMETER Experiment Name: At_Drought_cDNA_P Parameter: Tissue Value: Aerial
  misc_feature: MA Experiment 108573 PARAMETER Experiment Name: At_Drought_cDNA_P Parameter: Treatment Value: Drought vs. No Drought
  misc_feature: MA Experiment ID: 108577 Result: Down-regulated in Transcription
  misc_feature: MA Experiment 108577 PARAMETER Experiment Name: At_42deg_Heat_cDNA_P Parameter: Temperature (deg C) Value: 42 vs. 22
  misc_feature: MA Experiment 108577 PARAMETER Experiment Name: At_42deg_Heat_cDNA_P Parameter: Timepoint (hr) Value: 6
  misc_feature: MA Experiment 108577 PARAMETER Experiment Name: At_42deg_Heat_cDNA_P Parameter: Tissue Value: Aerial
  misc_feature: MA Experiment ID: 20000111 Result: Down-regulated in Transcription
  misc_feature: MA Experiment 20000111 PARAMETER Experiment Name: At_42deg_Heat_cDNA_P Parameter: Temperature (deg C) Value: 42 vs. 22
  misc_feature: MA Experiment 20000111 PARAMETER Experiment Name: At_42deg_Heat_cDNA_P Parameter: Timepoint (hr) Value: 6
  misc_feature: MA Experiment 20000111 PARAMETER Experiment Name: At_42deg_Heat_cDNA_P Parameter: Tissue Value: Aerial
  misc_feature: MA Experiment ID: 20000171 Result: Up-regulated in Transcription
  misc_feature: MA Experiment 20000171 PARAMETER Experiment Name: At_42deg_Heat_P Parameter: Age (day) Value: 14
  misc_feature: MA Experiment 20000171 PARAMETER Experiment Name: At_42deg_Heat_P Parameter: Organism Value: A. thaliana
  misc_feature: MA Experiment 20000171 PARAMETER Experiment Name: At_42deg_Heat_P Parameter: Plant Line Value: WS
  misc_feature: MA Experiment 20000171 PARAMETER Experiment Name: At_42deg_Heat_P Parameter: Temperature (deg C) Value: 42 vs. 22
  misc_feature: MA Experiment 20000171 PARAMETER Experiment Name: At_42deg_Heat_P Parameter: Timepoint (hr) Value: 1
  misc_feature: MA Experiment 20000171 PARAMETER Experiment Name: At_42deg_Heat_P Parameter: Tissue Value: Aerial
aacgattcttctaatttggtctcttccctcaaacacgacgacggcgttttctttcatttcttctctcgacaatccctaaaaagaattgtgtttgtgttcttctggtgatgttagggattgtcgagagaagaaagctgaggaagtgaccgaaactccggcggttgtggaggaggagaagaagacagaggtggttgaggagaaacagactgaggttgcggctgctgaggaagtcgccgttgagaaggccgaggagtaaagaggaaggaagaagctatatatgaccttttttggtctcatatcgttttctgtttattttattttatcaacatttcataagtattttctatgtttgttgggtttgttatgatgaaatcagatgtttggatcttttaatggttgctacattgttt

SEQ ID NO: 306 - protein, 35 aa, Arabidopsis thaliana
  peptide (1)..(35): Ceres Seq. ID no. 12343402
NDSSNLVSSLKHDDGVFFHFFSRQSLKRIVFVFFW

SEQ ID NO: 307 - DNA, 725 bp, Arabidopsis thaliana
  misc_feature (1)..(725): Ceres Seq. ID no. 12325825
  misc_feature: MA Experiment ID: 108463 Result: Up-regulated in Transcription
  misc_feature: MA Experiment 108463 PARAMETER Experiment Name: At_Germinating_Seeds_cDNA_P Parameter: Age (day) Value: 3 vs. 0
  misc_feature: MA Experiment 108463 PARAMETER Experiment Name: At_Germinating_Seeds_cDNA_P Parameter: Tissue Value: Germinating Seeds
  misc_feature: MA Experiment ID: 108473 Result: Up-regulated in Transcription
  misc_feature: MA Experiment 108473 PARAMETER Experiment Name: At_Drought_Flowers_cDNA_P Parameter: Timepoint (hr) Value: 7 d
  misc_feature: MA Experiment 108473 PARAMETER Experiment Name: At_Drought_Flowers_cDNA_P Parameter: Tissue Value: Flower
  misc_feature: MA Experiment 108473 PARAMETER Experiment Name: At_Drought_Flowers_cDNA_P Parameter: Treatment Value: Drought vs. No Drought
  misc_feature: MA Experiment ID: 108561 Result: Up-regulated in Transcription
  misc_feature: MA Experiment 108561 PARAMETER Experiment Name: At_100uM_ABA_cDNA_P Parameter: Timepoint (hr) Value: 6
  misc_feature: MA Experiment 108561 PARAMETER Experiment Name: At_100uM_ABA_cDNA_P Parameter: Tissue Value: Aerial
  misc_feature: MA Experiment 108561 PARAMETER Experiment Name: At_100uM_ABA_cDNA_P Parameter: Treatment Value: 100uM ABA vs. No Treatment
  misc_feature: MA Experiment ID: 108573 Result: Up-regulated in Transcription
  misc_feature: MA Experiment 108573 PARAMETER Experiment Name: At_Drought_cDNA_P Parameter: Timepoint (hr) Value: 6
  misc_feature: MA Experiment 108573 PARAMETER Experiment Name: At_Drought_cDNA_P Parameter: Tissue Value: Aerial
  misc_feature: MA Experiment 108573 PARAMETER Experiment Name: At_Drought_cDNA_P Parameter: Treatment Value: Drought vs. No Drought
  misc_feature: MA Experiment ID: 108605 Result: Up-regulated in Transcription
  misc_feature: MA Experiment 108605 PARAMETER Experiment Name: At_100uM_ABA_cDNA_P Parameter: Timepoint (hr) Value: 6
  misc_feature: MA Experiment 108605 PARAMETER Experiment Name: At_100uM_ABA_cDNA_P Parameter: Tissue Value: Aerial
  misc_feature: MA Experiment 108605 PARAMETER Experiment Name: At_100uM_ABA_cDNA_P Parameter: Treatment Value: 100uM ABA vs. No Treatment
  misc_feature: MA Experiment ID: 108607 Result: Up-regulated in Transcription
  misc_feature: MA Experiment 108607 PARAMETER Experiment Name: At_100uM_ABA_cDNA_P Parameter: Timepoint (hr) Value: 4
  misc_feature: MA Experiment 108607 PARAMETER Experiment Name: At_100uM_ABA_cDNA_P Parameter: Tissue Value: Aerial
  misc_feature: MA Experiment 108607 PARAMETER Experiment Name: At_100uM_ABA_cDNA_P Parameter: Treatment Value: 100uM ABA vs. No Treatment
  misc_feature: MA Experiment ID: 108609 Result: Up-regulated in Transcription
  misc_feature: MA Experiment 108609 PARAMETER Experiment Name: At_100uM_ABA_cDNA_P Parameter: Timepoint (hr) Value: 24
  misc_feature: MA Experiment 108609 PARAMETER Experiment Name: At_100uM_ABA_cDNA_P Parameter: Tissue Value: Aerial
  misc_feature: MA Experiment 108609 PARAMETER Experiment Name: At_100uM_ABA_cDNA_P Parameter: Treatment Value: 100uM ABA vs. No Treatment
  misc_feature: MA Experiment ID: 20000069 Result: Up-regulated in Transcription
  misc_feature: MA Experiment 20000069 PARAMETER Experiment Name: At_100uM_ABA_Mutants_cDNA_P Parameter: Plant Line Value: CS23
  misc_feature: MA Experiment 20000069 PARAMETER Experiment Name: At_100uM_ABA_Mutants_cDNA_P Parameter: Timepoint (hr) Value: 6
  misc_feature: MA Experiment 20000069 PARAMETER Experiment Name: At_100uM_ABA_Mutants_cDNA_P Parameter: Tissue Value: Aerial
  misc_feature: MA Experiment 20000069 PARAMETER Experiment Name: At_100uM_ABA_Mutants_cDNA_P Parameter: Treatment Value: 100uM ABA vs. No Treatment
  misc_feature: MA Experiment ID: 20000086 Result: Up-regulated in Transcription
  misc_feature: MA Experiment 20000086 PARAMETER Experiment Name: At_100uM_ABA_Mutants_cDNA_P Parameter: Plant Line Value: CS22
  misc_feature: MA Experiment 20000086 PARAMETER Experiment Name: At_100uM_ABA_Mutants_cDNA_P Parameter: Timepoint (hr) Value: 6
  misc_feature: MA Experiment 20000086 PARAMETER Experiment Name: At_100uM_ABA_Mutants_cDNA_P Parameter: Tissue Value: Aerial
  misc_feature: MA Experiment 20000086 PARAMETER Experiment Name: At_100uM_ABA_Mutants_cDNA_P Parameter: Treatment Value: 100uM ABA vs. No Treatment
  misc_feature: MA Experiment ID: 20000087 Result: Up-regulated in Transcription
  misc_feature: MA Experiment 20000087 PARAMETER Experiment Name: At_100uM_ABA_Mutants_cDNA_P Parameter: Plant Line Value: WS
  misc_feature: MA Experiment 20000087 PARAMETER Experiment Name: At_100uM_ABA_Mutants_cDNA_P Parameter: Timepoint (hr) Value: 6
  misc_feature: MA Experiment 20000087 PARAMETER Experiment Name: At_100uM_ABA_Mutants_cDNA_P Parameter: Tissue Value: Aerial
  misc_feature: MA Experiment 20000087 PARAMETER Experiment Name: At_100uM_ABA_Mutants_cDNA_P Parameter: Treatment Value: 100uM ABA vs. No Treatment
  misc_feature: MA Experiment ID: 20000224 Result: Up-regulated in Transcription
  misc_feature: MA Experiment ID: 20000573 Result: Up-regulated in Transcription
  misc_feature: MA Experiment 20000573 PARAMETER Experiment Name: At_100uM_ABA_Mutants__P Parameter: Organism Value: A. thaliana
  misc_feature: MA Experiment 20000573 PARAMETER Experiment Name: At_100uM_ABA_Mutants__P Parameter: Plant Line Value: CS22 vs. Ler wt
  misc_feature: MA Experiment 20000573 PARAMETER Experiment Name: At_100uM_ABA_Mutants__P Parameter: Timepoint (hr) Value: N/A
  misc_feature: MA Experiment 20000573 PARAMETER Experiment Name: At_100uM_ABA_Mutants__P Parameter: Tissue Value: Whole Plant
  misc_feature: MA Experiment 20000573 PARAMETER Experiment Name: At_100uM_ABA_Mutants__P Parameter: Treatment Value: None
  misc_feature: MA Experiment ID: 20001904 Result: Up-regulated in Transcription
  misc_feature: MA Experiment 20001904 PARAMETER Experiment Name: At_Drought_Reproduction_P Parameter: Age (day) Value: 37
  misc_feature: MA Experiment 20001904 PARAMETER Experiment Name: At_Drought_Reproduction_P Parameter: Organism Value: A. thaliana
  misc_feature: MA Experiment 20001904 PARAMETER Experiment Name: At_Drought_Reproduction_P Parameter: Plant Line Value: WS
  misc_feature: MA Experiment 20001904 PARAMETER Experiment Name: At_Drought_Reproduction_P Parameter: Timepoint (day) Value: 7
  misc_feature: MA Experiment 20001904 PARAMETER Experiment Name: At_Drought_Reproduction_P Parameter: Tissue Value: Rosettes
  misc_feature: MA Experiment 20001904 PARAMETER Experiment Name: At_Drought_Reproduction_P Parameter: Treatment Value: Drought vs. No Drought
  misc_feature: MA Experiment ID: 20001905 Result: Up-regulated in Transcription
  misc_feature: MA Experiment 20001905 PARAMETER Experiment Name: At_Drought_Reproduction_P Parameter: Age (day) Value: 40
  misc_feature: MA Experiment 20001905 PARAMETER Experiment Name: At_Drought_Reproduction_P Parameter: Organism Value: A. thaliana
  misc_feature: MA Experiment 20001905 PARAMETER Experiment Name: At_Drought_Reproduction_P Parameter: Plant Line Value: WS
  misc_feature: MA Experiment 20001905 PARAMETER Experiment Name: At_Drought_Reproduction_P Parameter: Timepoint (day) Value: 10
  misc_feature: MA Experiment 20001905 PARAMETER Experiment Name: At_Drought_Reproduction_P Parameter: Tissue Value: Rosettes
  misc_feature: MA Experiment 20001905 PARAMETER Experiment Name: At_Drought_Reproduction_P Parameter: Treatment Value: Drought vs. No Drought
attcaaaagtgtataatttggaaactggaatattctttcatgggaagtctggccgaagaaggcggcgacctccttcttcctcgtggcggtgtctccggtggtgccaaaaccggggaaggactttgcagcggtgataaaggcgttgtaagtgtagaaacctctagcgggacaagcggcatcattcctatgcttaagcatatcatcgaactgagaacttgaaatgatgcccgaaagatcgccggtgggtccaggaggagtaccaccgggagtgcactggctttggcagccaggctgcttacagtatggttcggtgttaccgcaccagccgaactcgctgcagcatagaccgttggggcagagtgctcctccagcttggcgaccacattgctcggccgaggataatgataggagaagtgaaaagatgagaaagagaaaaagattagtcttcattttgttcaatgttctatggttttctttttgtggaggcatgaaagatatatatagatccaattaatgaatgttttatcacatcaaattctatctttttccatagtttattgtttgttatgtctatggagtgtggctatggggaacaaacagtatttggtaggtttgtttttgattatatttattttccttccgtcattgttgctaggttagatattgatttgtttttttgggggattatcatgttaataattccaagtaatgagaactttctatgt

SEQ ID NO: 308 - protein, 97 aa, Arabidopsis thaliana
  peptide (1)..(97): Ceres Seq. ID no. 12325826
MMPERSPVGPGGVPPGVHWLWQPGCLQYGSVLPHQPNSLQHRPLGQSAPPAWRPHCSAEDNDRRSEKMRKRKRLVFILFNVLWFSFCGGMKDIYRSN

SEQ ID NO: 309 - protein, 96 aa, Arabidopsis thaliana
  peptide (1)..(96): Ceres Seq. ID no. 12325827
MPERSPVGPGGVPPGVHWLWQPGCLQYGSVLPHQPNSLQHRPLGQSAPPAWRPHCSAEDNDRRSEKMRKRKRLVFILFNVLWFSFCGGMKDIYRSN

SEQ ID NO: 310 - protein, 72 aa, Arabidopsis thaliana
  peptide (1)..(72): Ceres Seq. ID no. 12325828
IQKCIIWKLEYSFMGSLAEEGGDLLLPRGGVSGGAKTGEGLCSGDKGVVSVETSSGTSGIIPMLKHIIELRT

SEQ ID NO: 311 - protein, 59 aa, Arabidopsis thaliana
  peptide (1)..(59): Ceres Seq. ID no. 12325829
MGSLAEEGGDLLLPRGGVSGGAKTGEGLCSGDKGVVSVETSSGTSGIIPMLKHIIELRT

SEQ ID NO: 312 - DNA, 1211 bp, Arabidopsis thaliana
  misc_feature (1)..(1211): Ceres Seq. ID no. 12385203
  misc_feature: MA Experiment ID: 20000087 Result: Up-regulated in Transcription
  misc_feature: MA Experiment 20000087 PARAMETER Experiment Name: At_100uM_ABA_Mutants_cDNA_P Parameter: Plant Line Value: WS
  misc_feature: MA Experiment 20000087 PARAMETER Experiment Name: At_100uM_ABA_Mutants_cDNA_P Parameter: Timepoint (hr) Value: 6
  misc_feature: MA Experiment 20000087 PARAMETER Experiment Name: At_100uM_ABA_Mutants_cDNA_P Parameter: Tissue Value: Aerial
  misc_feature: MA Experiment 20000087 PARAMETER Experiment Name: At_100uM_ABA_Mutants_cDNA_P Parameter: Treatment Value: 100uM ABA vs. No Treatment
  misc_feature: MA Experiment ID: 20000111 Result: Up-regulated in Transcription
  misc_feature: MA Experiment 20000111 PARAMETER Experiment Name: At_42deg_Heat_cDNA_P Parameter: Temperature (deg C) Value: 42 vs. 22
  misc_feature: MA Experiment 20000111 PARAMETER Experiment Name: At_42deg_Heat_cDNA_P Parameter: Timepoint (hr) Value: 6
  misc_feature: MA Experiment 20000111 PARAMETER Experiment Name: At_42deg_Heat_cDNA_P Parameter: Tissue Value: Aerial
  misc_feature: MA Experiment ID: 20000112 Result: Up-regulated in Transcription
  misc_feature: MA Experiment 20000112 PARAMETER Experiment Name: At_42deg_Heat_cDNA_P Parameter: Temperature (deg C) Value: 42 vs. 22
  misc_feature: MA Experiment 20000112 PARAMETER Experiment Name: At_42deg_Heat_cDNA_P Parameter: Timepoint (hr) Value: 2
  misc_feature: MA Experiment 20000112 PARAMETER Experiment Name: At_42deg_Heat_cDNA_P Parameter: Tissue Value: Aerial
aagcttcttcttgtgtgttttactgattttgattactttaagtcctaaagggaaccaacataggcatctaatgcttgtacctcttttgcttttggtcttaattcttttctctggtggttcaggtatgttgaactgtattaaaatacaacattggtcttggcactgtgtcttgtggatcaattatggatctgcttcatagaaagataatatctttccagtttctttatcttggaaatagtacaaactccgatctcggttcttggatagagttcactaggtctttttcttttatacaagttgtgggtaagcaaatagaaatatagttgaataaacatgccaaagctaaagactttgaagatgactactgactcagagaactgtaccgtattctttttcatttcttcgtcgtgcaattacgagaaatcaggattccggttggtggaccggtcatctgaagttggcacctcccgtgcagctgataagagtaatgaatcattccaaaatgagctttgactttgaaggcaagcctaccaaactagagatcaaacggattggttccaacctcgtctcatgctttttctgcaagaatggctggaccacttgcgctgcaatcaatctattgaagaagaagagctcaatccgaagcttctcaaacttcacttctatcttcttattagggttagtgaaattcaccagcatggacaaatcgccgttgaaaaactccggcgtgtcgaagtagatcgtgtgtaggtttgcgtttgggatgtcgaaaacaggtattcttggtctaatcgcaagaaacactatcaaagtggcaatcgcaaaaaagataagcaaaaggctgaacacaaaacagaaaccggcaacacaccatatccagagactggtcctgctactccttggctgacggagaatcaccctatctttcctcggctctgcatcaagaccgttgaatctaaccgttgctggctttgttaagaccatttggccaactggtgtggattgtgtgctctgtggtgttctccatggtgtggttcttggagtataccatacagacgatggtgtttcccatgatggcgtttcgggcggttgcaactgcggtggaggaggaagatgaggtagatttggcatgagttatgtgatcaatgaaaggaaaattggaaatgtgtaatggttatggattaaataggaaaataacagaacttttgttt

SEQ ID NO: 313 - protein, 83 aa, Arabidopsis thaliana
  peptide (1)..(83): Ceres Seq. ID no. 12385204
MNHSKMSFDFEGKPTKLEIKRIGSNLVSCFFCKNGWTTCAAINLLKKKSSIRSFSNFTSIFLLGLVKFTSMDKSPLKNSGVSK

SEQ ID NO: 314 - protein, 78 aa, Arabidopsis thaliana
  peptide (1)..(78): Ceres Seq. ID no. 12385205
MSFDFEGKPTKLEIKRIGSNLVSCFFCKNGWTTCAAINLLKKKSSIRSFSNFTSIFLLGLVKFTSMDKSPLKNSGVSK

SEQ ID NO: 315 - protein, 65 aa, Arabidopsis thaliana
  peptide (1)..(65): Ceres Seq. ID no. 12385206
SFFLCVLLILITLSPKGNQHRHLMLVPLLLLVLILFSGGSGMLNCIKIQHWSWHCVLWINYGSAS

SEQ ID NO: 316 - protein, 59 aa, Arabidopsis thaliana
  peptide (1)..(59): Ceres Seq. ID no. 12385207
MLFLQEWLDHLRCNQSIEEEELNPKLLKLHFYLLIRVSEIHQHGQIAVEKLRRVEVDRV

SEQ ID NO: 317 - DNA, 1676 bp, Arabidopsis thaliana
  misc_feature (1)..(1676): Ceres Seq. ID no. 12357570
  misc_feature: MA Experiment ID: 20000173 Result: Down-regulated in Transcription
  misc_feature: MA Experiment 20000173 PARAMETER Experiment Name: At_42deg_Heat_P Parameter: Age (day) Value: 14
  misc_feature: MA Experiment 20000173 PARAMETER Experiment Name: At_42deg_Heat_P Parameter: Organism Value: A. thaliana
  misc_feature: MA Experiment 20000173 PARAMETER Experiment Name: At_42deg_Heat_P Parameter: Plant Line Value: WS
  misc_feature: MA Experiment 20000173 PARAMETER Experiment Name: At_42deg_Heat_P Parameter: Temperature (deg C) Value: 42 vs. 22
  misc_feature: MA Experiment 20000173 PARAMETER Experiment Name: At_42deg_Heat_P Parameter: Timepoint (hr) Value: 6
  misc_feature: MA Experiment 20000173 PARAMETER Experiment Name: At_42deg_Heat_P Parameter: Tissue Value: Aerial
  misc_feature: MA Experiment ID: 20000234 Result: Up-regulated in Transcription
  misc_feature: MA Experiment 20000234 PARAMETER Experiment Name: At_Siliques_P Parameter: Age (day) Value: 21
  misc_feature: MA Experiment 20000234 PARAMETER Experiment Name: At_Siliques_P Parameter: Organism Value: A. thaliana
  misc_feature: MA Experiment 20000234 PARAMETER Experiment Name: At_Siliques_P Parameter: Plant Line Value: WS
  misc_feature: MA Experiment 20000234 PARAMETER Experiment Name: At_Siliques_P Parameter: Tissue Value: Less Than 5mm Siliques vs. Whole Plant
  misc_feature: MA Experiment ID: 20000235 Result: Up-regulated in Transcription
  misc_feature: MA Experiment 20000235 PARAMETER Experiment Name: At_Siliques_P Parameter: Age (day) Value: 21
  misc_feature: MA Experiment 20000235 PARAMETER Experiment Name: At_Siliques_P Parameter: Organism Value: A. thaliana
  misc_feature: MA Experiment 20000235 PARAMETER Experiment Name: At_Siliques_P Parameter: Plant Line Value: WS
  misc_feature: MA Experiment 20000235 PARAMETER Experiment Name: At_Siliques_P Parameter: Tissue Value: 5-10mm Siliques vs. Whole Plant
  misc_feature: MA Experiment ID: 20000264 Result: Up-regulated in Transcription
  misc_feature: MA Experiment 20000264 PARAMETER Experiment Name: At_Open_Flower_P Parameter: Age (day) Value: 21
  misc_feature: MA Experiment 20000264 PARAMETER Experiment Name: At_Open_Flower_P Parameter: Plant Line Value: WS
  misc_feature: MA Experiment 20000264 PARAMETER Experiment Name: At_Open_Flower_P Parameter: Tissue Value: Open Flower vs. Whole Plant
  misc_feature: MA Experiment ID: 20000265 Result: Up-regulated in Transcription
  misc_feature: MA Experiment 20000265 PARAMETER Experiment Name: At_Open_Flower_P Parameter: Age (day) Value: 21
  misc_feature: MA Experiment 20000265 PARAMETER Experiment Name: At_Open_Flower_P Parameter: Plant Line Value: WS
  misc_feature: MA Experiment 20000265 PARAMETER Experiment Name: At_Open_Flower_P Parameter: Tissue Value: Closed Flower vs. Whole Plant
  misc_feature: MA Experiment ID: 20000286 Result: Up-regulated in Transcription
  misc_feature: MA Experiment 20000286 PARAMETER Experiment Name: At_Open_Flower_P Parameter: Age (day) Value: 21
  misc_feature: MA Experiment 20000286 PARAMETER Experiment Name: At_Open_Flower_P Parameter: Plant Line Value: WS
  misc_feature: MA Experiment 20000286 PARAMETER Experiment Name: At_Open_Flower_P Parameter: Tissue Value: Half Open vs. Whole Plant
  misc_feature: MA Experiment ID: 20000794 Result: Up-regulated in Transcription
  misc_feature: MA Experiment 20000794 PARAMETER Experiment Name: At_Petals_P Parameter: Age (day) Value: 23-25 days
  misc_feature: MA Experiment 20000794 PARAMETER Experiment Name: At_Petals_P Parameter: Plant Line Value: WS
  misc_feature: MA Experiment 20000794 PARAMETER Experiment Name: At_Petals_P Parameter: Tissue Value: Petals vs. Whole plant
  misc_feature: MA Experiment ID: 20001247 Result: Down-regulated in Transcription
  misc_feature: MA Experiment 20001247 PARAMETER Experiment Name: At_Far-red-induction_P Parameter: Age (day) Value: 7
  misc_feature: MA Experiment 20001247 PARAMETER Experiment Name: At_Far-red-induction_P Parameter: Light Value: Far-red vs. White
  misc_feature: MA Experiment 20001247 PARAMETER Experiment Name: At_Far-red-induction_P Parameter: Organism Value: A. thaliana
  misc_feature: MA Experiment 20001247 PARAMETER Experiment Name: At_Far-red-induction_P Parameter: Plant Line Value: Columbia
  misc_feature: MA Experiment 20001247 PARAMETER Experiment Name: At_Far-red-induction_P Parameter: Timepoint (hr) Value: 1
  misc_feature: MA Experiment 20001247 PARAMETER Experiment Name: At_Far-red-induction_P Parameter: Tissue Value: Whole Plant
  misc_feature: MA Experiment ID: 20001450 Result: Down-regulated in Transcription
  misc_feature: MA Experiment 20001450 PARAMETER Experiment Name: At_Far-red-induction_P Parameter: Age (day) Value: 7
  misc_feature: MA Experiment 20001450 PARAMETER Experiment Name: At_Far-red-induction_P Parameter: Light Value: Far-red vs. White
  misc_feature: MA Experiment 20001450 PARAMETER Experiment Name: At_Far-red-induction_P Parameter: Organism Value: A. thaliana
  misc_feature: MA Experiment 20001450 PARAMETER Experiment Name: At_Far-red-induction_P Parameter: Plant Line Value: Columbia
  misc_feature: MA Experiment 20001450 PARAMETER Experiment Name: At_Far-red-induction_P Parameter: Timepoint (hr) Value: 8
  misc_feature: MA Experiment 20001450 PARAMETER Experiment Name: At_Far-red-induction_P Parameter: Tissue Value: Whole Plant
  misc_feature: MA Experiment ID: 20001757 Result: Down-regulated in Transcription
  misc_feature: MA Experiment 20001757 PARAMETER Experiment Name: At_50mM_NH4NO3_L-to-H_P Parameter: Timepoint (hr) Value: 6
  misc_feature: MA Experiment 20001757 PARAMETER Experiment Name: At_50mM_NH4NO3_L-to-H_P Parameter: Tissue Value: Leaf
  misc_feature: MA Experiment 20001757 PARAMETER Experiment Name: At_50mM_NH4NO3_L-to-H_P Parameter: Treatment Value: 50mM NH4NO3 vs 100mM Mannitol
  misc_feature: MA Experiment ID: 20001905 Result: Down-regulated in Transcription
  misc_feature: MA Experiment 20001905 PARAMETER Experiment Name: At_Drought_Reproduction_P Parameter: Age (day) Value: 40
  misc_feature: MA Experiment 20001905 PARAMETER Experiment Name: At_Drought_Reproduction_P Parameter: Organism Value: A. thaliana
  misc_feature: MA Experiment 20001905 PARAMETER Experiment Name: At_Drought_Reproduction_P Parameter: Plant Line Value: WS
  misc_feature: MA Experiment 20001905 PARAMETER Experiment Name: At_Drought_Reproduction_P Parameter: Timepoint (day) Value: 10
  misc_feature: MA Experiment 20001905 PARAMETER Experiment Name: At_Drought_Reproduction_P Parameter: Tissue Value: Rosettes
  misc_feature: MA Experiment 20001905 PARAMETER Experiment Name: At_Drought_Reproduction_P Parameter: Treatment Value: Drought vs. No Drought
atcttagattcaagagatattcttagtgacgtcttgaataaactttagaagagcaacgtgcgaagatccaccgtccattaaagctaagtgactcttctcgctcatctccttcactctactcctcacgtcactatcctgctccatcaaacaccggatccctctctctatctcctctgcccatcaactcatcatccgccgccatgaaatctcctcggaaactatttcggacctccaccgctagccctagctcctcaaccatctcgaacgcgttaacttgttgctctgcgtaaagcggccacgtagccatcggaactccgaaccatagactctctagcgtcgagttccatccacaatgcgacacgaaccctccgatcgcaggatttgctagaatggcgctttgtggagcccaacctacaatctttcctatctctgccgtccgttccaagaatccttccgggagaatttcctcaagattcgtaaattcttcgggaggtcccatcgatccttttggttgagcacgacgaagagaccagacaaagcggtgaccacttcgctcaagcgcgattgcgatttctttagcttggccctcacggaaacctcccatgcttccgaaacagaggaaaacaacggatttacgtggctgctcgtctagccaccgtaggatctccgattgcttatcgtcagatgaatttggaccgttgattttaagattcataaccggtccaactgtgtacaccgtaggcagaggactatctacgccggagaaaaacttcatagcttgaggctcaagctcagcgaatgtatttaccaaaatacctttagtttctcggaatcttctggtttgtctaaacataaccggtaaccactccttggttaatagaaccgaggggaaacacttaaccggtaaaggacgagtcaaacaaggaacttccagctcagtagtgtccgagtccttgaggtcactaacgtcatagttcttaacgtcgtaaaggtattcaacatgaacttgcaatccaagaaacgttgcgttggatgtgtaaaacatgtaactgggaacaccaaactcattagcgacatcaatcatcatcatgcaaaacatatccaccacgaatccagcaagacgcgacggcgaatctggtggacccgggtcagtaagtttttccaccgtggctttgacctgcggcttgaagttatcaatgtagtcgaaaaaatgtggtttggtgtcatcggagtctggtttatcagggacggagagaacgttgtagctaagacgttcttcagaatcagaggagagagaagcgatgtaagaagaagagttactgctactaaatccatgcatctgagggatgatgatgatggtgatggagagatggtcgtcacggtcaacaagaagcttagctacctccactaatggccggagatgtccgtcaccaggtgatggttgaagatgtttcggtgaagagataagattcgtctttagcatacatgacatgtggtacttggacatctactgatgttagtttaacttttgtcacaggccatacaatcttgatcttcagacttcaacgttagtacgttacgttagtatttttttcttttaattgtcagctatatactgcactatcatacaattaaaggtaaccgacgtttaattcattgagattttgttggcatgt

SEQ ID NO: 318 - protein, 136 aa, Arabidopsis thaliana
  peptide (1)..(136): Ceres Seq. ID no. 12357571
MNLQSKKRCVGCVKHVTGNTKLISDINHHHAKHIHHESSKTRRRIWWTRVSKFFHRGFDLRLEVINVVEKMWFGVIGVWFIRDGENVVAKTFFRIRGERSDVRRRVTATKSMHLRDDDDGDGEMVVTVNKKLSYLH

SEQ ID NO: 319 - DNA, 782 bp, Arabidopsis thaliana
  misc_feature (1)..(782): Ceres Seq. ID no. 12326622
  misc_feature: MA Experiment ID: 108435 Result: Down-regulated in Transcription
  misc_feature: MA Experiment 108435 PARAMETER Experiment Name: At_stm_Mutants_cDNA_P Parameter: Plant Line Value: wt Landsburg vs stm
  misc_feature: MA Experiment 108435 PARAMETER Experiment Name: At_stm_Mutants_cDNA_P Parameter: Tissue Value: Shoot Apical Meristem Region
  misc_feature: MA Experiment ID: 108462 Result: Down-regulated in Transcription
  misc_feature: MA Experiment 108462 PARAMETER Experiment Name: At_Germinating_Seeds_cDNA_P Parameter: Age (day) Value: 2 vs. 0
  misc_feature: MA Experiment 108462 PARAMETER Experiment Name: At_Germinating_Seeds_cDNA_P Parameter: Tissue Value: Germinating Seeds
  misc_feature: MA Experiment ID: 108463 Result: Down-regulated in Transcription
  misc_feature: MA Experiment 108463 PARAMETER Experiment Name: At_Germinating_Seeds_cDNA_P Parameter: Age (day) Value: 3 vs. 0
  misc_feature: MA Experiment 108463 PARAMETER Experiment Name: At_Germinating_Seeds_cDNA_P Parameter: Tissue Value: Germinating Seeds
  misc_feature: MA Experiment ID: 108464 Result: Down-regulated in Transcription
  misc_feature: MA Experiment 108464 PARAMETER Experiment Name: At_Germinating_Seeds_cDNA_P Parameter: Age (day) Value: 4 vs. 0
  misc_feature: MA Experiment 108464 PARAMETER Experiment Name: At_Germinating_Seeds_cDNA_P Parameter: Tissue Value: Germinating Seeds
  misc_feature: MA Experiment ID: 108501 Result: Up-regulated in Transcription
  misc_feature: MA Experiment 108501 PARAMETER Experiment Name: At_ap2_floral_buds_cDNA_P Parameter: Plant Line Value: ap2 (Ler.)
  misc_feature: MA Experiment 108501 PARAMETER Experiment Name: At_ap2_floral_buds_cDNA_P Parameter: Tissue Value: Closed Flower
  misc_feature: MA Experiment ID: 108573 Result: Down-regulated in Transcription
  misc_feature: MA Experiment 108573 PARAMETER Experiment Name: At_Drought_cDNA_P Parameter: Timepoint (hr) Value: 6
  misc_feature: MA Experiment 108573 PARAMETER Experiment Name: At_Drought_cDNA_P Parameter: Tissue Value: Aerial
  misc_feature: MA Experiment 108573 PARAMETER Experiment Name: At_Drought_cDNA_P Parameter: Treatment Value: Drought vs. No Drought
  misc_feature: MA Experiment ID: 108579 Result: Up-regulated in Transcription
  misc_feature: MA Experiment 108579 PARAMETER Experiment Name: At_4deg_Cold_cDNA_P Parameter: Temperature (deg C) Value: 4 vs. 22
  misc_feature: MA Experiment 108579 PARAMETER Experiment Name: At_4deg_Cold_cDNA_P Parameter: Timepoint (hr) Value: 6
  misc_feature: MA Experiment 108579 PARAMETER Experiment Name: At_4deg_Cold_cDNA_P Parameter: Tissue Value: Aerial
  misc_feature: MA Experiment ID: 108585 Result: Down-regulated in Transcription
  misc_feature: MA Experiment 108585 PARAMETER Experiment Name: At_5mM_NaNP_cDNA_P Parameter: Timepoint (hr) Value: 6
  misc_feature: MA Experiment 108585 PARAMETER Experiment Name: At_5mM_NaNP_cDNA_P Parameter: Tissue Value: Aerial
  misc_feature: MA Experiment 108585 PARAMETER Experiment Name: At_5mM_NaNP_cDNA_P Parameter: Treatment Value: null
  misc_feature: MA Experiment ID: 108668 Result: Down-regulated in Transcription
  misc_feature: MA Experiment 108668 PARAMETER Experiment Name: At_2mM_SA_cDNA_P Parameter: Plant Line Value: WS
  misc_feature: MA Experiment 108668 PARAMETER Experiment Name: At_2mM_SA_cDNA_P Parameter: Timepoint (hr) Value: 6
  misc_feature: MA Experiment 108668 PARAMETER Experiment Name: At_2mM_SA_cDNA_P Parameter: Treatment Value: 2mM SA vs. No Treatment
  misc_feature: MA Experiment ID: 20000184 Result: Up-regulated in Transcription
  misc_feature: MA Experiment 20000184 PARAMETER Experiment Name: At_Shoots__P Parameter: Age (day) Value: 7
  misc_feature: MA Experiment 20000184 PARAMETER Experiment Name: At_Shoots__P Parameter: Tissue Value: Shoots vs. Whole Plant
  misc_feature: MA Experiment ID: 20000224 Result: Up-regulated in Transcription
  misc_feature: MA Experiment ID: 20001451 Result: Up-regulated in Transcription
  misc_feature: MA Experiment 20001451 PARAMETER Experiment Name: At_Far-red-induction_P Parameter: Age (day) Value: 7
  misc_feature: MA Experiment 20001451 PARAMETER Experiment Name: At_Far-red-induction_P Parameter: Light Value: Far-red vs. White
  misc_feature: MA Experiment 20001451 PARAMETER Experiment Name: At_Far-red-induction_P Parameter: Organism Value: A. thaliana
  misc_feature: MA Experiment 20001451 PARAMETER Experiment Name: At_Far-red-induction_P Parameter: Plant Line Value: Columbia
  misc_feature: MA Experiment 20001451 PARAMETER Experiment Name: At_Far-red-induction_P Parameter: Timepoint (hr) Value: 24
  misc_feature: MA Experiment 20001451 PARAMETER Experiment Name: At_Far-red-induction_P Parameter: Tissue Value: Whole Plant
aatccattctcatcttcctcttcttccttcttcttaatctctcttcttcttaccatttctcctctctcttcttcttcttcgttcgtcttccttaacctaggaatccgaccacctttgcttgtccctaaaagctcaaaattgattttgctccaaccaatcttatcttcattatcccaaccaaatctctcactaatctccaacaacatcgaaacagagtttacctcttctctactcttccttacagaagttaaagctctcatgctctcatcacttccatggaggattttctctgcaaattcccactcagttctatctttataaacatcgtcttcgagcacttcatcagcaagctttgcccaatactcagaatctcctgcacgaagattctttgagacccatttaagataagaagaaggcaaagtaccaagcattttgcccttgtgtttgccgaagtctatgattgtgtctctggcggctagggtttcgatgatttgaagttttttgattaagggtttagattgattggtggagaagataccattagatgaagaaagatttcttcttggtctgaaagatgatgatgatgatgagattctgaagatggtttttgttgttactgcagcagagtgaggactgtggaacaagaccaccgagaaactcattgttgtgtccccaaaatattgtctattttttcttgaatcctataaaatacatttagggggtgttattcgttaatagattttaatagaattgaaatccaacacactaattcactgttatcc

SEQ ID NO: 320 - protein, 106 aa, Arabidopsis thaliana
  peptide (1)..(106): Ceres Seq. ID no. 12326623
NPFSSSSSSFFLISLLLTISPLSSSSSFVFLNLGIRPPLLVPKSSKLILLQPILSSLSQPNLSLISNNIETEFTSSLLFLTEVKALMLSSLPWRIFSANSHSVLSL

SEQ ID NO: 321 - DNA, 457 bp, Arabidopsis thaliana
  misc_feature (1)..(457): Ceres Seq. ID no. 13503849
  misc_feature: MA Experiment ID: 20000180 Result: Up-regulated in Transcription
  misc_feature: MA Experiment 20000180 PARAMETER Experiment Name: At_Germinating_Seeds_P Parameter: Age (hr) Value: 24 vs. 0
  misc_feature: MA Experiment 20000180 PARAMETER Experiment Name: At_Germinating_Seeds_P Parameter: Tissue Value: Germinating Seeds
  misc_feature: MA Experiment ID: 20000185 Result: Down-regulated in Transcription
  misc_feature: MA Experiment 20000185 PARAMETER Experiment Name: At_Roots__P Parameter: Age (day) Value: 7 vs. 21
  misc_feature: MA Experiment 20000185 PARAMETER Experiment Name: At_Roots__P Parameter: Organism Value: A. thaliana
  misc_feature: MA Experiment 20000185 PARAMETER Experiment Name: At_Roots__P Parameter: Tissue Value: Roots vs. Whole Plant
  misc_feature: MA Experiment ID: 20000264 Result: Down-regulated in Transcription
  misc_feature: MA Experiment 20000264 PARAMETER Experiment Name: At_Open_Flower_P Parameter: Age (day) Value: 21
  misc_feature: MA Experiment 20000264 PARAMETER Experiment Name: At_Open_Flower_P Parameter: Plant Line Value: WS
  misc_feature: MA Experiment 20000264 PARAMETER Experiment Name: At_Open_Flower_P Parameter: Tissue Value: Open Flower vs. Whole Plant
  misc_feature: MA Experiment ID: 20000286 Result: Down-regulated in Transcription
  misc_feature: MA Experiment 20000286 PARAMETER Experiment Name: At_Open_Flower_P Parameter: Age (day) Value: 21
  misc_feature: MA Experiment 20000286 PARAMETER Experiment Name: At_Open_Flower_P Parameter: Plant Line Value: WS
  misc_feature: MA Experiment 20000286 PARAMETER Experiment Name: At_Open_Flower_P Parameter: Tissue Value: Half Open vs. Whole Plant
  misc_feature: MA Experiment ID: 20000438 Result: Up-regulated in Transcription
  misc_feature: MA Experiment 20000438 PARAMETER Experiment Name: At_Shoots__P Parameter: Age (day) Value: 14
  misc_feature: MA Experiment 20000438 PARAMETER Experiment Name: At_Shoots__P Parameter: Tissue Value: Shoots vs. Whole Plant
  misc_feature: MA Experiment ID: 20000439 Result: Down-regulated in Transcription
  misc_feature: MA Experiment 20000439 PARAMETER Experiment Name: At_Roots__P Parameter: Age (day) Value: 14 vs. 21
  misc_feature: MA Experiment 20000439 PARAMETER Experiment Name: At_Roots__P Parameter: Organism Value: A. thaliana
  misc_feature: MA Experiment 20000439 PARAMETER Experiment Name: At_Roots__P Parameter: Tissue Value: Roots vs. Whole Plant
  misc_feature: MA Experiment ID: 20000794 Result: Down-regulated in Transcription
  misc_feature: MA Experiment 20000794 PARAMETER Experiment Name: At_Petals_P Parameter: Age (day) Value: 23-25 days
  misc_feature: MA Experiment 20000794 PARAMETER Experiment Name: At_Petals_P Parameter: Plant Line Value: WS
  misc_feature: MA Experiment 20000794 PARAMETER Experiment Name: At_Petals_P Parameter: Tissue Value: Petals vs. Whole plant
  misc_feature: MA Experiment ID: 20001451 Result: Down-regulated in Transcription
  misc_feature: MA Experiment 20001451 PARAMETER Experiment Name: At_Far-red-induction_P Parameter: Age (day) Value: 7
  misc_feature: MA Experiment 20001451 PARAMETER Experiment Name: At_Far-red-induction_P Parameter: Light Value: Far-red vs. White
  misc_feature: MA Experiment 20001451 PARAMETER Experiment Name: At_Far-red-induction_P Parameter: Organism Value: A. thaliana
  misc_feature: MA Experiment 20001451 PARAMETER Experiment Name: At_Far-red-induction_P Parameter: Plant Line Value: Columbia
  misc_feature: MA Experiment 20001451 PARAMETER Experiment Name: At_Far-red-induction_P Parameter: Timepoint (hr) Value: 24
  misc_feature: MA Experiment 20001451 PARAMETER Experiment Name: At_Far-red-induction_P Parameter: Tissue Value: Whole Plant
  misc_feature: MA Experiment ID: 20001557 Result: Down-regulated in Transcription
  misc_feature: MA Experiment 20001557 PARAMETER Experiment Name: At_Drought_Soil_Dry_P Parameter: Age (day) Value: 27
  misc_feature: MA Experiment 20001557 PARAMETER Experiment Name: At_Drought_Soil_Dry_P Parameter: Organism Value: A. thaliana
  misc_feature: MA Experiment 20001557 PARAMETER Experiment Name: At_Drought_Soil_Dry_P Parameter: Plant Line Value: WS
  misc_feature: MA Experiment 20001557 PARAMETER Experiment Name: At_Drought_Soil_Dry_P Parameter: Post Timepoint (hr) Value: 3
  misc_feature: MA Experiment 20001557 PARAMETER Experiment Name: At_Drought_Soil_Dry_P Parameter: Post-Treatment Value: Re-Water vs. No Drought
  misc_feature: MA Experiment 20001557 PARAMETER Experiment Name: At_Drought_Soil_Dry_P Parameter: Timepoint (day) Value: 13
  misc_feature: MA Experiment 20001557 PARAMETER Experiment Name: At_Drought_Soil_Dry_P Parameter: Treatment Value: Drought vs. No Drought
  misc_feature: MA Experiment ID: 20001757 Result: Up-regulated in Transcription
  misc_feature: MA Experiment 20001757 PARAMETER Experiment Name: At_50mM_NH4NO3_L-to-H_P Parameter: Timepoint (hr) Value: 6
  misc_feature: MA Experiment 20001757 PARAMETER Experiment Name: At_50mM_NH4NO3_L-to-H_P Parameter: Tissue Value: Leaf
  misc_feature: MA Experiment 20001757 PARAMETER Experiment Name: At_50mM_NH4NO3_L-to-H_P Parameter: Treatment Value: 50mM NH4NO3 vs 100mM Mannitol
  misc_feature: MA Experiment ID: 20001905 Result: Down-regulated in Transcription
  misc_feature: MA Experiment 20001905 PARAMETER Experiment Name: At_Drought_Reproduction_P Parameter: Age (day) Value: 40
  misc_feature: MA Experiment 20001905 PARAMETER Experiment Name: At_Drought_Reproduction_P Parameter: Organism Value: A. thaliana
  misc_feature: MA Experiment 20001905 PARAMETER Experiment Name: At_Drought_Reproduction_P Parameter: Plant Line Value: WS
  misc_feature: MA Experiment 20001905 PARAMETER Experiment Name: At_Drought_Reproduction_P Parameter: Timepoint (day) Value: 10
  misc_feature: MA Experiment 20001905 PARAMETER Experiment Name: At_Drought_Reproduction_P Parameter: Tissue Value: Rosettes
  misc_feature: MA Experiment 20001905 PARAMETER Experiment Name: At_Drought_Reproduction_P Parameter: Treatment Value: Drought vs. No Drought
  misc_feature: MA Experiment ID: 20001906 Result: Down-regulated in Transcription
  misc_feature: MA Experiment 20001906 PARAMETER Experiment Name: At_Drought_Reproduction_P Parameter: Age (day) Value: 35
  misc_feature: MA Experiment 20001906 PARAMETER Experiment Name: At_Drought_Reproduction_P Parameter: Organism Value: A. thaliana
  misc_feature: MA Experiment 20001906 PARAMETER Experiment Name: At_Drought_Reproduction_P Parameter: Plant Line Value: WS
  misc_feature: MA Experiment 20001906 PARAMETER Experiment Name: At_Drought_Reproduction_P Parameter: Timepoint (day) Value: 5
  misc_feature: MA Experiment 20001906 PARAMETER Experiment Name: At_Drought_Reproduction_P Parameter: Tissue Value: Siliques
  misc_feature: MA Experiment 20001906 PARAMETER Experiment Name: At_Drought_Reproduction_P Parameter: Treatment Value: Drought vs. No Drought
  misc_feature: MA Experiment ID: 20001908 Result: Down-regulated in Transcription
  misc_feature: MA Experiment 20001908 PARAMETER Experiment Name: At_Drought_Reproduction_P Parameter: Age (day) Value: 40
  misc_feature: MA Experiment 20001908 PARAMETER Experiment Name: At_Drought_Reproduction_P Parameter: Organism Value: A. thaliana
  misc_feature: MA Experiment 20001908 PARAMETER Experiment Name: At_Drought_Reproduction_P Parameter: Plant Line Value: WS
  misc_feature: MA Experiment 20001908 PARAMETER Experiment Name: At_Drought_Reproduction_P Parameter: Timepoint (day) Value: 10
  misc_feature: MA Experiment 20001908 PARAMETER Experiment Name: At_Drought_Reproduction_P Parameter: Tissue Value: Siliques
  misc_feature: MA Experiment 20001908 PARAMETER Experiment Name: At_Drought_Reproduction_P Parameter: Treatment Value: Drought vs. No Drought
actgaaattttttcaacttccagagagagaacgtagcaaaacagggcttaccggagcagaacggaaaaacccatttcgaagctggagatgatcgtgctaaggagtacgtcagtctcttgaaatcgaacgatccaattggattcaacattgttgatgttcttgcttggggttctattggacacatcgttgcttactacatcttggctacttccagcaatggatacgacccaagcttctttggatgattcgtttcaatgtcaatctctcgtatatgtatatgtatatgtttgacttgtgttgcaagctatctaatctgttctctatctctgtttcttcttctgttgttgttgttgttgtctaagacttgtccctctttttgcaaatgttttatttctccatttacaaatattggtttgcagagttttataagaagaacataatagtatatacactatgc

SEQ ID NO: 322 - protein, 61 aa, Arabidopsis thaliana
  peptide (1)..(61): Ceres Seq. ID no. 13503850
MSISRICICICLTCVASYLICSLSLFLLLLLLLLSKTCPSFCKCFISPFTNIGLQSFIRRT

SEQ ID NO: 323 - protein, 45 aa, Arabidopsis thaliana
  peptide (1)..(45): Ceres Seq. ID no. 13503851
MFLLGVLLDTSLLTTSWLLPAMDTTQASLDDSFQCQSLVYVYVYV

SEQ ID NO: 324 - protein, 39 aa, Arabidopsis thaliana
  peptide (1)..(39): Ceres Seq. ID no. 13503852
MIRFNVNLSYMYMYMFDLCCKLSNLFSISVSSSVVVVVV

SEQ ID NO: 325 - DNA, 629 bp, Zea mays subsp. mays
  misc_feature (1)..(629): Ceres Seq. ID no. 12589744
  misc_feature: MA Experiment ID: 108689 Result: Down-regulated in Transcription
  misc_feature: MA Experiment 108689 PARAMETER Experiment Name: Zm_Drought_Roots_P Parameter: Age (day) Value: 9
  misc_feature: MA Experiment 108689 PARAMETER Experiment Name: Zm_Drought_Roots_P Parameter: Organism Value: Zea mays
  misc_feature: MA Experiment 108689 PARAMETER Experiment Name: Zm_Drought_Roots_P Parameter: Plant Line Value: 35A19
  misc_feature: MA Experiment 108689 PARAMETER Experiment Name: Zm_Drought_Roots_P Parameter: Timepoint (hr) Value: 24
  misc_feature: MA Experiment 108689 PARAMETER Experiment Name: Zm_Drought_Roots_P Parameter: Tissue Value: Roots
  misc_feature: MA Experiment 108689 PARAMETER Experiment Name: Zm_Drought_Roots_P Parameter: Treatment Value: Drought vs. No Drought
acaactttcgcgacgtctgcgacatcagaaaactgagctcgccccctcttgccttccctcctccgccggaccgctgctgtccgcctccaaccctccagttcgacgcaggcggcgacggcggcgcgccgagatgaaggtctccgtgaagacgctcaagggatctagcttccagatcgaagtggagcccaccgacaaggtactcatcggttgcgctcccgatctgtcgctatgtttctagttgctgatgtattggcggggctgcttcgctagatttggctgctttttaggtttgtttggggtctaggatttggttggttccgctgtggaggagatgagagtattggaagccgcgggcgaagctgccgtggatccaatctgtaggttgctgatttggttccggtggtgcgtgtggaacaggcggaacggagagctgttgcagacttcgcctgtggattttctggtttcaatttgggttttttcttggatacatgaatcagatgacaaggtgaagttatcaggcattgtagttggtagatagagcataggttgcagtcaatctatcgtcgctgtcctacatctcttcaggttgtgtgtttaattgaataaagagtaaggcaacacgatacttc

SEQ ID NO: 326 - protein, 78 aa, Zea mays subsp. mays
  peptide (1)..(78): Ceres Seq. ID no. 12589745
QLSRRLRHQKTELAPSCLPSSAGPLLSASNPPVRRRRRRRRAEMKVSVKTLKGSSFQIEVEPTDKVLIGCAPDLSLCF

SEQ ID NO: 327 - protein, 68 aa, Zea mays subsp. mays
  peptide (1)..(68): Ceres Seq. ID no. 12589746
MRVLEAAGEAAVDPICRLLIWFRWCVWNRRNGELLQTSPVDFLVSIWVFSWIHESDDKVKLSGIVVGR

SEQ ID NO: 328 - protein, 43 aa, Zea mays subsp. mays
  peptide (1)..(43): Ceres Seq. ID no. 12589747
NFRDVCDIRKLSSPPLAFPPPPDRCCPPPTLQFDAGGDGGAPR

SEQ ID NO: 329 - DNA, 735 bp, Zea mays subsp. mays
  misc_feature (1)..(735): Ceres Seq. ID no. 15225657
ttttttttttttttttagaaaaccatatttcaaatagacattttcattgtaataattgattataaccgctggctgaatcatacagagttatctcaaccaaacttaacaaagagctctccattgattaaagtaaagacagacagcaaaacaagcttcaattctactaaaaaccaagatgaattaacccaccaaacatccatcagtctctgcaactagatacctcaggcatagttcaacctgaatatgtcgttgaacacgtagtagtttccctgattcgataccaaatggaacatctggctgaacttgagagcgtgctgttcgcccgcgagctgaagattaccggagacaaagacgagcatgccggcggcgggaccagagggctggcaatcgacggtggtgatgttgtgcttgcactgctggaaaggaaggctggtgagcttggcgacgatgttctgagagccctggatcttctgcccttcgaaggtcagcatggatccttcttggtaaagagagaccaatcctccacgattcgaatcgaaggtggtgtagtagtgctccacgaaagccttcgctactgcgtctggatccatctctctcgtcttcctctctctttctctttctctttccgtcgtcctttcaaagagtctagagagagaaacgaaacggaaagggtgagatgataaaactgaaaatttccagtttttcgattaggatgttctaggtaatggtctcgtg

SEQ ID NO: 330 - protein, 131 aa, Zea mays subsp. mays
  peptide (1)..(131): Ceres Seq. ID no. 15225658
MEHLAELESVLFARELKITGDKDEHAGGGTRGLAIDGGDVVLALLERKAGELGDDVLRALDLLPFEGQHGSFLVKRDQSSTIRIEGGVVVLHESLRYCVWIHLSRLPLSFSFSFRRPFKESRERNETERVR

SEQ ID NO: 331 - DNA, 723 bp, Zea mays subsp. mays
  misc_feature (1)..(723): Ceres Seq. ID no. 13587131
agattcaaataaaatgagataagtaagtatacaaacaaaaaatttcataatctgcataaaaatctcttttgagtgcaatatatcagatagggtgcaagactgtaataaaaacttgtgacgaaacaaaagtcgaaacaattaaaaaagataagtgcagagatgaatgagggctaatctattcaacgtctgccaccaccaccacccaacttagcagccttgggtgcggcagtcttggggatgctgcccttgattttttgttgcttggaagcaaactcggccttctttgccttcttctcatccttggtcttcttgattctctccttaatgtcacgaagggcggcttctctggctgcatcacgaacttcaggcttctctgcacgcttcttctgaatgacctccaaagtagcaccaacgatggaccttgagtaaggcttcttggttgcacgtctcctcttcttcacagcctcttgagcagcatccttcttgtgctgtttacggtacatagtggtccatgcaagcttggaaggcttcaacttattgtgaaaataatgcttacatttcgagttgatgaacaaaaacacctgagagtcagatctgatgaatctgatacccctgcctgggtaaatcttgtggccactgaatcggcaaagctcagtcttgagaaccatggctccgccgccgcgcttaaacttttttttttttacactggaagccctaaaaatc

SEQ ID NO: 332 - protein, 58 aa, Zea mays subsp. mays
  peptide (1)..(58): Ceres Seq. ID no. 13587132
MLTFRVDEQKHLRVRSDESDTPAWVNLVATESAKLSLENHGSAAALKLFFFYTGSPKN

SEQ ID NO: 333 - protein, 50 aa, Zea mays subsp. mays
  peptide (1)..(50): Ceres Seq. ID no. 13587133
MLPLIFCCLEANSAFFAFFSSLVFLILSLMSRRAASLAASRTSGFSARFF

SEQ ID NO: 334 - DNA, 818 bp, Zea mays subsp. mays
  misc_feature (1)..(818): Ceres Seq. ID no. 13599506
gaatgaatattctgcaaattacatttcatcaaacaaatacaagtgttacacatgcttaatcaaattactgttcattcacacacgcacacccaatcgtatgtatctcttgtagtacgacacagccaaactaagacaaattaatctcaccaaaccagtgcatataaattaacacacgcaagaaaaactacttaacaaccgaccgatatattattgcatgatgaaatcaaatttggaatgaacaactaaaataacggatgcactgacgatgcatgcatgcgctgagtgatggacgatttgctgatgaattaagcgcactggaagcccttgggggcggtcttgccgcagtagttgaggaggaggctgagcttgatggggatgttgaggacgatgccgaggacgttggccttgagcgcggtgcagaggcacacggcggcctcaaggtcggccaggccgccgaggaggctgcagcacttgtcgccgccgccgctgggggcggtgccgacgcccgcgctcactaggcccagcacgttggcgcaggcgcccagcttcagtgtgtccgtggggcagtaccccgtgccgcccgatgacggcggtggcgggcatggcgtcggggtagcaggcgctggcgggggcggggacggggacgccgggggaggggtgtggtgcttgcagctgttgcacgcgtcgccggccaggaacgtgctggccaccagcagcgccagcaggcacgccgccgaggtcctggacgccattgctgccggctaagctagctagctagtgctggcgagagtgagctaggagggtttagtaggtctaat

SEQ ID NO: 335 - protein, 131 aa, Zea mays subsp. mays
  peptide (1)..(131): Ceres Seq. ID no. 13599507
MGMLRTMPRTLALSAVQRHTAASRSARPPRRLQHLSPPPLGAVPTPALTRPSTLAQAPSFSVSVGQYPVPPDDGGGGHGVGVAGAGGGGDGDAGGGVWCLQLLHASPARNVLATSSASRHAAEVLDAIAAG

SEQ ID NO: 336 - protein, 129 aa, Zea mays subsp. mays
  peptide (1)..(129): Ceres Seq. ID no. 13599508
MLRTMPRTLALSAVQRHTAASRSARPPRRLQHLSPPPLGAVPTPALTRPSTLAQAPSFSVSVGQYPVPPDDGGGGHGVGVAGAGGGGDGDAGGGVWCLQLLHASPARNVLATSSASRHAAEVLDAIAAG

SEQ ID NO: 337 - protein, 125 aa, Zea mays subsp. mays
  peptide (1)..(125): Ceres Seq. ID no. 13599509
MPRTLALSAVQRHTAASRSARPPRRLQHLSPPPLGAVPTPALTRPSTLAQAPSFSVSVGQYPVPPDDGGGGHGVGVAGAGGGGDGDAGGGVWCLQLLHASPARNVLATSSASRHAAEVLDAIAAG

SEQ ID NO: 338 - DNA, 671 bp, Zea mays subsp. mays
  misc_feature (1)..(671): Ceres Seq. ID no. 13599287
aacgagaagacaccattgtttattaaaaaaagcagattcagagaataagagtttggaacattgtgggattcttaagaacaaaacaaagatttagataaaacggttctttaaacttgtgatgatgatcaagatgaagcctgtcccaacagagtttgaatgtctttctcgaattgaagaggagaggttctaggagaatatctctgggagactttgccgtcaggagaaaccaagaactttgtgaagttccatttgattgcgtcaataagcaaacctcctttctctgctttcaagtatttgtataatggcgccgtgttcttcccgttcacatccaccttgtcaaagatggggaactcagctttgaactttgtgcagacagtttgttggatctcttcattgtttcctggttcctgtcccaagaactgattgcacggaaacgctaaaatctccaacccttggtccttgtatttatcgtacagaacattcagttccttgtagtttgcatccgtcagaccacatttggaggcaacgtttacaatcaaaagagttttgcctttgaattggctcaaactcacatctttaccttcaatatccttaacggtgaagtcgtagatagactgtggagattcctccgccattttggtctctctagttttctctttgcttttagtttt

SEQ ID NO: 339 - protein, 30 aa, Zea mays subsp. mays
  peptide (1)..(30): Ceres Seq. ID no. 13599288
TRRHHCLLKKADSENKSLEHCGILKNKTKI

SEQ ID NO: 340 - DNA, 733 bp, Zea mays subsp. mays
  misc_feature (1)..(733): Ceres Seq. ID no. 12635643
gaaacgtttcacccagtttcactgtttatttatctttagtctttctttactactccaaaagtcaaaccaaaacgaagtaattgttgataacttagaaagaagcaaaactaaaagcatccaatgattaaaaagcaaacgcacatagacattttattcgtagaggaactctgaagctaaacggttggagaatagagaatcaatcacagctcgtcagctccatatgtgtcgtctacatcttcttcttcttgttcttgttctccaccagctggtttttcatttaccgcgataagctctgtgtcaaatatcagtgttgccccaccggggatggttggaggagagccctgttcaccatatccaagtttagcaggtatctttaacttcctcttctctcctacacacgcacctagcaatccttgatcccagcctttgataacctgaccacttcctaactcaaactcgaacggttcatccctttcaaagctcgaatcgaatactgttccatcagtaagtttccccctgtagtgcaccttgatcatatcacctttgtgagccttcacttcacacgttgctggcttaaacttaacaccgatctgcaattccgacacatctcctgtcttcttggcaaaaccttggagtgaaatgagagagaataagatcaagcaaagggagtaacggagacacatcttaactctctcgccaaaaaaatcgcttcgtttagttccgtttgattttt

SEQ ID NO: 341 - protein, 40 aa, Zea mays subsp. mays
  peptide (1)..(40): Ceres Seq. ID no. 12635644
KRFTQFHCLFIFSLSLLLQKSNQNEVIVDNLERSKTKSIQ

SEQ ID NO: 342 - protein, 30 aa, Zea mays subsp. mays
  peptide (1)..(30): Ceres Seq. ID no. 12635645
MVGGEPCSPYPSLAGIFNFLFSPTHAPSNP

SEQ ID NO: 343 - DNA, 707 bp, Zea mays subsp. mays
  misc_feature (1)..(707): Ceres Seq. ID no. 13599533
ctttattgtgtttaaacatcgacggtatcgataagcttttttttttttttttttcttttttttttttttatcaatacgaagagtatatgcttgtttgccaagaaaagcagaactggttacacaatcgaaatgtgggagtggagcagatccacatttgatgaaataaaaaacaaagcacggaaagcaaatcttattcggcgcccaagcaacagtacgtccattaatgggctgggcaagtgaaaccagacgggcacttcttgccgcagtggttgaggaggagtctgatgtccacaggcacgttgaggcggaggccgagaatgtcggccctgacggcggtgcagaggcagacggcggcgtcgaggtcggccaacccctggagcagcgggcagcactggtcgtgcgccggaacgccgaccttgaggccgagcagccggccgagaactttagcgcacaccctcaggttgagcacgttgattgagcactgcccagcgccgtggccgtggccgtgccctcctccatggtatggcggcggaacgacgatgggtggtgtcggcacgacgaccggcggttggcaatagatgcttccgcagccgtgggcggcgacggcagagaggagaaggctcagggcgacgaagagggcagcgttggatgacattgtgattgtgtggcgtgctagagtaatatagctagtgctttgggtttgggat

SEQ ID NO: 344 - protein, 97 aa, Zea mays subsp. mays
  peptide (1)..(97): Ceres Seq. ID no. 13599534
MSTGTLRRRPRMSALTAVQRQTAASRSANPWSSGQHWSCAGTPTLRPSSRPRTLAHTLRLSTLIEHCPAPWPWPCPPPWYGGGTTMGGVGTTTGGWQ

SEQ ID NO: 345 - protein, 86 aa, Zea mays subsp. mays
  peptide (1)..(86): Ceres Seq. ID no. 13599535
MSALTAVQRQTAASRSANPWSSGQHWSCAGTPTLRPSSRPRTLAHTLRLSTLIEHCPAPWPWPCPPPWYGGGTTMGGVGTTTGGWQ

SEQ ID NO: 346 - protein, 84 aa, Zea mays subsp. mays
  peptide (1)..(84): Ceres Seq. ID no. 13599536
MGWASETRRALLAAVVEEESDVHRHVEAEAENVGPDGGAEADGGVEVGQPLEQRAALVVRRNADLEAEQPAENFSAHPQVEHVD

SEQ ID NO: 347 - DNA, 650 bp, Zea mays subsp. mays
  misc_feature (1)..(650): Ceres Seq. ID no. 13599214
aacccaccgagactttatcatatgtatatgactattgccatctacaaggaacagtttttggagatatacaaacagaaaactagtatgggggggacatacataaacgaattgagaaacattacacttacaagggaattcacttcttccattgcggaatccgctgaaccacaacctttcctgagttttctttgttccctactattgtttggcacgcgagcctccaagattcaggcttctttttcagatacttgttttctgtatctgttctctggttcagaagttctctgccatcaagaatctcaacaatgcaagttccacagcttcctccacctccacagttcatcactttcccgtaagtagcgtaaagctcgatcttgctatcctgcatgatgcttctcagaagcttctctccgctcacagctttcgctttatccctcggatacgtcccgtcgctcccaggcttcggaccgaagaactcgagctctatctcaggaggaggcttcgtggtagaaatcccctgctgagatgcttctgaagaagaagaggaacaacaggagataacgcgagctcttccattcacggaaacttgtcgattcttcacaccggagaaggagaatccgaggttgaaaccgagcgaagccatttctttt

SEQ ID NO: 348 - protein, 119 aa, Zea mays subsp. mays
  peptide (1)..(119): Ceres Seq. ID no. 13599215
NPPRLYHMYMTIAIYKEQFLEIYKQKTSMGGTYINELRNITLTREFTSSIAESAEPQPFLSFLCSLLLFGTRASKIQASFSDTCFLYLFSGSEVLCHQESQQCKFHSFLHLHSSSLSRK

SEQ ID NO: 349 - protein, 112 aa, Zea mays subsp. mays
  peptide (1)..(112): Ceres Seq. ID no. 13599216
MYMTIAIYKEQFLEIYKQKTSMGGTYINELRNITLTREFTSSIAESAEPQPFLSFLCSLLLFGTRASKIQASFSDTCFLYLFSGSEVLCHQESQQCKFHSFLHLHSSSLSRK

SEQ ID NO: 350 - protein, 110 aa, Zea mays subsp. mays
  peptide (1)..(110): Ceres Seq. ID no. 13599217
MTIAIYKEQFLEIYKQKTSMGGTYINELRNITLTREFTSSIAESAEPQPFLSFLCSLLLFGTRASKIQASFSDTCFLYLFSGSEVLCHQESQQCKFHSFLHLHSSSLSRK

SEQ ID NO: 351 - DNA, 2013 bp, Zea mays subsp. mays
  misc_feature (1)..(2013): Ceres Seq. ID no. 15226190
tgattactattaccttttctgttccaaagacaaaggtggatttcacactttgaaatcctgtacctaaagtgacctttaggaaaaggagacctaatcttaggaacaaaaacaaaactatttttgtaagtatctatacgctttaatgtttgttcctatgataactgtttgatttggttctttgattgagtgtcatgagttgtggagtaatgtccacaattgcatctgtatatgcatataggcataaaaaatgtttatggccattcacaatatagacgaagccgaagctcaccagcagcataaatatataagagataaaactgcttcggtggatcaaccaaagtctatgcttttgtgtgaagacacagctgagcataaagtggtgttttgtaacaccccgtccaatcccggactgacggtacttactcctgttagctctctaggatcatatattggccccacagaccaacacgagtcttttgtgcgcactttgtcctcactcatgcgcacccgagaaaacttcccggtcggtcacccatcccaaattgctccaagacaagcacgcttgtcggcgtttcgagacagggggtccctaagccgacgagtgagtgtgctgcgtgccccagcccagatgggtcgagcgcgtgggcgagcgcggaggggggagaggcgaggcggccggagccgagcgtgagagaggtggaagtcccgcggccttcgtgttcgtcccgcgcccaggtcaggtgcgcttgcagtaggggggttacaagcgtccacgcgggtgagggaagcgagcggccccaagagagcgcctgtcccgtcctcggtcccgcgcggccaaccttctctgagaaggccctggtccttccttttatagtcgtaaggagaggacccaggtgtacaatggggatgtagcagagtgctacgtgtctagcggagggagagctagtgccctaggtacatgccgatgtggcagccagagagatctgggcatcctgctggcgtgatgtcgtggctatcggtggtgcggtggagcctgatggagggacagctgttggagcggtcgagtccctgctgacgttgtcctgctgccgtaagagagctgggggccgccgtcgtcatagagctcgtggagcgccatcattgcccctctggcggagctggccggacgagacgccggtcttgttctccgtgacccgagtcgattcggggtagggtgatgatgacgtttcctgttgacgtggcggtctgtgctctaggcagggcgacgtggggtttcctccgaagccgaggttgagtcttgccttcagttgccgtggccgagcccgagccagggggtcgggcgaggcggaagtcgtccggccgaggccagggcggagtccgagccctggggtcgggcgaggcggagtttcgtcgtcttccgggtcttagcctgagtccgagccctggggtcgggcggaacggagttcgccgtcttccgggttttagcccgagtccgagccctggggtcgggcggagcggagttcgccgtcttccgggtcttagcccgagtccgagccctggggtcgggcggagcggagttcgccgtcttccgggtcttagcccgagtccgagccctggggtcgggcggagcggagttcgccgtcttccgggtcttagcccgagtccgagccctggggtcgggcggagcggagttcgccgtggcgcctttggcaaggcctagttgcctgtcagactcactctgtcgagtggcactgcagtcggagtggcacaggcggcgctgtccttctgtcagactggccagtggagcggtggagtgacggcggtcacctcggctctgccgagggcgcgtgtcaggatagaggtgtcaggccacctttgcgttaaatgcccctgcaatttggtcagtcggtgtggtgatttagtcaaggttgcttctgagcgaagcccaaggccttgggcaagccgggtgatgtgtccgccataaaaagggggcctcgggcgagacggaagtct

SEQ ID NO: 352 - protein, 147 aa, Zea mays subsp. mays
  peptide (1)..(147): Ceres Seq. ID no. 15226191
MFMAIHNIDEAEAHQQHKYIRDKTASVDQPKSMLLCEDTAEHKVVFCNTPSNPGLTVLTPVSSLGSYIGPTDQHESFVRTLSSLMRTRENFPVGHPSQIAPRQARLSAFRDRGSLSRRVSVLRAPAQMGRARGRARRGERRGGRSRA

SEQ ID NO: 353 - protein, 145 aa, Zea mays subsp. mays
  peptide (1)..(145): Ceres Seq. ID no. 15226192
MAIHNIDEAEAHQQHKYIRDKTASVDQPKSMLLCEDTAEHKVVFCNTPSNPGLTVLTPVSSLGSYIGPTDQHESFVRTLSSLMRTRENFPVGHPSQIAPRQARLSAFRDRGSLSRRVSVLRAPAQMGRARGRARRGERRGGRSRA

SEQ ID NO: 354 - protein, 115 aa, Zea mays subsp. mays
  peptide (1)..(115): Ceres Seq. ID no. 15226193
MLLCEDTAEHKVVFCNTPSNPGLTVLTPVSSLGSYIGPTDQHESFVRTLSSLMRTRENFPVGHPSQIAPRQARLSAFRDRGSLSRRVSVLRAPAQMGRARGRARRGERRGGRSRA

SEQ ID NO: 355 - DNA, 634 bp, Zea mays subsp. mays
  misc_feature (1)..(634): Ceres Seq. ID no. 13623539
acgagagctagggagatgaaatgccttttgtacatgatggaaggaaacaaattacgtacatactgcaattatatctgggttctcagccttgccatggttggtcaagcccctctatgattttatcagttgattcaggtggttgattatatggtggttcagagagctcgaggtgaatcacagagtacatatagatctctccactccagtcactatgttgggaatcctcagcctttggaggaatcatgagtgcatacttcagtggttctccagtcacttatggcgtaagatttgtctttggtgttacagcacttttgccactgttccgagtagcagagaaggacaactctggcaaactgtgaagaaaataaaagattttcacaagcggaatcttcagaatctgaataaaggagttcgtgggaatcagttgtaccaaaaactggttcagttttcgtattccaagcatactactggaagttcacactgatcggcgacaaactctcgcccaaggagaagttgaaggaggatcagcgtgaacacccactgaaagagagatggagttgaatgagaaatctgaaaagaatacgcaagaggtagatgagaagttccaaaacacaaacttgtatctcaagaactt

SEQ ID NO: 356 - protein, 90 aa, Zea mays subsp. mays
  peptide (1)..(90): Ceres Seq. ID no. 13623540
MLGILSLWRNHECILQWFSSHLWRKICLWCYSTFATVPSSREGQLWQTVKKIKDFHKRNLQNLNKGVRGNQLYQKLVQFSYSKHTTGSSH

SEQ ID NO: 357 - DNA, 1898 bp, Zea mays subsp. mays
  misc_feature (1)..(1898): Ceres Seq. ID no. 13623325
gggcaatgcatgcccctcttcttgcctttcgaccacaatcgcgacgctaaccacctgagtggtcgcggcgacgtagaccaagagggcttctccggcagctgggggcaccaagataggcgccttcgtgaggagcgccttcaggttcccgagggcttcctcggcctcaggggtccaagtgaagcactcggccttcctcaagaggcggtacagaggtagacctctttcgccgaggcgtgagatgaagcggctcagagccgcgaggcatcccatgaccctctgtacgcctttcaaatccttgatgggccccatgctggtgatggctgcgatcttctccgggttggcttcgatgccccgctcggagacaatgaaccccaagagcatgcctcatggcaccccgaagacacacttctcgggattgagcttgacgcctttcgccttgagacattggaatgtcacttcaaggtcagaaaggaggtcggaggctttcctcgtcttgactacgatgtcatcgacgtaggcctcgaccgtgcggccgatgtgttcaccgaacacatggttcatgcaccgctggtacgtcgcacccgcattccttaaaccgaacggcatggtgacatagcagtacatgccgaagggtgtgatgaaagaagtcgcgagctggtcggactctttcatcctgatttggtgatatcctgagtaggcatcgaggaaagacagtgttcgcacccaacagtggaatctatgatttgatcgatgcgaggcagagggtagggaaccttcggacatgccttgtttagaccagtgtagtctacacacatccgccatttcccccctttctttctcacaagcacagggttggcaagccattcgggatggaatacctctttgatgaaccctgccgccattagcttgtggatctcctcgcctatggctctgcgcttctcctcgtcgaatcggcgcagaggctgcttgacgggtcgggctccggctcggatgtccagcaagtgctcggcgacatccctcggtatgccgggcatgtccgagggactccacgcgaagacgtcggcgttcgcgcggagaaagtcgacgagcactgcttcctatttgggatcgagcccggagccgatccggatctgcttggaggcgtcgccgctgaggtcgagggggacagacttaaccgtctccgctggctcaaagttgccggcatgacgcttcacgtctagcacctctttagagaggctctccaggtcggcgatgagggcctcggactcggcgagggcctcagcgtactccacgcactccacgtcgcattcgaacgcgtgtttgtacgtggggccgacggtgatgaccccgttggggcccgacatcttgagcttcaggtaggtgtagttggggacggccatgaacttcgcgtagcatggtcttcccagtaccgcatggtaggttcctcggaacccgaccatctcgaacttcagggtctcccttcggaagttggagggtgttctgaagcagacgggaaggtcgagttgtccgaggggctagacgcgcttcccgggaatgatcccatggaagggcgcagcgcctccccggacggaggatagatcgacacgcaggagcccgagggtctcggcgtagatgatgttgaggctgctgcctccgtccatgaggactttggtgagcctgacgtcgccgatgacggggtcgacgacgagcgggtatttccccgggctcgacacatggtcggggtggtcggctcggtcgaaagtgatgggcttgtcggaccagtctagatagactggcgccgccaccttcaccgagcaaacctcccggcgctcttgcttgcggtgccgagccgaggcgttcgctgcttgcccaccgtagatcatgaagcaatcgcggac

SEQ ID NO: 358 - protein, 106 aa, Zea mays subsp. mays
  peptide (1)..(106): Ceres Seq. ID no. 13623326
MNPAAISLWISSPMALRFSSSNRRRGCLTGRAPARMSSKCSATSLGMPGMSEGLHAKTSAFARRKSTSTASYLGSSPEPIRICLEASPLRSRGTDLTVSAGSKLPA

SEQ ID NO: 359 - protein, 93 aa, Zea mays subsp. mays
  peptide (1)..(93): Ceres Seq. ID no. 13623327
MALRFSSSNRRRGCLTGRAPARMSSKCSATSLGMPGMSEGLHAKTSAFARRKSTSTASYLGSSPEPIRICLEASPLRSRGTDLTVSAGSKLPA

SEQ ID NO: 360 - protein, 92 aa, Zea mays subsp. mays
  peptide (1)..(92): Ceres Seq. ID no. 13623328
MKRLRAARHPMTLCTPFKSLMGPMLVMAAIFSGLASMPRSETMNPKSMPHGTPKTHFSGLSLTPFALRHWNVTSRSERRSEAFLVLTTMSST

SEQ ID NO: 361 - protein, 68 aa, Zea mays subsp. mays
  peptide (1)..(68): Ceres Seq. ID no. 13623329
MPLFLPFDHNRDANHLSGRGDVDQEGFSGSWGHQDRRLREERLQVPEGFLGLRGPSEALGLPQEAVQR

SEQ ID NO: 362 - DNA, 1226 bp, Zea mays subsp. mays
  misc_feature (1)..(1226): Ceres Seq. ID no. 12636782
ggaatctaaaatttacaaacttaagcacacactacaagccgggttagcgttagaattaaatccgagtccgaaagagagggaaaacaagtcaaccaagaaataaagcggatgaacatggtgatttgttttaccgaggttcggttccaaagaacctagtccccgttgaggtggtcacaaagaccaggtctccttcaaccctttccctctctcaaacgtcacttagactgagtgagctttctccttaatcaaacgggtcacttagaccccgcaaggaccaccacacactttgtgtctcttgctttgattacaagtcacttgagaataagaatgggaaggaagaaagcacgaatgcaaaagccaagcaacaagagcgacaaataacacacaaatcactctctctcaagtcgctaatcactaatgatcacttgtctcaattgtggaacttggagagtttgaaagctttgattgtgtcttggaatggattgctagctcttgtattgaatgtgaaaggttggaatgcttgggtgaagtgaatggaggtggttggggttgtatttatagcccccaaccacttcctagccattgctccatttctgccaactgcggacggtccacgcccctggtccggatggtccgcccctgcacatcaacgactacaatcgcaatggtcagcagtaacggctatatcaacggctactatgcattaaatgtgtcgtcagatgtcagataaaggtagtcgcggacggtccggtcgtgcaccccggacggtccgtgaggacgctataattcattttaccgaacccgtcacctttgggtttttcggttctgcgccgatcgaatggtccgtgcctgaggccggacggtccgcgcttggtctcggacggtgcttgcttttccatcgaacggtccgtagtgtagacttgtgtttttgcattggttctgtccgaggctcaccctagtgtcgcggacggtccgccgcaagggcccggacggtccgcgcttaggtgattttccaaaaagcttctcctgtccggaataatctacgacattctggacagtcaatttagaatagttgtagatgaacttatgcacctgtggaatgatcaactagacaaactggttagtccatatgtttataatggtggtcaaacaccaaaatcgattataggaaatgttgacactatttccctttcagttatccaacgaaccagtccttacggagaggt

SEQ ID NO: 363 - protein, 83 aa, Zea mays subsp. mays
  peptide (1)..(83): Ceres Seq. ID no. 12636783
MCRQMSDKGSRGRSGRAPRTVREDAIIHFTEPVTFGFFGSAPIEWSVPEAGRSALGLGRCLLFHRTVRSVDLCFCIGSVRGSP

SEQ ID NO: 364 - protein, 79 aa, Zea mays subsp. mays
  peptide (1)..(79): Ceres Seq. ID no. 12636784
MSDKGSRGRSGRAPRTVREDAIIHFTEPVTFGFFGSAPIEWSVPEAGRSALGLGRCLLFHRTVRSVDLCFCIGSVRGSP

SEQ ID NO: 365 - protein, 57 aa, Zea mays subsp. mays
  peptide (1)..(57): Ceres Seq. ID no. 12636785
MEVVGVVFIAPNHFLAIAPFLPTADGPRPWSGWSAPAHQRLQSQWSAVTAISTATMH

SEQ ID NO: 366 - DNA, 684 bp, Zea mays subsp. mays
  misc_feature (1)..(684): Ceres Seq. ID no. 12637435
atttatggagctgaccttgctgcttttctgcaaacacttgccaagataattgaggaccccaaggatcttactttctgaatgtcccaactgattgtttttccctgaggcaatcaaaaccgggtgcttcttacctatcagtagatgtgtagtttgtcttctgtttatgtgattaggtgttttaagctgtcaccaatgtcagcatcaggtgtatctaccatttttaccggaggtttcatggatagtggattttgttgagctcctcaatgtaccgtatccttgtgagatacaaagaatgaaatgtaccttgtaccaccctgtggttgatttcgcatgcctgtcaaacaaaaatatggctgatgctcttgcaagggtgccgacgcgatatcttcagggagatctgtaaaaacgggtcacatatctgtttgttttacatgtgaaggagacggatcagggcctgttcgtttccgtaggattacaccaagaattattcctgttgatcaaaacttatataaattagagaagcaatccgggctggaacagttccggccttctattccgtgtcaaccgaacaggccctcatggtttctccaaaccactccaatgatgccaaggctgtagagtatcggatgtcctgacctgacctgctgttttacattcctgggatagctcaagatagcgtcctcc

SEQ ID NO: 367 - protein, 37 aa, Zea mays subsp. mays
  peptide (1)..(37): Ceres Seq. ID no. 12637436
MCSLSSVYVIRCFKLSPMSASGVSTIFTGGFMDSGFC

SEQ ID NO: 368 - protein, 36 aa, Zea mays subsp. mays
  peptide (1)..(36): Ceres Seq. ID no. 12637437
MKCTLYHPVVDFACLSNKNMADALARVPTRYLQGDL

SEQ ID NO: 369 - DNA, 658 bp, Zea mays subsp. mays
  misc_feature (1)..(658): Ceres Seq. ID no. 12638082
atgaagttcccctctgcccttgagtccaacctgtgttcatcactagagggacgtaactcttgagttcaagtcggtgttaacccactccacagccacccaacatactgtattccgtgcatcgagtgccagtggcgaccatagcagcagttcacaccctcaccatggccatgattcctcggaggttgtctcggccttgtgttgcccgttccctactcctcgcagaactcctaccagaaggagtgaagattcaagctgaagtggtgactgaagaggaatctactccagtggctgctgatcaagtggaggagccatctaattggggtttaatagagggatcgagtacctcttcactgcaataagcatatacttgagagtcatttttccttagtcaggtaagacttgcgaaagtacactccgtactcagggttttcgaacccatgttgttgtaggtgatgatgagtactctaggtgttcctatggttggagggcgtttccagttctgaaggaagattagttagtcttgtgtataagctttggagggttcctaccttcctgctaatgtaataagttatgcactttgagtatatcaggacttgtaataaatgtaactcttcctatgtaataaccttcagttttagaaatgaaaagaatattttgt

SEQ ID NO: 370 - protein, 65 aa, Zea mays subsp. mays
  peptide (1)..(65): Ceres Seq. ID no. 12638083
MAMIPRRLSRPCVARSLLLAELLPEGVKIQAEVVTEEESTPVAADQVEEPSNWGLIEGSSTSSLQ

SEQ ID NO: 371 - protein, 63 aa, Zea mays subsp. mays
  peptide (1)..(63): Ceres Seq. ID no. 12638084
MIPRRLSRPCVARSLLLAELLPEGVKIQAEVVTEEESTPVAADQVEEPSNWGLIEGSSTSSLQ

SEQ ID NO: 372 - DNA, 1195 bp, Zea mays subsp. mays
  misc_feature (1)..(1195): Ceres Seq. ID no. 12636774
gaggtcgacggtatcgataagcttttttttttttttttttgttgatcatctccttttggattaaattgctgctgaaattgcttaacttgataacaaaaggtacaaggtttagatcttcaaggtctcaatcattcttattcctttagagaagtgttctttgaccccctccaagaagtccgcctctgtaatcctcctgtaccttgccggacgcttctcatccagtaaaccggccgccggctgaagcacattgtcgcgttccaccgcatagagcatggccaacgagatcctctccttctctgcattcgtcacaaccctgtgcactgggctcttgaatatcccgttgctcattatctccaaggagtctcccaggttgatgaccagagtgtgaggaacgaacggaacattgaaccacgtgttctctctctgaacctgcagtccaccgacctcacgatcgaccagaagaaccgtgagaacggggccgtcagagtgagccttgatgcccaagacgagctccggcctcggacaaggagggtagtagttgaatctggcataggcttgagggctagcaccaagctgcttgatgaactcttcctcatcaagctccaagatcttggccatcgctcgcaagattctgtccctcatactcttggtttttgatgcgtactcgtgcagaagatccctgaaggattcagggtatttgggccactgagcaaggcttctttcgtcttcaggctccaccttcagctgcagacggtcgttccagtcaaggatatgatcctgcgccaccactgggtcactgccgtacccttcgagctggaagcgcgtgccttccctcaggttgctgtacttctgcctctcctggagcggctggtggaagaactcccgtgacgcctccatcagatcctccattagagacgcgtctatgccgtggttggtagccagaaaaagcccccaggtctgtagcgccgagcggagcttggctgcctcgtcggcggtcgacagcttgttgaggtcgacgatagggaggggatccggcatgtcagccgcgagcatcaggctgccagggcggtgctcctcccgctgcacgaaccggctcggcggctcgtccacgagggcggccagatctttcactggagtcggcaccgtccatgattcaacagccatcggtgcttgcttattactaccacacacgaag

SEQ ID NO: 373 - protein, 91 aa, Zea mays subsp. mays
  peptide (1)..(91): Ceres Seq. ID no. 12636775
MPWLVARKSPQVCSAERSLAASSAVDSLLRSTIGRGSGMSAASIRLPGRCSSRCTNRLGGSSTRAARSFTGVGTVHDSTAIGACLLLPHTK

SEQ ID NO: 374 - protein, 53 aa, Zea mays subsp. mays
  peptide (1)..(53): Ceres Seq. ID no. 12636776
MSAASIRLPGRCSSRCTNRLGGSSTRAARSFTGVGTVHDSTAIGACLLLPHTK

SEQ ID NO: 375 - DNA, 920 bp, Zea mays subsp. mays
  misc_feature (1)..(920): Ceres Seq. ID no. 15225596
atgcaccacgagcgcctccgccgctccaacgctccaacgcttgagcgcctccaacgccactccaacgccacgagcgcctccgccgctccaccgaacaactccaacgccactccagctcttgcagcagtagaactctactgcagccagctacgacaccctgcgcctgccgcactaggtacatttgattctggtttctgccgcacaagatccgctacctcttggacccggacatctacaccgacggcaggatctccgtgcagggcatcgacgccgtgctcttcgcgccggacgacgccaaggccacgcagaccgtcgacccgaacaggaagcctcctaccatcgtcacccacaagaagaagatcaagctccggcgagtattggccaacgtgaaaacatggaggtgaagtgaagcaagtggtagttgagcatatgctggtggttggttgtcttcatgaacatctctttgatggctgataccattcctgggactgcaagccaacactgtcctttaacccatgacccatgagcaacaatttcttcttaacaacagagcatgatgttagagaaatttggcttcaagcgcaaaattaggttgcttcgtgggagtgatgcatggcctgaacaaatgatatgagcaaatttgacaactgcagttctgttatggtgaatggtgattgtagttcagtttcagctctaacctatgaaaaattgaatggcagttgcactaatctgttggtggaatgattttcccagtaatttcctggacaagcagatcactgagaaccatctaccttatgagaaatgatgccttgtatggttcagtatagttcttgtattgctggtttaaattaattcttgtatggcagttgcactaaactgaatggcagttgcactttgagatattcttctattgttggttt

SEQ ID NO: 376 - protein, 129 aa, Zea mays subsp. mays
  peptide (1)..(129): Ceres Seq. ID no. 15225597
MHHERLRRSNAPTLERLQRHSNATSASAAPPNNSNATPALAAVELYCSQLRHPAPAALGTFDSGFCRTRSATSWTRTSTPTAGSPCRASTPCSSRRTTPRPRRPSTRTGSLLPSSPTRRRSSSGEYWPT

SEQ ID NO: 377 - DNA, 682 bp, Zea mays subsp. mays
  misc_feature (1)..(682): Ceres Seq. ID no. 13600048
aggtacttgttgttgagcgcggagagaggagaggcgcagagcatcgacgatggcgagcggcagcatgaagagggagatcagcgagacccacgacaccctccgcttcggcctcaatgccggcgtcaaggccgacctcgcgccgccgcacccgctccagtccagcatccaatcggaggccaagttctgggcggacaagaagaagtttgggacagaggccatctacggatccgccttgaacatccgcaagggatctcgatgcccaaatcctctcaaggttccaaaggccccctggtgctttgccatcatctctgcttggatatgaggcactgacaggttccctagatgattttggttttgaagattatcttaacatgcctcaagattttgaaggtttccgtcaacctgacatgcaccacggaatggaggttcgccttggtttgtccaagggacctatctgccctagcttcagttgaggcagtgaatgtagttttgcggttctgccgcacgttgatgcaccttagtccagtacactcgggtcaataaaagaccccattaggatggtgaaacggtgaaaactgatggcttgcatatgttcagagtgttatgttgtaatgaacagtgttatgttgtaatgaacgcatatatcgcatgattgatagcttggctagctgtgcgcaggctt

SEQ ID NO: 378 - protein, 109 aa, Zea mays subsp. mays
  peptide (1)..(109): Ceres Seq. ID no. 13600049
RYLLLSAERGEAQSIDDGERQHEEGDQRDPRHPPLRPQCRRQGRPRAAAPAPVQHPIGGQVLGGQEEVWDRGHLRIRLEHPQGISMPKSSQGSKGPLVLCHHLCLDMRH

SEQ ID NO: 379 - protein, 90 aa, Zea mays subsp. mays
  peptide (1)..(90): Ceres Seq. ID no. 13600050
MASGSMKREISETHDTLRFGLNAGVKADLAPPHPLQSSIQSEAKFWADKKKFGTEAIYGSALNIRKGSRCPNPLKVPKAPWCFAIISAWI

SEQ ID NO: 380 - protein, 85 aa, Zea mays subsp. mays
  peptide (1)..(85): Ceres Seq. ID no. 13600051
MKREISETHDTLRFGLNAGVKADLAPPHPLQSSIQSEAKFWADKKKFGTEAIYGSALNIRKGSRCPNPLKVPKAPWCFAIISAWI

SEQ ID NO: 381 - DNA, 937 bp, Zea mays subsp. mays
  misc_feature (1)..(937): Ceres Seq. ID no. 13623756
ccgaaagtttcgaacaaaagtccacaaatccccttcgccgtctccggcgagccccacccctcatcgccgccgggccaaagagacagtgagaggggnggatggatcagtccatcagagccgcatgcgagttcctctcgtcggtgctaaaccacgctgagtcctcgtcccgcgagcttcgccgacgccgtctcccaacgccccgtccacctcgagatggcgaggacctcgttcctgcagaagctggagcacagggtggagggcgtcggccgccgacttgcagcacatcgagtccatcgccctcgacaccgtctccttcgaggagctcctcggccactgcggcgaggcgctcaaagtctacgcgcgccacgccgacgccctccagtcgcacctcgcttcctttggctacgagcccccggacgcacaacaccccgtgatcgatgtggatgtggaagatggagatgtcgggaaggttggggaccctggagatagatgcctcagcgtgtcgcgttcagtgctcaggtcgggtaagcggcggtttgatggccacagcgatgcgatgtatcctctttggtttgatttagttcggaaagcaagattggcattgcctcggtagaacatctcaactgattgtatcagcagatgttgcatcttcaggtgccatggatccaattggaggcactagtattaggaaatgatgcacttgtaagaatgcctacaggtttgaggacctatttattctggtacgtttatgctaagcaggagctgtatataggagatgcatcgaagctgaaaccctgagacacatagttttggtcggaactgcactgtgcttttcttgactgccgattagatttgaagagtcactgaaggatcttgggttttcagatgcttgtctagccactctttcttctgaaggcgcacattatggtgagagccc

SEQ ID NO: 382 - protein, 111 aa, Zea mays subsp. mays
  peptide (1)..(111): Ceres Seq. ID no. 13623757
MDQSIRAACEFLSSVLNHAESSSRELRRRRLPTPRPPRDGEDLVPAEAGAQGGGRRPPTCSTSSPSPSTPSPSRSSSATAARRSKSTRATPTPSSRTSLPLATSPRTHNTP

SEQ ID NO: 383 - protein, 91 aa, Zea mays subsp. mays
  peptide (1)..(91): Ceres Seq. ID no. 13623758
MARTSFLQKLEHRVEGVGRRLAAHRVHRPRHRLLRGAPRPLRRGAQSLRAPRRRPPVAPRFLWLRAPGRTTPRDRCGCGRWRCREGWGPWR

SEQ ID NO: 384 - DNA, 656 bp, Zea mays subsp. mays
  misc_feature (1)..(656): Ceres Seq. ID no. 12637709
accagccggtgttggtttcagcttgtattcccactctgtcgcacagcgtcgcccgtcgccgctgagatcctaggaagaaatggagctctctcgcaagctcttcacggccgtcctcctcgtcatgctgctgctgctgtccgcaggtacgttggtgcggccggctagccgtcttacatgtcttctgtgctgtggactcatcagccgctggcggccggcggcagcctactgatgatgatctgtctgagatgctgctgcgtgctgctgcagaggtcgggccggtggcggtggcggaggcgcgcacgtgccactctcagagccacaggttccggggcccctgcctctgccggtgcaaatgtgccaacgtgtgcagggccgaggggttctccggcggcaggtgccgcggcttccgccgccgctgtttttgcaccacgcactgccactgattcgctctcccaccgcccgcctggcgtctccgtcgatcgcgtcgcgaccactccatggctccacgcatgaatatcaagggtgtgcgcggtttgtgttgtgataccaaattgtatcctcgtcgtgtgttgagcagcggcgtgctgttgtacgtacgtctgcctctgttccacgtttcgggattttccatagcaaatacacgcgtcgatagagat

SEQ ID NO: 385 - protein, 112 aa, Zea mays subsp. mays
  peptide (1)..(112): Ceres Seq. ID no. 12637710
MSSVLWTHQPLAAGGSLLMMICLRCCCVLLQRSGRWRWRRRARATLRATGSGAPASAGANVPTCAGPRGSPAAGAAASAAAVFAPRTATDSLSHRPPGVSVDRVATTPWLHA

SEQ ID NO: 386 - protein, 94 aa, Zea mays subsp. mays
  peptide (1)..(94): Ceres Seq. ID no. 12637711
MMICLRCCCVLLQRSGRWRWRRRARATLRATGSGAPASAGANVPTCAGPRGSPAAGAAASAAAVFAPRTATDSLSHRPPGVSVDRVATTPWLHA

SEQ ID NO: 387 - protein, 93 aa, Zea mays subsp. mays
  peptide (1)..(93): Ceres Seq. ID no. 12637712
MICLRCCCVLLQRSGRWRWRRRARATLRATGSGAPASAGANVPTCAGPRGSPAAGAAASAAAVFAPRTATDSLSHRPPGVSVDRVATTPWLHA

SEQ ID NO: 388 - DNA, 1419 bp, Zea mays subsp. mays
  misc_feature (1)..(1419): Ceres Seq. ID no. 13600652
cccccctccagttccaactttattgtgtttaaacagtcgacggtatcgataagcttttttttttttttttttcggataataagacataaaacatccattaaaaataagtaggagtacttctcgagagaaaaaaataagtaggagtacaataaagaccaaattgataatattcttctttcaatcgtccaatttatactcctacttaataatgagatatagtaatagcaatgtgttcgcaaataactatcagctgctcatccgaaagacaaacgcatttggtcttgactcctgagttcgactaatttctctgatagacaccaaacccttagctacgctttgtgacacccacctaccagttggaggatgcaatgccatgctctatctttttatagtatgagccaaatgcatgatgcttgaacacaccagacctccgcttctccagctctgtccgtaatctctgtgcttctatttttatgttgataaaatcactctctatggcctgactctcctcaagaagctcaacttttgcacgtttctcatgctcgtatgccatcctggccctcgaaatctcctcttgtatatcatgcaacccttctcttatagcaggtatctgcttgttctcggattggatctgctccagctccctgtacaatgactgaaccttcacaaatagctctttgcacaaagcttccaactccatcttttcagaacttaggaccaacacttcttccttgataagtttaagagcatgcatatgttcctctaacttcatgcctccctggataatatccctgtattccatttcattatcaacacgaagtctaggaatggtttgtttggcaagtatatggatctcgtcttcaatgacagctaattcttgcctaaggcccaaaatatcctctagcacaagagtattattagcagcaattctacaaatctcttaacaaccaactgcaagttcgtcctggaaagggagcagaggcatgggtccaggaactcctccatctaatgaatttgaaggggaatttctatgaccattattgctccaaggttgccgagccatgtggttttctgatggtgcccaagtctttggtgcactggaaaagtttttagcatttcaacaaaaactttgtcttctcaaagcgagaaataatctctccagcctaataaatcttgaatcagagctggattacattccgaaaccgcaagaataagatacagaacgaacaagccattgtacaacatgcgtgtgggcgccaaaaatcggaatctccttcttggcgaagagaggctgaaaagctttccgaacgcgagccccaacttccttcgcacccacttccttcaccaccttgacctggccggagcggcaccccggtcactttcctctctcaagtctcaagcatgttgtctctttgctct

SEQ ID NO: 389 - protein, 58 aa, Zea mays subsp. mays
  peptide (1)..(58): Ceres Seq. ID no. 13600653
MRVGAKNRNLLLGEERLKSFPNASPNFLRTHFLHHLDLAGAAPRSLSSLKSQACCLFA

SEQ ID NO: 390 - protein, 57 aa, Zea mays subsp. mays
  peptide (1)..(57): Ceres Seq. ID no. 13600654
MPPWIISLYSISLSTRSLGMVCLASIWISSSMTANSCLRPKISSSTRVLLAAILQIS

SEQ ID NO: 391 - protein, 50 aa, Zea mays subsp. mays
  peptide (1)..(50): Ceres Seq. ID no. 13600655
MWFSDGAQVFGALEKFLAFQQKLCLLKARNNLSSLINLESELDYIPKPQE

SEQ ID NO: 392 - DNA, 568 bp, Zea mays subsp. mays
  misc_feature (1)..(568): Ceres Seq. ID no. 13600405
  misc_feature: MA Experiment ID: 108535 Result: Up-regulated in Transcription
  misc_feature: MA Experiment 108535 PARAMETER Experiment Name: Zm_Meristem_P Parameter: Age (day) Value: 8
  misc_feature: MA Experiment 108535 PARAMETER Experiment Name: Zm_Meristem_P Parameter: Organism Value: Zea mays
  misc_feature: MA Experiment 108535 PARAMETER Experiment Name: Zm_Meristem_P Parameter: Plant Line Value: 35A19
  misc_feature: MA Experiment 108535 PARAMETER Experiment Name: Zm_Meristem_P Parameter: Tissue Value: Root Meristem vs. Above Root Meristem
aacccttctgtcgtaccctctggatcgaagcctggacgacgcgaccgtgcggcggcgactcgacgcaaccagcacggcggcggcgcacagccccgacgacgactctccccactgccttctctccgttctacaatgagtatctcattgcgggatcgtattagaaagaggagggaagaagaagaagaagatgacatgatgatatttattgggaagcaaagtattggaaaaaactgcatttagttgatgatccactagaagtttaagctatgtcccactcgagtctttatacagtggtgatgtctcttgttatgctatgttcactgcatgatttttgtttttggcatgtctacaactggttcagctgttcagctgctcattgtggttgcagtcaaccataagattgttgtcttagcacctttgatatgtcttagcaaaaactcccagttcactctttgatatgtctagattgaaccagttcactctttaatatgtcttagcattgaacttgttttagattcaacaaatattcttgtcacggtgccagcaatatattaaatctacattgtgt

SEQ ID NO: 393 - protein, 79 aa, Zea mays subsp. mays
  peptide (1)..(79): Ceres Seq. ID no. 13600406
NPSVVPSGSKPGRRDRAAATRRNQHGGGAQPRRRLSPLPSLRSTMSISLRDRIRKRREEEEEDDMMIFIGKQSIGKNCI

SEQ ID NO: 394 - protein, 52 aa, Zea mays subsp. mays
  peptide (1)..(52): Ceres Seq. ID no. 13600407
PFCRTLWIEAWTTRPCGGDSTQPARRRRTAPTTTLPTAFSPFYNEYLIAGSY

SEQ ID NO: 395 - protein, 44 aa, Zea mays subsp. mays
  peptide (1)..(44): Ceres Seq. ID no. 13600408
TLLSYPLDRSLDDATVRRRLDATSTAAAHSPDDDSPHCLLSVLQ

SEQ ID NO: 396 - protein, 35 aa, Zea mays subsp. mays
  peptide (1)..(35): Ceres Seq. ID no. 13600409
MSISLRDRIRKRREEEEEDDMMIFIGKQSIGKNCI

SEQ ID NO: 397 - DNA, 1057 bp, Zea mays subsp. mays
  misc_feature (1)..(1057): Ceres Seq. ID no. 14309469
atgtttagctttatctgtctcgacggatctctcctcctctctctctccaatccaccgtcccgacgtcgtccaatccctcgatttatctctccgactcacctcctccaaaacctaaaaaccagcacttcttattttgttctgatctcttcaacctattcactcctccgcctctgaaacctccatcaccgtactcatcagccaccaccacatgtccctcaccagcagcgtgtcataccctctctgtgctaagcatctctttgctaactcgcacgctcatcctttgttttctctctctgaccgtctttaccttttgattcttccttcttctcctatcaaacagacagatcttccattagtctcaagggtaatggctttactctactgttagattgattgttctgataaagttgattcctttctctgtagagagtagtgtatctgtttactttctcccatgttcattggttcaacagtttccttccgagatgaagacatcaaatgagaaaggaaggtgggaaagaggaaggcaccagctgagaagcctagcaagcaggagaagaaggctaagaaggaccttaacaaaccaaagagagctcctagtgccttctttgtcttcctttacaataaactctaaggaatctggtcgacgaagaaacatgcgccgatgcttacatagcacaacaatagaactagtctcttcatgccaaaaatgtatggggttgttggtgtggtcacttgatgtttatgtcctaacaaatgagaccaatgaaagtcaaaaagatcgtttaagtcaaaaagtcaaaaagatcggttaagtcgatgttacttcatgtctatttcgttactgatatgaagttgtagcttcttctgtttgttcgtcatgtcttctcgtgtggtcttgtgaaatcacatgttttgtattgttgttgtgttgttgtgtagtcttgtgtcacagactagagtgtggttgattcacatgttttgtattgttgttgtgttgttctatatatatgtgtttattcagattggtcattttatagacagtcattcactcatc

SEQ ID NO: 398 - protein, 109 aa, Zea mays subsp. mays
  peptide (1)..(109): Ceres Seq. ID no. 14309470
MKTSNEKGRWERGRHQLRSLASRRRRLRRTLTNQRELLVPSLSSFTINSKESGRRRNMRRCLHSTTIELVSSCQKCMGLLVWSLDVYVLTNETNESQKDRLSQKVKKIG

SEQ ID NO: 399 - protein, 59 aa, Zea mays subsp. mays
  peptide (1)..(59): Ceres Seq. ID no. 14309471
MSLTSSVSYPLCAKHLFANSHAHPLFSLSDRLYLLILPSSPIKQTDLPLVSRVMALLYC

SEQ ID NO: 400 - protein, 57 aa, Zea mays subsp. mays
  peptide (1)..(57): Ceres Seq. ID no. 14309472
MFSFICLDGSLLLSLSNPPSRRRPIPRFISPTHLLQNLKTSTSYFVLISSTYSLLRL

SEQ ID NO: 401 - DNA, 905 bp, Zea mays subsp. mays
  misc_feature (1)..(905): Ceres Seq. ID no. 15178809
acgtcgtttaagggtttagggttgtgtcgtctcctccaatacgagatctactcacaaactatggtttcaatagcggtgtttcatattcttctttaacactccgaaaaactttcagttacagattcatcttattaatgtccttcttaaatccatcacccacccacgatctactttcaatgcgagcttcactcaagcaaggcggtggaactgcgactataaaaaggcaaaagacaaggttacagatatcagaactggtgcaactaaacttaaagaagctagcgaagccgacttccatggagcaactactctaattaagaagattgtgaatgctaactggccaaagaattccaatcagttctcaaagagtttcagaaaggtcagagacttgcagctgaaagagaaattacatatactcttgtggtcactaaagatatacctaccagttataatacacgggaactggatattgaatctttaaggacctcccaagagcaagctcttcttctacaataaaaaatataatatcagctttaacattgataactcacatgccgcaactgcacaagccactgctcaactcagaaaagcatctaaaactcaaagcaaattcatccttggtactaggagagactctcttctcaaactttttttaaattttctgatcccgttttttagcagttaaagctaagtttcatatatatgttttacttttgttgcaggcatgcctttttattcacatatttgggactgtcatcatctttatcctggtctgagcagcatcaaccgaagtagagtcgaggaaactatacaagttaccacattaaagatatatatatattgtacagattctttgtactgtatcttccttcatcccttgcaatcgaattgaatcttagcatttatgt

SEQ ID NO: 402 - protein, 58 aa, Zea mays subsp. mays
  peptide (1)..(58): Ceres Seq. ID no. 15178810
MSFLNPSPTHDLLSMRASLKQGGGTATIKRQKTRLQISELVQLNLKKLAKPTSMEQLL

SEQ ID NO: 403 - protein, 55 aa, Zea mays subsp. mays
  peptide (1)..(55): Ceres Seq. ID no. 15178811
MPFYSHIWDCHHLYPGLSSINRSRVEETIQVTTLKIYIYCTDSLYCIFLHPLQSN

SEQ ID NO: 404 - protein, 44 aa, Zea mays subsp. mays
  peptide (1)..(44): Ceres Seq. ID no. 15178812
MRASLKQGGGTATIKRQKTRLQISELVQLNLKKLAKPTSMEQLL

SEQ ID NO: 405 - DNA, 767 bp, Zea mays subsp. mays
  misc_feature (1)..(767): Ceres Seq. ID no. 15178816
tcagtaatgcataacatacacaactgaagtcagattttggtccgaataagtctgatgatgactcaggaagaagcagccttggcagcctcaagtctggaactaacagcctcccaagacacaagattgttcatgaatgtctttatgtaatccggtctgcggttctggaagtcgagatagtatgcatgctcccagacatcaatggtaagcaatgggaaagagccaagcacaagggggttcacagcatttggagttttcactactttgagtttgttgtctgcgtaagcaagccaggcccagccagctccaaactgagtggcggcagcagcattgaactcatcatagaacttctcataagaagtgaaatctctttcaagcagagcaagaagctctcctgatggttttcctccaccaccgggtttcattgattcccagaagaactcgtggttccacgcctgagcagcgttgttgaaaggagggaggaggtcgccgttgttgtaagtgttttggatgatatgctccaagggcttgccttcgagctcggatccaagaacctgtttcttgaggttgtccacataagccctgtgatgttttccccagtgaaactccagagtttgtttgctcatatgcggctccaaagcatccagagggtatggaggtggcttgaggacgtagtttgcggttacagcagctgaagcagccatttctcttttgggaatgaagctctggtttcaaggcaagtgaggagaccacacgccagaggtatctgt

SEQ ID NO: 406 - protein, 70 aa, Zea mays subsp. mays
  peptide (1)..(70): Ceres Seq. ID no. 15178817
MLPDINGKQWERAKHKGVHSIWSFHYFEFVVCVSKPGPASSKLSGGSSIELIIELLIRSEISFKQSKKLS

SEQ ID NO: 407 - protein, 59 aa, Zea mays subsp. mays
  peptide (1)..(59): Ceres Seq. ID no. 15178818
MLQGLAFELGSKNLFLEVVHISPVMFSPVKLQSLFAHMRLQSIQRVWRWLEDVVCGYSS

SEQ ID NO: 408 - protein, 35 aa, Zea mays subsp. mays
  peptide (1)..(35): Ceres Seq. ID no. 15178819
MFSPVKLQSLFAHMRLQSIQRVWRWLEDVVCGYSS

SEQ ID NO: 409 - DNA, 726 bp, Zea mays subsp. mays
  misc_feature (1)..(726): Ceres Seq. ID no. 15174447
acaaaactttcaactaccaatacgcaaagtattaaccttttcaggaccaacagcatcgaaaacgtaaacctgaccacggaacgagatcgttagctcattagctccttccatcggccgggaaccttgcaattcagagccctcggatcggtgaggaaccaagtgagagccatcggggatcaaatcggaggcagcgtagatggaatcgggatgagggatatcgtccatatcgtcgtaaggaatgtgaccggcggaggttgcggaggtagagacatggtcttcgccaacggtggcggagctgctaccgatctgattagggttaatctcgggttgggtatggtgaccaaacatcgcaagctgcctaaaagagaagagcttttcacattgattggaagcgagagatgggagtggagaataaaaccataaccctaattgcaaaagagagagagagagagaaaattggagaaaagagtagtacaaagagagatggtgatcgacgcgtgtggaggagagggattggccgtcgtggatcggtgactttagaggtaaataaatcgcagcaacttctgagatcaccctacgacttcactccactggacttttcacctgttggctattgggccgtttaattatgtttccaaagcccccatcaaggctcactttttttttgttatagttttaatatgttttacatttatatttgcattattaagttttaaatattttaac

SEQ ID NO: 410 - protein, 75 aa, Zea mays subsp. mays
  peptide (1)..(75): Ceres Seq. ID no. 15174448
MGVENKTITLIAKEREREKIGEKSSTKRDGDRRVWRRGIGRRGSVTLEVNKSQQLLRSPYDFTPLDFSPVGYWAV

SEQ ID NO: 411 - protein, 71 aa, Zea mays subsp. mays
  peptide (1)..(71): Ceres Seq. ID no. 15174449
MRDIVHIVVRNVTGGGCGGRDMVFANGGGAATDLIRVNLGLGMVTKHRKLPKREELFTLIGSERWEWRIKP

SEQ ID NO: 412 - protein, 50 aa, Zea mays subsp. mays
  peptide (1)..(50): Ceres Seq. ID no. 15174450
MVFANGGGAATDLIRVNLGLGMVTKHRKLPKREELFTLIGSERWEWRIKP

SEQ ID NO: 413 - DNA, 1104 bp, Zea mays subsp. mays
  misc_feature (1)..(1104): Ceres Seq. ID no. 13622227
cgaggtcgacggtatcgatattttttttttttttttttggctacactcatacccacctcaatacatatattatcgatttatagtgggttaggataagaaaataactaattttcatcaaaatcaaccccaccacatggattgtggtggcacaagagcacatgtacacaccaatttaaatctcccagcatccccgagcacacaaatccgctagtaaaacatactgtgatcaaaactgcaaccgttacacggtacaagcaaaaccaatctaatttaatacctttccgccaacctagctgatacagcccttagcttagaatacactttgccagcaggtgaacccaagatgagactgcaaagcgaatcccgcgcgaccttgatgttaacaaaggatccaagtatatggatctttgtatcagcgataacgatgcgggtcctggtagagttctcaatagcgtacttggtcttgcctcctttccctgataggcggccgatagcacgcgacagatgctcccctcgcagggtcttcacgtccttgatttcgaaggagtccacatacaggtcatcaagacgcagcaaggcgacggcatcagcaatgtcgaacccaagcataaaagcatgcacaaagtccgcacatttctgaaggttgctcacgtccggtgtgtcttgccttgtctttagctccaccctccttgccttgagattcatgcgtatatcgatcttcatatgctcgtatacgggtgtgtagatttccatccagcatcgcttgagcggcgcgaaccggtgctgcgggacgggcactttccggaactggggcctcccgccgctcatctcattcggcgtcagagcatcgaaccgcggcttgtccacggcgcccggccccgtcgcgtggtccaccgccatctccgaggaggaaacccccgtcgcggacgccatcgagtgcgttttcagcaggggcgaatcttgtggcgctttttgcgtggcgtagggcggcggcggcggcggtagagagtgagagacggcgcagatagagagggtgagggcacggcggttggcactgggtgtaaggcgtcgagacgaggcggaggcttttttgattaggatgtt

SEQ ID NO: 414 - protein, 98 aa, Zea mays subsp. mays
  peptide (1)..(98): Ceres Seq. ID no. 13622228
MRLQSESRATLMLTKDPSIWIFVSAITMRVLVEFSIAYLVLPPFPDRRPIARDRCSPRRVFTSLISKESTYRSSRRSKATASAMSNPSIKACTKSAHF

SEQ ID NO: 415 - protein, 93 aa, Zea mays subsp. mays
  peptide (1)..(93): Ceres Seq. ID no. 13622229
MLVYGCVDFHPASLERREPVLRDGHFPELGPPAAHLIRRQSIEPRLVHGARPRRVVHRHLRGGNPRRGRHRVRFQQGRILWRFLRGVGRRRRR

SEQ ID NO: 416 - protein, 87 aa, Zea mays subsp. mays
  peptide (1)..(87): Ceres Seq. ID no. 13622230
MLTKDPSIWIFVSAITMRVLVEFSIAYLVLPPFPDRRPIARDRCSPRRVFTSLISKESTYRSSRRSKATASAMSNPSIKACTKSAHF

SEQ ID NO: 417 - protein, 57 aa, Zea mays subsp. mays
  peptide (1)..(57): Ceres Seq. ID no. 13622231
MLPSQGLHVLDFEGVHIQVIKTQQGDGISNVEPKHKSMHKVRTFLKVAHVRCVLPCL

SEQ ID NO: 418 - DNA, 959 bp, Zea mays subsp. mays
  misc_feature (1)..(959): Ceres Seq. ID no. 14305533
  misc_feature: MA Experiment ID: 108528 Result: Up-regulated in Transcription
  misc_feature: MA Experiment 108528 PARAMETER Experiment Name: Zm_Imbibed_Seeds_P Parameter: Age (day) Value: 5 vs. 2
  misc_feature: MA Experiment 108528 PARAMETER Experiment Name: Zm_Imbibed_Seeds_P Parameter: Organism Value: Zea mays
  misc_feature: MA Experiment 108528 PARAMETER Experiment Name: Zm_Imbibed_Seeds_P Parameter: Plant Line Value: 35A19
  misc_feature: MA Experiment 108528 PARAMETER Experiment Name: Zm_Imbibed_Seeds_P Parameter: Tissue Value: Aerial vs. Embryo
  misc_feature: MA Experiment ID: 108530 Result: Up-regulated in Transcription
  misc_feature: MA Experiment 108530 PARAMETER Experiment Name: Zm_Imbibed_Seeds_P Parameter: Age (day) Value: 6 vs. 2
  misc_feature: MA Experiment 108530 PARAMETER Experiment Name: Zm_Imbibed_Seeds_P Parameter: Organism Value: Zea mays
  misc_feature: MA Experiment 108530 PARAMETER Experiment Name: Zm_Imbibed_Seeds_P Parameter: Plant Line Value: 35A19
  misc_feature: MA Experiment 108530 PARAMETER Experiment Name: Zm_Imbibed_Seeds_P Parameter: Tissue Value: Aerial vs. Embryo
  misc_feature: MA Experiment ID: 108534 Result: Down-regulated in Transcription
  misc_feature: MA Experiment 108534 PARAMETER Experiment Name: Zm_4deg_Cold_P Parameter: Age (hr) Value: 8
  misc_feature: MA Experiment 108534 PARAMETER Experiment Name: Zm_4deg_Cold_P Parameter: Organism Value: Zea mays
  misc_feature: MA Experiment 108534 PARAMETER Experiment Name: Zm_4deg_Cold_P Parameter: Plant Line Value: 35A19
  misc_feature: MA Experiment 108534 PARAMETER Experiment Name: Zm_4deg_Cold_P Parameter: Temperature (deg C) Value: 4 vs. 22
  misc_feature: MA Experiment 108534 PARAMETER Experiment Name: Zm_4deg_Cold_P Parameter: Timepoint (hr) Value: 6
  misc_feature: MA Experiment 108534 PARAMETER Experiment Name: Zm_4deg_Cold_P Parameter: Tissue Value: Aerial
  misc_feature: MA Experiment ID: 108536 Result: Down-regulated in Transcription
  misc_feature: MA Experiment 108536 PARAMETER Experiment Name: Zm_Meristem_P Parameter: Age (day) Value: 8
  misc_feature: MA Experiment 108536 PARAMETER Experiment Name: Zm_Meristem_P Parameter: Organism Value: Zea mays
  misc_feature: MA Experiment 108536 PARAMETER Experiment Name: Zm_Meristem_P Parameter: Plant Line Value: 35A19
  misc_feature: MA Experiment 108536 PARAMETER Experiment Name: Zm_Meristem_P Parameter: Tissue Value: Shoot Meristem vs. Above Shoot Meristem
  misc_feature: MA Experiment ID: 108543 Result: Down-regulated in Transcription
  misc_feature: MA Experiment ID: 108544 Result: Down-regulated in Transcription
  misc_feature: MA Experiment ID: 108545 Result: Up-regulated in Transcription
  misc_feature: MA Experiment 108545 PARAMETER Experiment Name: Zm_Imbibed_Seeds_P Parameter: Age (day) Value: 3 vs. 2
  misc_feature: MA Experiment 108545 PARAMETER Experiment Name: Zm_Imbibed_Seeds_P Parameter: Organism Value: Zea mays
  misc_feature: MA Experiment 108545 PARAMETER Experiment Name: Zm_Imbibed_Seeds_P Parameter: Plant Line Value: 35A19
  misc_feature: MA Experiment 108545 PARAMETER Experiment Name: Zm_Imbibed_Seeds_P Parameter: Tissue Value: Aerial vs. Embryo
  misc_feature: MA Experiment ID: 108546 Result: Down-regulated in Transcription
  misc_feature: MA Experiment 108546 PARAMETER Experiment Name: Zm_Imbibed_Seeds_P Parameter: Age (day) Value: 3 vs. 2
  misc_feature: MA Experiment 108546 PARAMETER Experiment Name: Zm_Imbibed_Seeds_P Parameter: Organism Value: Zea mays
  misc_feature: MA Experiment 108546 PARAMETER Experiment Name: Zm_Imbibed_Seeds_P Parameter: Plant Line Value: 35A19
  misc_feature: MA Experiment 108546 PARAMETER Experiment Name: Zm_Imbibed_Seeds_P Parameter: Tissue Value: Roots vs. Embryo
  misc_feature: MA Experiment ID: 108547 Result: Up-regulated in Transcription
  misc_feature: MA Experiment 108547 PARAMETER Experiment Name: Zm_Imbibed_Seeds_P Parameter: Age (day) Value: 4 vs. 2
  misc_feature: MA Experiment 108547 PARAMETER Experiment Name: Zm_Imbibed_Seeds_P Parameter: Organism Value: Zea mays
  misc_feature: MA Experiment 108547 PARAMETER Experiment Name: Zm_Imbibed_Seeds_P Parameter: Plant Line Value: 35A19
  misc_feature: MA Experiment 108547 PARAMETER Experiment Name: Zm_Imbibed_Seeds_P Parameter: Tissue Value: Aerial vs. Embryo
  misc_feature: MA Experiment ID: 108556 Result: Down-regulated in Transcription
  misc_feature: MA Experiment 108556 PARAMETER Experiment Name: Zm_Drought_P Parameter: Age (day) Value: 9
  misc_feature: MA Experiment 108556 PARAMETER Experiment Name: Zm_Drought_P Parameter: Organism Value: Zea mays
  misc_feature: MA Experiment 108556 PARAMETER Experiment Name: Zm_Drought_P Parameter: Plant Line Value: 35A19
  misc_feature: MA Experiment 108556 PARAMETER Experiment Name: Zm_Drought_P Parameter: Timepoint (hr) Value: 24
  misc_feature: MA Experiment 108556 PARAMETER Experiment Name: Zm_Drought_P Parameter: Tissue Value: Aerial
  misc_feature: MA Experiment 108556 PARAMETER Experiment Name: Zm_Drought_P Parameter: Treatment Value: Drought vs. No Drought
  misc_feature: MA Experiment ID: 108687 Result: Down-regulated in Transcription
  misc_feature: MA Experiment 108687 PARAMETER Experiment Name: Zm_Embryos-Flowers__P Parameter: Tissue Value: Embryo vs. Aerial+
  misc_feature: MA Experiment ID: 20000480 Result: Down-regulated in Transcription
  misc_feature: MA Experiment 20000480 PARAMETER Experiment Name: Zm_Drought_P Parameter: Age (day) Value: 11
  misc_feature: MA Experiment 20000480 PARAMETER Experiment Name: Zm_Drought_P Parameter: Organism Value: Zea mays
  misc_feature: MA Experiment 20000480 PARAMETER Experiment Name: Zm_Drought_P Parameter: Plant Line Value: 35A19
  misc_feature: MA Experiment 20000480 PARAMETER Experiment Name: Zm_Drought_P Parameter: Timepoint (hr) Value: 72
  misc_feature: MA Experiment 20000480 PARAMETER Experiment Name: Zm_Drought_P Parameter: Tissue Value: Aerial
  misc_feature: MA Experiment 20000480 PARAMETER Experiment Name: Zm_Drought_P Parameter: Treatment Value: Drought vs. No Drought
  misc_feature: MA Experiment ID: 20000492 Result: Down-regulated in Transcription
  misc_feature: MA Experiment 20000492 PARAMETER Experiment Name: Zm_Hybrid_Seed_Dev_P Parameter: DAP Value: 12
  misc_feature: MA Experiment 20000492 PARAMETER Experiment Name: Zm_Hybrid_Seed_Dev_P Parameter: Organism Value: Zea mays
  misc_feature: MA Experiment 20000492 PARAMETER Experiment Name: Zm_Hybrid_Seed_Dev_P Parameter: Plant Line Value: 35A19
  misc_feature: MA Experiment 20000492 PARAMETER Experiment Name: Zm_Hybrid_Seed_Dev_P Parameter: Tissue Value: Fert Kernel vs. Unfert Floret
acctatatttgttaagtttcaggcagagagaaagatagaggagcaaacagcaactccagaagatgagtctccctcgccgccgccaccttgtcctgctcgcctgcctcctggtcttcctcgtcttcgccgcgtccgcgtcgacgagttccgccgaggtggccccgaagcgtggcggtggacttcgtgcggcggtcgtgccggtcgacggagtacccgcgcgtgtgcgagagcacgctggtcccctgcgcggctggcgtggggcgcagcccgcgcctgctggcgcgagcggcgctggtggttggcgccgaccgcgcgcgcaactgctcctcctacatccgcggcggcggcggcggcgcgatgaaggactgcgcggagctggcgcgcgacgcggaggagcggctgcggcagtccgcggcagagatggagcggatgggccgtgccggcacaccgcgcttcgcttgggccctcagcaacgtccagacctgggccagcgccgcgctcaccgacacctccacctgcctcgactccctcgcccagcagtcccgcggtggcaaggacagcgacgacgccgtcagggtgaagaggagggtggtggccgtcgcgcaggccaccagcaacgcgctcgggctcgtcaacaggctccagccggcgccgcaccggcggcgtctcctgtgactcttgtagcagcagctagccacggaaatctttgatggttcctcgttctcatccatgtcgacatcatccgtcccctgcatctccttctccaattgccatgtatgcgtgtatgtatgggtatggtatgcgtgtatgtatggactacggatcgatcagctttctcgattgcgtggttgtcgttgtctatctgtagtaactctgcagctgggatcactcaattcccgctagtggttgttcaggattatgctcaagtttatgcgtagtaaatagcaaaatctttgatt

SEQ ID NO: 419 - protein, 215 aa, Zea mays subsp. mays
  peptide (1)..(215): Ceres Seq. ID no. 14305534
MSLPRRRHLVLLACLLVFLVFAASASTSSAEVAPKRGGGLRAAVVPVDGVPARVREHAGPLRGWRGAQPAPAGASGAGGWRRPRAQLLLLHPRRRRRRDEGLRGAGARRGGAAAAVRGRDGADGPCRHTALRLGPQQRPDLGQRRAHRHLHLPRLPRPAVPRWQGQRRRRQGEEEGGGRRAGHQQRARARQQAPAGAAPAASPVTLVAAASHGNL

SEQ ID NO: 420 - protein, 119 aa, Zea mays subsp. mays
  peptide (1)..(119): Ceres Seq. ID no. 14305535
PIFVKFQAERKIEEQTATPEDESPSPPPPCPARLPPGLPRLRRVRVDEFRRGGPEAWRWTSCGGRAGRRSTRACARARWSPARLAWGAARACWRERRWWLAPTARATAPPTSAAAAAAR

SEQ ID NO: 421 - DNA, 720 bp, Zea mays subsp. mays
  misc_feature (1)..(720): Ceres Seq. ID no. 15226033
acgagaccattrcctagamcatcctaatcsaaaacttccatcgccggccctttttccgtgcacaaaggcgtgtgtgtgcgtatatatatacacatacacacactgctccatgccaccgttgtagcaagttctcccatctagcaacaccataatcgcaggagaatcgctgctccaccagactcggtttcctcttgcttcagcgtcaaaatcatggccgcagctggcaagtcgtcgtcggccatggaggagacggttgcggcgacggccgccgcgcgggggcggcgcggcggccaccgtcgccctcgtcatcctytacctcgtcggctgcagcgcctacaagaacgcgcaggccgccgccatcttcggacgccgcaagtattagctagctagctgccatgttagtttttttttgcgcttttttttctttattgtcatgtgggttgtggattatggattgcgtatgtgtgtcccccctggtggagagaagcatttgtagcggtggcgtggtgtgtgtttccggacttggttcatcatggtagtgtgatacatgtgtaagattagttactttaattactaattgtgctgttttccaaaamaaaaaaaaaaaaaaaaaaaaaaaaaaaaaaaaaaaaaaaaaaaaaaaaaaaaaaaaaaaaaaaaaaamggaaaaaaaaaaaaaaaaaggtttatcgawaccgccaacctcaagggggggcccgg

SEQ ID NO: 422 - protein, 59 aa, Zea mays subsp. mays
  peptide (1)..(59): Ceres Seq. ID no. 15226034
  misc_feature (35)..(35): Xaa is any aa, unknown or other
MAAAGKSSSAMEETVAATAAARGRRGGHRRPRHPXPRRLQRLQERAGRRHLRTPQVLAS

SEQ ID NO: 423 - protein, 49 aa, Zea mays subsp. mays
  peptide (1)..(49): Ceres Seq. ID no. 15226035
  misc_feature (25)..(25): Xaa is any aa, unknown or other
MEETVAATAAARGRRGGHRRPRHPXPRRLQRLQERAGRRHLRTPQVLAS

SEQ ID NO: 424 - protein, 47 aa, Zea mays subsp. mays
  peptide (1)..(47): Ceres Seq. ID no. 15226036
MLVFFCAFFSLLSCGLWIMDCVCVSPLVERSICSGGVVCVSGLGSSW

SEQ ID NO: 425 - DNA, 1020 bp, Zea mays subsp. mays
  misc_feature (1)..(1020): Ceres Seq. ID no. 12588648
attgttgttaacaaattggtatcaggggtcgtagatcctgttttccagtgccttattcattattacatcggttgattcgagcaacggattggtctggattgatctcgggtgcgtcagtgagctgctgattcctcgtggtctcctataattctgtccacgctcggtcgatttgtggtgaattaggtctggagccgcatgagatccaccattcccacttcactagatttcgccagaggttggggcaatggattcgaacatgaaggtgctccttgatgagatgaaggcgatgcacgattcggtcgaccatctacagggttctctcacgcaacggatggagggcgtcgagaaatccttgggagacccattccagtccctggagtcgaaggcgacgacatttggagagtggcaacccgtgtcgaggcgtcgccgcgtcggtggacgaacttcgcgaggaggtcagcgtgcttcacaagtcggtgatcgagtggtgctcaattcctcacacccagcggcgcatcaccaatgatagcgccgttgggcaccccgatgacaagcattaccgggagtctgcgtttgggtctgtctatacccactcgcataccccggtcacgagtatgacacctgagccacctcctaaagtgcatatctctgatccacatgctaatatgagtgatctgcatgagcgatccgatcaatatcattctaagggtggtcatcgtcgatttcattcggacaatttaatgtccagccaacttcccaaattgagtttccccaattttgatggttctaacccccaaattgtggattaaacgtagtgaagactattttgatttgtaccaagtagctcctagtatatcgattagagttactacaatgcatttttctggtgctctagccctctggttacaatcggtagaggaatgccttagaagtatggcttggcttgaattttgttccatactccttggacgttttggtcatgatcagcatgaaattttggtccggcgatttttgcctgtc

SEQ ID NO: 426 - protein, 93 aa, Zea mays subsp. mays
  peptide (1)..(93): Ceres Seq. ID no. 12588649
MDSNMKVLLDEMKAMHDSVDHLQGSLTQRMEGVEKSLGDPFQSLESKATTFGEWQPVSRRRRVGGRTSRGGQRASQVGDRVVLNSSHPAAHHQ

SEQ ID NO: 427 - protein, 89 aa, Zea mays subsp. mays
  peptide (1)..(89): Ceres Seq. ID no. 12588650
MKVLLDEMKAMHDSVDHLQGSLTQRMEGVEKSLGDPFQSLESKATTFGEWQPVSRRRRVGGRTSRGGQRASQVGDRVVLNSSHPAAHHQ

SEQ ID NO: 428 - protein, 82 aa, Zea mays subsp. mays
  peptide (1)..(82): Ceres Seq. ID no. 12588651
MKAMHDSVDHLQGSLTQRMEGVEKSLGDPFQSLESKATTFGEWQPVSRRRRVGGRTSRGGQRASQVGDRVVLNSSHPAAHHQ

SEQ ID NO: 429 - DNA, 1604 bp, Zea mays subsp. mays
  misc_feature (1)..(1604): Ceres Seq. ID no. 15180071
  misc_feature: MA Experiment ID: 108523 Result: Up-regulated in Transcription
  misc_feature: MA Experiment 108523 PARAMETER Experiment Name: Zm_42deg_Heat_P Parameter: Age (day) Value: 8
  misc_feature: MA Experiment 108523 PARAMETER Experiment Name: Zm_42deg_Heat_P Parameter: Organism Value: Zea mays
  misc_feature: MA Experiment 108523 PARAMETER Experiment Name: Zm_42deg_Heat_P Parameter: Plant Line Value: 35A19
  misc_feature: MA Experiment 108523 PARAMETER Experiment Name: Zm_42deg_Heat_P Parameter: Temperature (deg C) Value: 42 vs. 22
  misc_feature: MA Experiment 108523 PARAMETER Experiment Name: Zm_42deg_Heat_P Parameter: Timepoint (hr) Value: 6
  misc_feature: MA Experiment 108523 PARAMETER Experiment Name: Zm_42deg_Heat_P Parameter: Tissue Value: Aerial
cattctcatcactctgcaatattcgggtatctcacataaagtttttattgcagttctatttccttttctcatgctgtgcatctttcttatttttgttcaaacaatataatgataagttcatttacttattactgtgattgtttggagcagcacacatgttattataagtcaaattttaagtcaaattattctcgacacgtgattcggttcatggcctatagtaaaaaggatagtttacagtaataacatgtgtgctgctccaaacattatgaggatagtaagtcagttcatttttagtttagaattggctctctcttatttttggtcaaattctagaatgatcagatgctcgacaatacttattattgtgattgtttgctcattttcagttcatggcctgtcttattttttcccctacaagtcatctacgacagtttgccagtagcactaaatcttttaactgtggtaggctatgagtttcatgcttcacattttcatagcagtagcaataactcttttatgtgactcgaaatatgaccactacataccacgttcggttaggaaatcatgttgcagtgtttcttgttacaacctggtaatgtggatgctacattttaaattagttagtgacctaaataatgatcttattcaactaactttatcttattttgtagccttgtgcttctttctactgagttgtcttgtaccaactaaaaatagaggtattttatctcaggttctctactatgtgtaatctcatatcaagattaatgagtatcgtgatcgtataattttgaatcctatcaacccatatggcaaggcaaagaaaatgacagtggacatcattctagattttacaaaatcaaaggagcaaccagacatggctgtcatgatctaagatacttcaacgtgattggatcgaacccaaacatatgactaggagaagctccaaggccactttgtcaagggtctctgcaatgcacctactggtgcatgatttactggaggttgtgcgcatgaatgtgccacacattggtatgggggttggagttgaagcaggtgattttcaccaacattggtttgcgaactggagttgaagcaggttattcatttgatgaaagtgtgcgtataatattatctcaaatcccagtcgctgcttgaactgttttgttgtccctatggcaggagacatgattgttattcctatcatgtgcacactgcctcctcgctgtcatttgtcgtcactctcgtagtcctgataccggagcatggttgccaggggagagcagtccaaggcaaatttgccatgttggagcagtcacaggagccaaggggctgcagtcacaggtcctgctagccaggatggagcaatcataggacctcctagcagtccaaggaaaatttgcgaggtggagtagttgcaacttttgaaacccacgtgataacatgctcaagcgttcgtatgataaaaaagatggcacataatcaaaagaagatctcatgttctgcgtttgtgaacctgtttgtattttttgaacttgttttgtgaacctctatttgtaaacctgtaaaatctgaggttgtgaatagatttgggtaacttc

SEQ ID NO: 430 - protein, 93 aa, Zea mays subsp. mays
  peptide (1)..(93): Ceres Seq. ID no. 15180072
MSFMLHIFIAVAITLLCDSKYDHYIPRSVRKSCCSVSCYNLVMWMLHFKLVSDLNNDLIQLTLSYFVALCFFLLSCLVPTKNRGILSQVLYYV

SEQ ID NO: 431 - protein, 90 aa, Zea mays subsp. mays
  peptide (1)..(90): Ceres Seq. ID no. 15180073
MLHIFIAVAITLLCDSKYDHYIPRSVRKSCCSVSCYNLVMWMLHFKLVSDLNNDLIQLTLSYFVALCFFLLSCLVPTKNRGILSQVLYYV

SEQ ID NO: 432 - protein, 65 aa, Zea mays subsp. mays
  peptide (1)..(65): Ceres Seq. ID no. 15180074
MCAAPNIMRIVSQFIFSLELALSYFWSNSRMIRCSTILIIVIVCSFSVHGLSYFFPYKSSTTVCQ

SEQ ID NO: 433 - DNA, 1554 bp, Zea mays subsp. mays
  misc_feature (1)..(1554): Ceres Seq. ID no. 15179135
aatttttcttgaagttaatggagccgagctacatcacgtccgccctccccctctctctccctctccctctctcgacgacacaccaggccaccacgcacatgctttgtcccatggatgccgaccacctcatggtattcaagaccatgctcgccgtcaggtggtagtcccggcgagcgagatctccccactccaggctctctcccatcgctcgctgccgcctcatgttgtttgcggccgtgctcgccaaccgcggcacggaggcgtcgatccgaccgggagcccttcgcaatggacaaagccttcctcctctccggcaatgagggcatcgtcggctcgtcgctaacgtgagcacgtggcagaccctgctgcccccatccttcttcatcttcactaagtgaggaactctctcgacccccttccccacccttcttgtcttcggagttcggatggctggagaacacggtgtttggtcatggcttctagaaggtggtgttttgcatttaaaaaggaaaaaattggagcataatccaaagctttgtttgcagatggggaagaggtaggagtagctcagcagtaggatggagtggccaggacagctcggtgcccacccgtcttcatcgatcgggaccctcttcccctctagcgagctattcccagtttcgagaacaagattaaaatagcttcgtaggcttttatgtggtttagatttgcatatctatctctcaccattaaagcacaaccagatctggtagcttcagctccaaacaacaagaaacactgagagctgtgaagagtctgagatggcttatgtaagccccgcgactgatgatacatcaacagatctagatactgacgagaagaaccaaatgggactcccttctggaaggtcatcagcttcaagtgcggcttcgctgcatcagcgccaaccgcaatcagacattcatagtcatgagtaccatcagctttctcttttgcttatgttagccagcctgacttctattttccacccccttgtatgtctggtggacacgcagatggccaaaccagagtaccaggctatggagaccggacgagagtccaaggagaccaccccgcgattcgtcaacgtctccgggatggcgaagccgcaacccgacgcctccctgtcctttttgttacctccggacgccgctgccgaggggctgcatgacatgattctgaatgctcgcgacgaccttgatgttttatctccgtggtcggtgggggcgtcggcgtgtggtgtaggcagatgagggaggcgacgatgttcttctgtggtgacccatcgacgccgcagtgggtcgaccaacaccatcaccacatggagattcacagggctctcttctgaagcagctagcaaacaagagtatcagtggtggtgtagctgttgttctagctgaaacgaacaagtaagagatggagatggacatagcaaagctagaagttggcttcatgggaacatctgtaatatgtaggagtgacgctcctctaattctagcagacttgaggaaggtataatattcataaattattgtt

SEQ ID NO: 434 - protein, 156 aa, Zea mays subsp. mays
  peptide (1)..(156): Ceres Seq. ID no. 15179136
MAYVSPATDDTSTDLDTDEKNQMGLPSGRSSASSAASLHQRQPQSDIHSHEYHQLSLLLMLASLTSIFHPLVCLVDTQMAKPEYQAMETGRESKETTPRFVNVSGMAKPQPDASLSFLLPPDAAAEGLHDMILNARDDLDVLSPWSVGASACGVGR

SEQ ID NO: 435 - protein, 134 aa, Zea mays subsp. mays
  peptide (1)..(134): Ceres Seq. ID no. 15179137
MGLPSGRSSASSAASLHQRQPQSDIHSHEYHQLSLLLMLASLTSIFHPLVCLVDTQMAKPEYQAMETGRESKETTPRFVNVSGMAKPQPDASLSFLLPPDAAAEGLHDMILNARDDLDVLSPWSVGASACGVGR

SEQ ID NO: 436 - protein, 113 aa, Zea mays subsp. mays
  peptide (1)..(113): Ceres Seq. ID no. 15179138
IFLEVNGAELHHVRPPPLSPSPSLDDTPGHHAHALSHGCRPPHGIQDHARRQVVVPASEISPLQALSHRSLPPHVVCGRARQPRHGGVDPTGSPSQWTKPSSSPAMRASSARR

SEQ ID NO: 437 - DNA, 1395 bp, Zea mays subsp. mays
  misc_feature (1)..(1395): Ceres Seq. ID no. 13587423
ggcggtttcgaaaaacctttttttttttttttttcttttttttttttttttttttttttttttttttttttttttttttttttttttttttttttttttttttttttttttttattcgatattgaagttatggggtaggtcgcgtaatcaagaactgaagttaaagattttgctacacacctagatatatgtatctagataaaaacattatttgaaacagagagaatacatgtaaacactggaaaataggacatatattcctgttgatatagttgctctggaatacactacagtgatcatggagtaacccatgcaccttggaataattggctcactgtttttcccaagatccattccaaatctgactgggaaactggtatcttgctggcgacatgagaaatcgcctcccttcctcctttgtaaccacattcaggaacaacataggggaagtcacttccccacattactcgactggctccatagtgagatatcacactggaaagaagctgagcagtgtcttcatatggatatgcttctcttgttatgcggaaaagagcactgtatttgacataaacctgtgggaatctggataagcttagaaatgaagagaatgccttctcttcttcatcgttcgttggtggcttgcagaaagccatatggtcaagaataacggtagttgcaggataatccctacacagttcctctatttcttgaatatatggaccaactcccttcatcgtcattattccaagtggtactccaagttcccctgccttcgaaaataatgaccttccaacctcattggtcatcttttgaccagatggccataagtttgggttgaacctcacagcacggtatttttcttgtacaatcagatgttcaagctgtttaatcccagtcccatcgtctgcaggattcgcaagacagcaaccaacgaacttggatgggtatttcttcaacacactagttaccaacgaatgatcaaacatatgattaataggttgaacaataacagccccgtccactccagcttcactcatacactcgagtaagaagtcggcgtcgccacgcagcgtgggttcctggcctgggaagtacgggtactcctccttggcctgctgtggcgtggcccagacgtgcaggtgggagtcgatgaccttgcaggaggaagaagcggccatggcggcggcaatggtggtggtggcggtggagaggagcagccgcctccttgttgctgtggtcgcgaaagagaggaggtcgtgagaggcggtagtggcgcgggggcacaggaaccggcacggggacggggcaaccactggtgatgatgacgataaagccatagagtgcctgccgccgagtactgcgctccacttttcgattaggatgttctaggta

SEQ ID NO: 438 - protein, 85 aa, Zea mays subsp. mays
  peptide (1)..(85): Ceres Seq. ID no. 13587424
MHLGIIGSLFFPRSIPNLTGKLVSCWRHEKSPPFLLCNHIQEQHRGSHFPTLLDWLHSEISHWKEAEQCLHMDMLLLLCGKEHCI

SEQ ID NO: 439 - protein, 66 aa, Zea mays subsp. mays
  peptide (1)..(66): Ceres Seq. ID no. 13587425
MRNRLPSSFVTTFRNNIGEVTSPHYSTGSIVRYHTGKKLSSVFIWICFSCYAEKSTVFDINLWESG

SEQ ID NO: 440 - protein, 60 aa, Zea mays subsp. mays
  peptide (1)..(60): Ceres Seq. ID no. 13587426
AVSKNLFFFFFLFFFFFFFFFFFFFFFFFFFFFFFFFYSILKLWGRSRNQELKLKILLHT

SEQ ID NO: 441 - DNA, 680 bp, Zea mays subsp. mays
  misc_feature (1)..(680): Ceres Seq. ID no. 15178593
  misc_feature: MA Experiment ID: 20000535 Result: Down-regulated in Transcription
  misc_feature: MA Experiment 20000535 PARAMETER Experiment Name: Zm_Hybrid_Seed_Dev_P Parameter: DAP Value: 30 vs. 12
  misc_feature: MA Experiment 20000535 PARAMETER Experiment Name: Zm_Hybrid_Seed_Dev_P Parameter: Organism Value: Zea mays
  misc_feature: MA Experiment 20000535 PARAMETER Experiment Name: Zm_Hybrid_Seed_Dev_P Parameter: Plant Line Value: 35A19
  misc_feature: MA Experiment 20000535 PARAMETER Experiment Name: Zm_Hybrid_Seed_Dev_P Parameter: Tissue Value: Embryo vs. Unfert Floret
aatggatgtaacagcagtggcagcatcaccagcaacagcacctcttctggcgcctagaggaggaaggagacagaccagaggtgctctggctctaatcgtggctgctgtctgtcgctgcctactcgtactccgcgctgtggaggtccgtcatggagaaggacctcggggaccgaaacgacccggccctcgccatctggccggcggtggcgtgcgcgctcagccgcggggacgggaacgtgggcggcctcctgcccctgagcccgccgcgcccgtgctggccctcgtcctcgtcctcgtcgtccgcgccctcctcgtcgtcctcctccaccaccgcgtggtccggggccagcagcggcggcaggtacgcggtggccagcgcgctgcacgacgcccgccgccgcgaccacgcccgcagcacgcgccgccgcttgttgaacgggttctccggcttcgcgatctccttggcggccgccgtcgcagccgcctccgccaggctcgtgaacgacttggacttgcccgcgtagaagttggacaggccccgcctacgaattcgttcctcggttagttcggtgttcaaggattatatattattactattctcattatagggcaagaaagagaggatcagcagggaaatgcattgctgctgtcaaaaccaaaacaaaaaaaaaaaaaaaaaa

SEQ ID NO: 442 - protein, 187 aa, Zea mays subsp. mays
  peptide (1)..(187): Ceres Seq. ID no. 15178594
MDVTAVAASPATAPLLAPRGGRRQTRGALALIVAAVCRCLLVLRAVEVRHGEGPRGPKRPGPRHLAGGGVRAQPRGRERGRPPAPEPAAPVLALVLVLVVRALLVVLLHHRVVRGQQRRQVRGGQRAARRPPPRPRPQHAPPLVERVLRLRDLLGGRRRSRLRQARERLGLARVEVGQAPPTNSFLG

SEQ ID NO: 443 - protein, 124 aa, Zea mays subsp. mays
  peptide (1)..(124): Ceres Seq. ID no. 15178595
MEKDLGDRNDPALAIWPAVACALSRGDGNVGGLLPLSPPRPCWPSSSSSSSAPSSSSSSTTAWSGASSGGRYAVASALHDARRRDHARSTRRRLLNGFSGFAISLAAAVAAASARLVNDLDLPA

SEQ ID NO: 444 - DNA, 1234 bp, Zea mays subsp. mays
  misc_feature (1)..(1234): Ceres Seq. ID no. 13598886
cacaaaagcatcacaattataatatcattcacaactagatcatttacagatagctagctagataattcacaaaagctccagagatgatcagtcactaaagcaccacagcgacaccactccagcttaaagcagttcaaaagcccacaactatatcactaatgtttcatatcactccagctattgttcaaaagcccacaactacatctttttcttggctctcagtctacagttgagtttggagctcttgcacctttactgaaatagagcttgtcttgaaggagttctaaaggacaacattgtaaataagttaacttgagctcggcaagacatgggaaacaaattgtgtagaagacatcacaaactgtccatcttcatccggtgttgcaaccgttgctaccatatcatcaatagctttctgaatagtttcactaaatcttttcttcttgctataatgcatctccttgaaaagataaattgcacttggttgggtatctttatattttcttgcccgcagatcaccattgtggtcattcccatactgatcgcatatcattttgatttgcagttaccagccacaatgtcacactcagcaatgcagatctctattcctttttggggtttactccgtgttaattgagatgcttcttgaaacagggtggtgtaatgaaattgcctgcaaattcatgacaaatctaagcctaaggtgtgcctttccagcagctgcttcaaatgctttggacggaacctgtagataatgtgttcttatctactttcttgctggcgcgtgaaatggatgatgggtcgggggcatctcgcgagatgccagcaacggactccgacacgaaccattgccagaagtccatcaccgtcgtggcgaagtacttcctagctgagttgatctccgccaccgccgccgggtggtccaccagagcgacgaagatcgcccataccggcggtgctgaacgccgctggagcaggaggcagaggcgagccgcgaggcgggggaggcgatgggtcggaggtgaagccgttggagcaggaggcggcggcgctaaatcaccaagagcagcagatccgaagggagcatgggagcaagcgagtagccaacgacgcatggcagatgaccggagcccggagcgagcagcatactgcgcggggctggaggcagggcgagggcgcgatacggctagggttgagggcggaggcggcatggtggcgccgtcgagagaagggg

SEQ ID NO: 445 - protein, 168 aa, Zea mays subsp. mays
  peptide (1)..(168): Ceres Seq. ID no. 13598887
MLWTEPVDNVFLSTFLLAREMDDGSGASREMPATDSDTNHCQKSITVVAKYFLAELISATAAGWSTRATKIAHTGGAERRWSRRQRRAARRGRRWVGGEAVGAGGGGAKSPRAADPKGAWEQASSQRRMADDRSPERAAYCAGLEAGRGRDTARVEGGGGMVAPSREG

SEQ ID NO: 446 - protein, 148 aa, Zea mays subsp. mays
  peptide (1)..(148): Ceres Seq. ID no. 13598888
MDDGSGASREMPATDSDTNHCQKSITVVAKYFLAELISATAAGWSTRATKIAHTGGAERRWSRRQRRAARRGRRWVGGEAVGAGGGGAKSPRAADPKGAWEQASSQRRMADDRSPERAAYCAGLEAGRGRDTARVEGGGGMVAPSREG

SEQ ID NO: 447 - protein, 138 aa, Zea mays subsp. mays
  peptide (1)..(138): Ceres Seq. ID no. 13598889
MPATDSDTNHCQKSITVVAKYFLAELISATAAGWSTRATKIAHTGGAERRWSRRQRRAARRGRRWVGGEAVGAGGGGAKSPRAADPKGAWEQASSQRRMADDRSPERAAYCAGLEAGRGRDTARVEGGGGMVAPSREG

SEQ ID NO: 448 - DNA, 721 bp, Zea mays subsp. mays
  misc_feature (1)..(721): Ceres Seq. ID no. 12588845
attttcgccccaggcgcagccgcgcgcaggcaggagtttcggttcaattcccgagccgagccgagctcaccctgcgtgcgatgggccgcagggggagtggtggggaagaccatcggccgcagcaggagcaggaggagcagcgcgcggcggtgccgaggcgcggccgctggttggacgaggagcggccgcacccgcaccagcccgcggcggcggggtggaggtgccggtcctgcgcggcggcggcgatcgcggactgcgtcgcgctggtgctgcccgtgcgcggtcgtcgcgctgctggccctggcgctcgtcagggcgccgctcgcagtgggccgccggctccggatgcggaggcggtccgcgctgcgcaggaagcgggtgcgcgacgtcgcggccaaggttgcgccgagggccgcgcccggcgcgggcagcgggatgacgccgctggacccggcggccgccgccacgccggtgcggcagcagcagcagcagacacagacgcaggcagaggtggagtaagttgtctgttgatgatttactgtttcaaacaagaatagcagcatcacttatgagcagccagcctgaagcttgtcttggttttatcactctgtaaactgatttgctctagcgacatgtcttggttttatcactctgtaaactgatttgctccagcgacatgtggttcttacatttgaaaccctcctgaacgcatactgtagac

SEQ ID NO: 449 - protein, 184 aa, Zea mays subsp. mays
  peptide (1)..(184): Ceres Seq. ID no. 12588846
FRPRRSRAQAGVSVQFPSRAELTLRAMGRRGSGGEDHRPQQEQEEQRAAVPRRGRWLDEERPHPHQPAAAGWRCRSCAAAAIADCVALVLPVRGRRAAGPGARQGAARSGPPAPDAEAVRAAQEAGARRRGQGCAEGRARRGQRDDAAGPGGRRHAGAAAAAADTDAGRGGVSCLLMIYCFKQE

SEQ ID NO: 450 - protein, 172 aa, Zea mays subsp. mays
  peptide (1)..(172): Ceres Seq. ID no. 12588847
IFAPGAAARRQEFRFNSRAEPSSPCVRWAAGGVVGKTIGRSRSRRSSARRCRGAAAGWTRSGRTRTSPRRRGGGAGPARRRRSRTASRWCCPCAVVALLALALVRAPLAVGRRLRMRRRSALRRKRVRDVAAKVAPRAAPGAGSGMTPLDPAAAATPVRQQQQQTQTQAEVE

SEQ ID NO: 451 - protein, 158 aa, Zea mays subsp. mays
  peptide (1)..(158): Ceres Seq. ID no. 12588848
MGRRGSGGEDHRPQQEQEEQRAAVPRRGRWLDEERPHPHQPAAAGWRCRSCAAAAIADCVALVLPVRGRRAAGPGARQGAARSGPPAPDAEAVRAAQEAGARRRGQGCAEGRARRGQRDDAAGPGGRRHAGAAAAAADTDAGRGGVSCLLMIYCFKQE

SEQ ID NO: 452 - DNA, 1055 bp, Zea mays subsp. mays
  misc_feature (1)..(1055): Ceres Seq. ID no. 15178624
gacctgatttctcctgtgctggctttcaaggtagaaaagaagtcttttgttccatcatggccttaccaactccagcgcctattttggttgacgagaaccaacagataaatagaggtaagagggccaatggaccaagggccaaagggctgaagccatccgagaatcctggcaatcaagggaggagagctcttaaggatttgtccaacttctctaaaggcactggtttgaaggacacttccaccctgaaagagaagtcccagcagaaaactcgtagtaatgtggccaacactattaaaggcaatgctttgaaggacaagcccatcctgaaagagaagtccacccaggaacagaggtcaaaagctcttaagaacccaatgaaaattttagttgatgaagagatcaaaatgtgccatgagtgggctaaggatggggtggagggatttcactcaacacaaaataattctcagaagttggataaggatctgctagacaaacgtgtcaagaagaaagtggcggcagtaaactcagccttgtgtggttggccagatacagtatttgattctctaatgtatccatctatggaggttgctgagcttttttatgaacaaaacgtgctggaggtggaacctgagattctcccggacatcagttggcgtctctctagttcagtagatggtaaagcaaagattgctgaaggccgtcttaccgatgatgagcttgaccagtaccattctttggagaacaatccaattatttttgagctgagagacgagccagcgatcccgcagctgggagtgtattgaagaatctgtgccagctggacagaaagctctgtttccttgctgcttgctctggagtctggagttgtctagtctagaatgctagtaggtcttgaccctggtgttttccccagctatgttctggtgatgtaggatttcagtttgagtactggtaccacttccagctgaagcgacagcgttatgcctgctgatgggtgatggttgtggaacagcggcgatataattataatattttcaacaaaaaaaaaaaaaaaa

SEQ ID NO: 453 - protein, 266 aa, Zea mays subsp. mays
  peptide (1)..(266): Ceres Seq. ID no. 15178625
PDFSCAGFQGRKEVFCSIMALPTPAPILVDENQQINRGKRANGPRAKGLKPSENPGNQGRRALKDLSNFSKGTGLKDTSTLKEKSQQKTRSNVANTIKGNALKDKPILKEKSTQEQRSKALKNPMKILVDEEIKMCHEWAKDGVEGFHSTQNNSQKLDKDLLDKRVKKKVAAVNSALCGWPDTVFDSLMYPSMEVAELFYEQNVLEVEPEILPDISWRLSSSVDGKAKIAEGRLTDDELDQYHSLENNPIIFELRDEPAIPQLGVY

SEQ ID NO: 454 - protein, 248 aa, Zea mays subsp. mays
  peptide (1)..(248): Ceres Seq. ID no. 15178626
MALPTPAPILVDENQQINRGKRANGPRAKGLKPSENPGNQGRRALKDLSNFSKGTGLKDTSTLKEKSQQKTRSNVANTIKGNALKDKPILKEKSTQEQRSKALKNPMKILVDEEIKMCHEWAKDGVEGFHSTQNNSQKLDKDLLDKRVKKKVAAVNSALCGWPDTVFDSLMYPSMEVAELFYEQNVLEVEPEILPDISWRLSSSVDGKAKIAEGRLTDDELDQYHSLENNPIIFELRDEPAIPQLGVY

SEQ ID NO: 455 - protein, 142 aa, Zea mays subsp. mays
  peptide (1)..(142): Ceres Seq. ID no. 15178627
MKILVDEEIKMCHEWAKDGVEGFHSTQNNSQKLDKDLLDKRVKKKVAAVNSALCGWPDTVFDSLMYPSMEVAELFYEQNVLEVEPEILPDISWRLSSSVDGKAKIAEGRLTDDELDQYHSLENNPIIFELRDEPAIPQLGVY

SEQ ID NO: 456 - DNA, 1014 bp, Zea mays subsp. mays
  misc_feature (1)..(1014): Ceres Seq. ID no. 14305836
acaaattttccagctcactcagcgtttctctctgctcgcctcggcctccaactccggccgtggtggccaccggaagcgcgtctcccggccccggctcagcggtctgcgttctccctgctctcccaagctatgcgcccctgtcctgttccctgtgcgcgctgttcctgctcgctttggcgtccacgccatgaagccctgcgctcgtcgcggcagactccagtcctcctctgccgagcagcttgcccagccttcttctccctacacgccggagctcgcccagccgaccgaagctctaagctccagccatggcgcgtcctcgctccctcttccctgctcgccggttctccttgccgagctcccctacgtgctgagctctctgctgcggctttcctttccccaagctcctccagccgcgcagtccagctgcttcttcctcctcctggcgttcttcctgtgccatgcgccctgcccatctcccagttccagctgccgcatgcgcagctgctccttctgcccagccgccccggatcttgctcggccatagcaagttcctccctatcctctgctcgcgggctgctccagtcggtcgcgcgtccagcttgcccagtctgcacgccacgctctcttgtcgtggctttctgcttcctcgtcgctcgtagcgttctgttgttcctgcgcgtgctgccgcgaagctccctgttcagttcgcctccgtcacgttatcgtgctcgcgaaactgctcgcagtcaatatcaagtccgtgacgcccacgttggacacggtaaaacgctgtgtgtgctggtgtccgaactcgccctggtcatggcgtttggtaccgtgccgtgctttttctctacgcacgtcctcctgttagctgtcgcgactgccgtcaaatcatcggagtcgttcaacttgccgatcacatcttggtcggtcgtcgatttcctattcgtcatggtacaacactgttattaaatccggtctccaacccgccatggcgtttgtcacaaaaag

SEQ ID NO: 457 - protein, 324 aa, Zea mays subsp. mays
  peptide (1)..(324): Ceres Seq. ID no. 14305837
TNFPAHSAFLSARLGLQLRPWWPPEARLPAPAQRSAFSLLSQAMRPCPVPCARCSCSLWRPRHEALRSSRQTPVLLCRAACPAFFSLHAGARPADRSSKLQPWRVLAPSSLLAGSPCRAPLRAELSAAAFLSPSSSSRAVQLLLPPPGVLPVPCALPISQFQLPHAQLLLLPSRPGSCSAIASSSLSSARGLLQSVARPACPVCTPRSLVVAFCFLVARSVLLFLRVLPRSSLFSSPPSRYRARETARSQYQVRDAHVGHGKTLCVLVSELALVMAFGTVPCFFSTHVLLLAVATAVKSSESFNLPITSWSVVDFLFVMVQHCY

SEQ ID NO: 458 - protein, 281 aa, Zea mays subsp. mays
  peptide (1)..(281): Ceres Seq. ID no. 14305838
MRPCPVPCARCSCSLWRPRHEALRSSRQTPVLLCRAACPAFFSLHAGARPADRSSKLQPWRVLAPSSLLAGSPCRAPLRAELSAAAFLSPSSSSRAVQLLLPPPGVLPVPCALPISQFQLPHAQLLLLPSRPGSCSAIASSSLSSARGLLQSVARPACPVCTPRSLVVAFCFLVARSVLLFLRVLPRSSLFSSPPSRYRARETARSQYQVRDAHVGHGKTLCVLVSELALVMAFGTVPCFFSTHVLLLAVATAVKSSESFNLPITSWSVVDFLFVMVQHCY

SEQ ID NO: 459 - protein, 180 aa, Zea mays subsp. mays
  peptide (1)..(180): Ceres Seq. ID no. 14305839
QIFQLTQRFSLLASASNSGRGGHRKRVSRPRLSGLRSPCSPKLCAPVLFPVRAVPARFGVHAMKPCARRGRLQSSSAEQLAQPSSPYTPELAQPTEALSSSHGASSLPLPCSPVLLAELPYVLSSLLRLSFPQAPPAAQSSCFFLLLAFFLCHAPCPSPSSSCRMRSCSFCPAAPDLARP

SEQ ID NO: 460 - DNA, 765 bp, Zea mays subsp. mays
  misc_feature (1)..(765): Ceres Seq. ID no. 13598976
acggctctcgtttccgcccgcgccacccgccatgtcgtccccgccgcgggggcagcccgccaccgccgccgtgccggcggtcgcggccgccacgtccccgcagttgcctgcggcgtcccacacgctcccccgcgcgttcctcgccacatcctctccccgtgccatagtggcagcaccggcgcccccgctattcaccggtcggccgctgaaccctaacccaccggcccacggctcctccgtgccccacggcatcctctaccccgtcctgaaatccgcctccacgtccaactccgcggccgcggccgtggagttggacgtggaggcggatttcagactttcgtttgggttcttatacgaacaggaattgtcctgtgtgatgtcgggcattgtattaaggctatttttgggttcaaactcatctagaggtccttttgtgtttgtacagtatattactgtaggcaaccatgaaaaccaaaggtttaggctgacctacgtttaggcctcatttctgatacggctccggagcgagcaaatgcagtgccgtagaaggtgatatcagtcgtatgcatgcctgtttcttcgtctcttgtactgtaacatgtcttaaatttacctagtgatggcgcatgtacttctgtcgatctgtaccattgttgctgttgaagacaaagtgcgccdaacaaaaaaaaaaaaaaaaaagcttatcgataccgtcracctcgaggrkgstcccgatacccaattctgcctataaagatgcccatt

SEQ ID NO: 461 - protein, 165 aa, Zea mays subsp. mays
  peptide (1)..(165): Ceres Seq. ID no. 15222474
RLSFPPAPPAMSSPPRGQPATAAVPAVAAATSPQLPAASHTLPRAFLATSSPRAIVAAPAPPLFTGRPLNPNPPAHGSSVPHGILYPVLKSASTSNSAAAAVELDVEADFRLSFGFLYEQELSCVMSGIVLRLFLGSNSSRGPFVFVQYITVGNHENQRFRLTYV

SEQ ID NO: 462 - protein, 155 aa, Zea mays subsp. mays
  peptide (1)..(155): Ceres Seq. ID no. 15222475
MSSPPRGQPATAAVPAVAAATSPQLPAASHTLPRAFLATSSPRAIVAAPAPPLFTGRPLNPNPPAHGSSVPHGILYPVLKSASTSNSAAAAVELDVEADFRLSFGFLYEQELSCVMSGIVLRLFLGSNSSRGPFVFVQYITVGNHENQRFRLTYV

SEQ ID NO: 463 - DNA, 676 bp, Zea mays subsp. mays
  misc_feature (1)..(676): Ceres Seq. ID no. 13589383
aatagcccaatgcgctgaatagcgcagcatcctttcccttctcccccaccctcggcctcgcttccagccatccgccgcggctcgtctccgtctcccggctcctcggcgtctagctcgtcaacgcgcgcgtccgccgtcggctcctccgaccggcgtcccaccacagggggaatacagatcgacgatccgctgggcttgcaaacatgtatatcccgagtgaagcgcaacaagagtacctacttcattcaatgtgaaccaacagagacagctttgagcatcaaacagaagttgcactcgctgatagatcaacctcctagtagtcagcagttggtcttgtggcctagcagtgatgtgcttgaagactcaaagactttggcagatcaaaaggtggataacgattccattgttgcattggcnctaagaaaagatgacggtgagtttnaggaagttttcatcgctaggccggaggatttcatgtcatcatcatgataaagattagtccatcatttntacaaagggaccnctgcgcgttnttggagtggaccgtcgctctatgctggttnttntagaatntgggatgtggcttgcttgtccctttgggaggaaaaanaaaatcttttatgtgagatcccnaacaaccggtggggatgatattaagctttgatttnncgctccc

SEQ ID NO: 464 - protein, 36 aa, Zea mays subsp. mays
  peptide (1)..(36): Ceres Seq. ID no. 13589384
  misc_feature (4)..(4): Xaa is any aa, unknown or other
  misc_feature (5)..(5): Xaa is any aa, unknown or other
  misc_feature (7)..(7): Xaa is any aa, unknown or other
  misc_feature (19)..(19): Xaa is any aa, unknown or other
  misc_feature (27)..(27): Xaa is any aa, unknown or other
MLVXXEXGMWLACPFGRKXKIFYVRSXTTGGDDIKL

SEQ ID NO: 465 - DNA, 713 bp, Zea mays subsp. mays
  misc_feature (1)..(713): Ceres Seq. ID no. 13586483
acctagaacatctaatcgaaaaattgagagagagatcaccgtcgaaaagcagtctcccaattccaccgaataactaataacatctcctcgagcgcgaggccggcttccttggaccaatccagcagcaagcgacccggccagcaccagcagccatggagatgaagaaggtcctctgcgccgcgctcgtcgccgccgcctccgccaccgccgtgctggccgaggtcgcctccgagtcgccctccgaggcgcccgccggcgcggccgccggcgcggccggcggtgcggctggcccttccgccagcgccgccgccgccgccgcagtgcccgccgccgcggcgctcgtcgtctccttcctcgcctccttcctccactgagcgacgtaccgcgcggagtgcgggaaacctgggatggagcatcgtgtttggttcacccgattaataattaattaatcgttgttttatttatttatttattgcttgcggttgcctaattatgtgatcgtctgttgttccttccttcgttccttccttggtgatgtgtgggtcgccaagggggtttcgtttctgtaatcctgcctgatcgatgctaatactatgatcccaatttggtttttgcgaaaaaaaaaaaaaaaaaaaaaaaaaaaacaaaaaaaaaaaaaaaaaagcttatcaataccgtcaacctcaagggggggcccggaacccaattcgccc

SEQ ID NO: 466 - protein, 73 aa, Zea mays subsp. mays
  peptide (1)..(73): Ceres Seq. ID no. 13586484
MEMKKVLCAALVAAASATAVLAEVASESPSEAPAGAAAGAAGGAAGPSASAAAAAAVPAAAALVVSFLASFLH

SEQ ID NO: 467 - protein, 71 aa, Zea mays subsp. mays
  peptide (1)..(71): Ceres Seq. ID no. 13586485
MKKVLCAALVAAASATAVLAEVASESPSEAPAGAAAGAAGGAAGPSASAAAAAAVPAAAALVVSFLASFLH

SEQ ID NO: 468 - protein, 40 aa, Zea mays subsp. mays
  peptide (1)..(40): Ceres Seq. ID no. 13586486
MIPIWFLRKKKKKKKKKQKKKKKSLSIPSTSRGGPEPNSP

SEQ ID NO: 469 - DNA, 707 bp, Zea mays subsp. mays
  misc_feature (1)..(707): Ceres Seq. ID no. 13586574
atggcccccctctacctcctccaccttgccgtttgtggcctccgcaccgccccaacgtcgacacctccgtcctccccctctactcccagcgcaccaccgccgcgtatgcgctatcccacccgatggacgtgttgccgcctctgcagcacgccctgtcgctgccgaccccgcccagccatgcatttggagtttacaatgtggagacatggtttatccaccggacggcgaggttggtgcgcggatggcgagggaggacctccactgggcctactccacacctcttcctgtctaccgaggtcgagcacatggaggacctgctccgctgtcgggcactcctgagccagcgactacaaaatccactctgccgtgatggcatgggaggctggcaagtcgattctttgtatatagttagtagtacaaaactatatgctatgagggtccggagaaattgacgatgaggagcggatcatactgggcaagtttttttggtggagtgggctggccgtgactgtgactctgtgagtgtgtagcgaggagggtacctgggtactagaatggctatagtctactgctgtgccgtactcggctgcacatgtattttgtgatgtgtcgtattgtataccaaagtgccatgttgctgttaatgacgtgagagaaaaactgtaagtcaccatttggatcctttatttcagggctcgtttgtcggc

SEQ ID NO: 470 - protein, 149 aa, Zea mays subsp. mays
  peptide (1)..(149): Ceres Seq. ID no. 15220797
GPPLPPPPCRLWPPHRPNVDTSVLPLYSQRTTAAYALSHPMDVLPPLQHALSLPTPPSHAFGVYNVETWFIHRTARLVRGWRGRTSTGPTPHLFLSTEVEHMEDLLRCRALLSQRLQNPLCRDGMGGWQVDSLYIVSSTKLYAMRVRRN

SEQ ID NO: 471 - protein, 122 aa, Zea mays subsp. mays
  peptide (1)..(122): Ceres Seq. ID no. 15220798
WPPSTSSTLPFVASAPPQRRHLRPPPLLPAHHRRVCAIPPDGRVAASAARPVAADPAQPCIWSLQCGDMVYPPDGEVGARMAREDLHWAYSTPLPVYRGRAHGGPAPLSGTPEPATTKSTLP

SEQ ID NO: 472 - protein, 112 aa, Zea mays subsp. mays
  peptide (1)..(112): Ceres Seq. ID no. 15220799
MAPLYLLHLAVCGLRTAPTSTPPSSPSTPSAPPPRMRYPTRWTCCRLCSTPCRCRPRPAMHLEFTMWRHGLSTGRRGWCADGEGGPPLGLLHTSSCLPRSSTWRTCSAVGHS

SEQ ID NO: 473 - protein, 109 aa, Zea mays subsp. mays
  peptide (1)..(109): Ceres Seq. ID no. 15220800
MDVLPPLQHALSLPTPPSHAFGVYNVETWFIHRTARLVRGWRGRTSTGPTPHLFLSTEVEHMEDLLRCRALLSQRLQNPLCRDGMGGWQVDSLYIVSSTKLYAMRVRRN

SEQ ID NO: 474 - DNA, 1079 bp, Zea mays subsp. mays
  misc_feature (1)..(1079): Ceres Seq. ID no. 13586524
  misc_feature: MA Experiment ID: 108522 Result: Up-regulated in Transcription
  misc_feature: MA Experiment 108522 PARAMETER Experiment Name: Zm_42deg_Heat_P Parameter: Age (day) Value: 8
  misc_feature: MA Experiment 108522 PARAMETER Experiment Name: Zm_42deg_Heat_P Parameter: Organism Value: Zea mays
  misc_feature: MA Experiment 108522 PARAMETER Experiment Name: Zm_42deg_Heat_P Parameter: Plant Line Value: 35A19
  misc_feature: MA Experiment 108522 PARAMETER Experiment Name: Zm_42deg_Heat_P Parameter: Temperature (deg C) Value: 42 vs. 22
  misc_feature: MA Experiment 108522 PARAMETER Experiment Name: Zm_42deg_Heat_P Parameter: Timepoint (hr) Value: 1
  misc_feature: MA Experiment 108522 PARAMETER Experiment Name: Zm_42deg_Heat_P Parameter: Tissue Value: Aerial
gatttctcgatacacaccgaaattcgaatcgcccgcctgccgagccctcgcccccacaccgccgatgccctccaagcggccttccccgcacgccatggacgaagccgtctccgcctccgctgccgccgcgcgcctccgcgcctccaccccgcgctccaagaaacgcacctcccgctccaagtcccgcggccgctcccaggatcgccgccgctccccgaaccctaaccctagctcccgtcgcgagcgcgccgcggaccacggctccgccgcgccctcgcgcaagagcgaccgcaagcagaaccgctccttcccggattctgccacgctcgccacggccatggcctcggtcgccgccgcctcggccccgtcgtccgaggccatggcctgggtttcgtggtcatctgcttgcttttcgccaggagcctggtcaagaagaaggatggtgattactgatgggagggagagcacggaaggagaatgtggacaaaggcattgtgggggcatggtatggcattttgatggtagggttgtgtattttgtttcttcaaggtggtgagtggaatacagagggggtgttttttggctcttcttcctctggccatgtgagggtgccatcccccccatgatggcagagagaggaaaagaggtggcaagctgctgttcaggaaagaagctgtccacttctggggctattttgattctcagctgaaattggtagacgagctcggggctgtcgtcttagcctctcctgcttagggttctaggagtacattgattctcttgtatttttttgacccccgccaaatgaaaaatacctgttaggtctaggctgaacgtacttagtctcttgtttaaggttgcaggagcgggttgggtgtctatttggttggtctgttatggaaaacgaacttccagatgctctggaaccagattttaactctagggtttggtagtagttggtgctaccgccattggttaactggtcgctagcctttctgtatggacattgctgacctggtaaccacacagctgtgctgtgcagctgttctcttcgtttgacctgttgcagctattcgtcg

SEQ ID NO: 475 - protein, 184 aa, Zea mays subsp. mays
  peptide (1)..(184): Ceres Seq. ID no. 13586525
ISRYTPKFESPACRALAPTPPMPSKRPSPHAMDEAVSASAAAARLRASTPRSKKRTSRSKSRGRSQDRRRSPNPNPSSRRERAADHGSAAPSRKSDRKQNRSFPDSATLATAMASVAAASAPSSEAMAWVSWSSACFSPGAWSRRRMVITDGRESTEGECGQRHCGGMVWHFDGRVVYFVSSRW

SEQ ID NO: 476 - protein, 163 aa, Zea mays subsp. mays
  peptide (1)..(163): Ceres Seq. ID no. 13586526
MPSKRPSPHAMDEAVSASAAAARLRASTPRSKKRTSRSKSRGRSQDRRRSPNPNPSSRRERAADHGSAAPSRKSDRKQNRSFPDSATLATAMASVAAASAPSSEAMAWVSWSSACFSPGAWSRRRMVITDGRESTEGECGQRHCGGMVWHFDGRVVYFVSSRW

SEQ ID NO: 477 - protein, 153 aa, Zea mays subsp. mays
  peptide (1)..(153): Ceres Seq. ID no. 13586527
MDEAVSASAAAARLRASTPRSKKRTSRSKSRGRSQDRRRSPNPNPSSRRERAADHGSAAPSRKSDRKQNRSFPDSATLATAMASVAAASAPSSEAMAWVSWSSACFSPGAWSRRRMVITDGRESTEGECGQRHCGGMVWHFDGRVVYFVSSRW

SEQ ID NO: 478 - DNA, 631 bp, Zea mays subsp. mays
  misc_feature (1)..(631): Ceres Seq. ID no. 12634374
ctcaaccagccgttccaagtggtactgctgctactcatgctctctgcttgcatctgctgaaacacttgtctcctgctcccgctcgctgctggggggcgcaggctaaatccgtgcatttcgtagtgtaatgatcgaagtcctttggtgcctggctctggctggctgcatctgcatgcaggtggtccccaagtcgctggcgccgttcctcccggggacgacggtgccggcgacggtgacgtggcacgggtggtccctgggagatgcggttcacgggggggcggcagatccagcgcctggaggccgggtggcggggcttcgcgctggacaacggactgaagctcggcgacgggtgcgtcttcgaggtggtggacggcagggcggagcgcgtggtgttcagggtgcaggtgctccgcgccgacatccccgcggagatccgggagcgggccggcgggtacactccgtccagccccatcctcatcgactagctagctcattgctcacctcatctcatcagctgctggtctgtatccccccgtgcggccgtctgccactgttactgcagagggtgagagtgcaatccgatttttttgcattttagtccttcctcggaaaaaattcacgtttgaaccct

SEQ ID NO: 479 - protein, 156 aa, Zea mays subsp. mays
  peptide (1)..(156): Ceres Seq. ID no. 12634375
MIEVLWCLALAGCICMQVVPKSLAPFLPGTTVPATVTWHGWSLGDAVHGGAADPAPGGRVAGLRAGQRTEARRRVRLRGGGRQGGARGVQGAGAPRRHPRGDPGAGRRVHSVQPHPHRLASSLLTSSHQLLVCIPPCGRLPLLLQRVRVQSDFFAF

SEQ ID NO: 480 - protein, 141 aa, Zea mays subsp. mays
  peptide (1)..(141): Ceres Seq. ID no. 12634376
MQVVPKSLAPFLPGTTVPATVTWHGWSLGDAVHGGAADPAPGGRVAGLRAGQRTEARRRVRLRGGGRQGGARGVQGAGAPRRHPRGDPGAGRRVHSVQPHPHRLASSLLTSSHQLLVCIPPCGRLPLLLQRVRVQSDFFAF

SEQ ID NO: 481 - DNA, 958 bp, Zea mays subsp. mays
  misc_feature (1)..(958): Ceres Seq. ID no. 13624545
agctattatttgggcagacgagcagcggcgctgtcgcagacgcagagcatcccacggttgtcagtttgtcactcactcggtccagcgctcacgagtcacgagtcacgacccacaactgacgatcgtccatgttcggcggcgtcgatggcgctagggcgctgcggcgagccggcagtttcccacggccaccgcccccgccggcgacggcgaggcacattctctccaggagcgagtcaatcaagaagaagagcggagccgccaagcggtcgaagcgggcacgcgtgcgcgcggggctcgccgccgctctgcaggagctcaggctcgccggccggaagcacggggccagaagccggggagccggggcgttgtcagaagctgtcagcgccggcgccggagccgcggggccgcgggctagcgatgacgtccaaggaggaggctgctgcgccgctgctcccctgcatgtgtccgacgttgccgaggcgcaggcgagcagaggagcagcagccaccgctggtcgtcgtcgcgtgaacgcagcaggcggctggacgacgccgctgctgcttgtagcggtgctagccctggcgtgcgtggtggcgctcggcaggacgccggccgtttgctgctgcacctgtgcggcatggctgtgccgcggcccttgtgcggttcggcctcgacggacgggcgccaccggagcagcgagccctctgctgcagcgcggtgcagcgtcagatgcctgtggctgtgagcttaacattgcacatgtacgagcaggtgattagcatcagacgtgttgtttgtcactcatggaccgtttggttctaccggcttcgcatgaatgttgcaggcctcgtaatttagctagagtcgtgttgtatgtttaaagttagttgcaggtgtttatatatattcagttgtgtgtttactatttaatgcgaggagtgaaaataatagtacctgt

SEQ ID NO: 482 - protein, 216 aa, Zea mays subsp. mays
  peptide (1)..(216): Ceres Seq. ID no. 13624546
MFGGVDGARALRRAGSFPRPPPPPATARHILSRSESIKKKSGAAKRSKRARVRAGLAAALQELRLAGRKHGARSRGAGALSEAVSAGAGAAGPRASDDVQGGGCCAAAPLHVSDVAEAQASRGAAATAGRRRVNAAGGWTTPLLLVAVLALACVVALGRTPAVCCCTCAAWLCRGPCAVRPRRTGATGAASPLLQRGAASDACGCELNIAHVRAGD

SEQ ID NO: 483 - protein, 175 aa, Zea mays subsp. mays
  peptide (1)..(175): Ceres Seq. ID no. 13624547
SYYLGRRAAALSQTQSIPRLSVCHSLGPALTSHESRPTTDDRPCSAASMALGRCGEPAVSHGHRPRRRRRGTFSPGASQSRRRAEPPSGRSGHACARGSPPLCRSSGSPAGSTGPEAGEPGRCQKLSAPAPEPRGRGLAMTSKEEAAAPLLPCMCPTLPRRRRAEEQQPPLVVVA

SEQ ID NO: 484 - protein, 127 aa, Zea mays subsp. mays
  peptide (1)..(127): Ceres Seq. ID no. 13624548
MALGRCGEPAVSHGHRPRRRRRGTFSPGASQSRRRAEPPSGRSGHACARGSPPLCRSSGSPAGSTGPEAGEPGRCQKLSAPAPEPRGRGLAMTSKEEAAAPLLPCMCPTLPRRRRAEEQQPPLVVVA

SEQ ID NO: 485 - DNA, 915 bp, Zea mays subsp. mays
  misc_feature (1)..(915): Ceres Seq. ID no. 13586631
gagctttatgcttgtactactaataaatgactcattgggctgatacagacaagatgatgctaaccgaaacaaattccatggaatccaaatataaaggcgcagaaaacccaacacagaatgcagtaagatctaagcaaggactcgtatttaaatttagcaccacagcaatctttcatcaaacctcgaccacgggacactgccttggactggtgaaagggaaatcacaagagcacacacacagaatcaagaacgtagcgcttgcaggaacacgcggacagcgatcaaataattaagcgcgcgcgagcgacggacgtggtagcagtacgtgtcagaagccacggcggagtcaccgggtctcctcctcggcgcgcctcgcggcgccggagagcgcggcgagcaggttgaggtggtggtgctgcgcctgcgcctgcgccatcgggacgtacgccgccgcggccgcggccgacgccgcctgcgcctccagcggcgagaagccccaggcctccgtggcccgcggcgccgccggcagcgcggcccagaacacggaccccgcggcgtcgccttcctcgcgcgggcgcttgacgaggacgacggtggcctgctgctgctggtggtggtagtgggaggaggaggaggacgtggacggcgcgccgtcgatgccctcgagcgacaccaccggcacctcgtcgctgaagcggtcgtgcggcaccttggggcgctcgtcctcctcgcgcacgaacgacgcgcgcagcttcgtctccccctccgccgccgtcgggaggaacggaacagcgctgatgctcacgggagccatggtgccagcagctgctctgcgtacgtacgtcctcctcctcctcgtcgacgtacgcgccgccgggccgggatcgtgatgctgcttctgctgctgtataccac

SEQ ID NO: 486 - protein, 88 aa, Zea mays subsp. mays
  peptide (1)..(88): Ceres Seq. ID no. 13586632
MTHWADTDKMMLTETNSMESKYKGAENPTQNAVRSKQGLVFKFSTTAIFHQTSTTGHCLGLVKGKSQEHTHRIKNVALAGTRGQRSNN

SEQ ID NO: 487 - protein, 79 aa, Zea mays subsp. mays
  peptide (1)..(79): Ceres Seq. ID no. 13586633
MMLTETNSMESKYKGAENPTQNAVRSKQGLVFKFSTTAIFHQTSTTGHCLGLVKGKSQEHTHRIKNVALAGTRGQRSNN

SEQ ID NO: 488 - protein, 78 aa, Zea mays subsp. mays
  peptide (1)..(78): Ceres Seq. ID no. 13586634
MLTETNSMESKYKGAENPTQNAVRSKQGLVFKFSTTAIFHQTSTTGHCLGLVKGKSQEHTHRIKNVALAGTRGQRSNN

SEQ ID NO: 489 - DNA, 943 bp, Zea mays subsp. mays
  misc_feature (1)..(943): Ceres Seq. ID no. 13622803
  misc_feature: MA Experiment ID: 108527 Result: Up-regulated in Transcription
  misc_feature: MA Experiment 108527 PARAMETER Experiment Name: Zm_5mM_NO_P Parameter: Age (day) Value: 8
  misc_feature: MA Experiment 108527 PARAMETER Experiment Name: Zm_5mM_NO_P Parameter: Organism Value: Zea mays
  misc_feature: MA Experiment 108527 PARAMETER Experiment Name: Zm_5mM_NO_P Parameter: Plant Line Value: 35A19
  misc_feature: MA Experiment 108527 PARAMETER Experiment Name: Zm_5mM_NO_P Parameter: Timepoint (hr) Value: 6
  misc_feature: MA Experiment 108527 PARAMETER Experiment Name: Zm_5mM_NO_P Parameter: Tissue Value: Aerial
  misc_feature: MA Experiment 108527 PARAMETER Experiment Name: Zm_5mM_NO_P Parameter: Treatment Value: 5mM NO vs. No Treatment
  misc_feature: MA Experiment ID: 20000477 Result: Up-regulated in Transcription
  misc_feature: MA Experiment 20000477 PARAMETER Experiment Name: Zm_5mM_SA_P Parameter: Age (day) Value: 10
  misc_feature: MA Experiment 20000477 PARAMETER Experiment Name: Zm_5mM_SA_P Parameter: Organism Value: Zea mays
  misc_feature: MA Experiment 20000477 PARAMETER Experiment Name: Zm_5mM_SA_P Parameter: Plant Line Value: 35A19
  misc_feature: MA Experiment 20000477 PARAMETER Experiment Name: Zm_5mM_SA_P Parameter: Timepoint (hr) Value: 48
  misc_feature: MA Experiment 20000477 PARAMETER Experiment Name: Zm_5mM_SA_P Parameter: Tissue Value: Aerial
  misc_feature: MA Experiment 20000477 PARAMETER Experiment Name: Zm_5mM_SA_P Parameter: Treatment Value: 5mM SA vs. No Treatment
  misc_feature: MA Experiment ID: 20000478 Result: Up-regulated in Transcription
  misc_feature: MA Experiment 20000478 PARAMETER Experiment Name: Zm_5mM_SA_P Parameter: Age (day) Value: 11
  misc_feature: MA Experiment 20000478 PARAMETER Experiment Name: Zm_5mM_SA_P Parameter: Organism Value: Zea mays
  misc_feature: MA Experiment 20000478 PARAMETER Experiment Name: Zm_5mM_SA_P Parameter: Plant Line Value: 35A19
  misc_feature: MA Experiment 20000478 PARAMETER Experiment Name: Zm_5mM_SA_P Parameter: Timepoint (hr) Value: 72
  misc_feature: MA Experiment 20000478 PARAMETER Experiment Name: Zm_5mM_SA_P Parameter: Tissue Value: Aerial
  misc_feature: MA Experiment 20000478 PARAMETER Experiment Name: Zm_5mM_SA_P Parameter: Treatment Value: 5mM SA vs. No Treatment
agaaaacaccgctcatccctcctaaacggatagagcaggcgctcctagaaaattcccagccttatcctgtgcatgtgttcaaatccctggaaacctgtgcgtctcctctgatgcgcgttcagctcctcctctcagctcatgcacgccaacttccaggcctttcaccactgccaatcaaatctctcgctcgacgctggtcacacgcacgcccagccgagctcctgcttccctctcccgcggtgcctggcttcctccaagcccgcccccaaccacaaccacgccctggtccgcgctccagccctccccatcctcttcttgctatggtgcccagccgagctctatccccttcctgccatggccgacgcccctccctgctgcagctcgatgccctcccctgcagcaagcagtgccctcccctttctgcagcaagtgggtgcccccagcccctcctttgttcccatggccggccacctctgctgctcccatggtgatctctaaatctctttttgttttactagttcttgttaataccctgctgatgtgaggttttatgtgtgttgatgtgtgcgatatggagtaaaatccttggagaattaggtgcagaaaaggccgtacaaggagtgcgctggggagaaggtgcccaacattaccagcgagtgcgttggcctgcgggagacctacttcaactgcaagaggggccaggttgacatgcgggcccgaatacgcgggaacaagggatactagtgatgtgcctgcaatatccacaatcagttttggtttctagccatgcttctgtgacattgaggtgtaatgataacatggtttagtttgcccgtgttctgtttttgataggtgaggggaactcacaacacacgtggcttcaattgatgaggggagtgcattcatgtctacattatattacatttgatgttccctctgtttt

SEQ ID NO: 490 - protein, 162 aa, Zea mays subsp. mays
  peptide (1)..(162): Ceres Seq. ID no. 13622804
KTPLIPPKRIEQALLENSQPYPVHVFKSLETCASPLMRVQLLLSAHARQLPGLSPLPIKSLARRWSHARPAELLLPSPAVPGFLQARPQPQPRPGPRSSPPHPLLAMVPSRALSPSCHGRRPSLLQLDALPCSKQCPPLSAASGCPQPLLCSHGRPPLLLPW

SEQ ID NO: 491 - protein, 126 aa, Zea mays subsp. mays
  peptide (1)..(126): Ceres Seq. ID no. 13622805
MRVQLLLSAHARQLPGLSPLPIKSLARRWSHARPAELLLPSPAVPGFLQARPQPQPRPGPRSSPPHPLLAMVPSRALSPSCHGRRPSLLQLDALPCSKQCPPLSAASGCPQPLLCSHGRPPLLLPW

SEQ ID NO: 492 - protein, 119 aa, Zea mays subsp. mays
  peptide (1)..(119): Ceres Seq. ID no. 13622806
MHANFQAFHHCQSNLSLDAGHTHAQPSSCFPLPRCLASSKPAPNHNHALVRAPALPILFLLWCPAELYPLPAMADAPPCCSSMPSPAASSALPFLQQVGAPSPSFVPMAGHLCCSHGDL

SEQ ID NO: 493 - DNA, 1053 bp, Zea mays subsp. mays
  misc_feature (1)..(1053): Ceres Seq. ID no. 14309627
  misc_feature: MA Experiment ID: 20000534 Result: Up-regulated in Transcription
  misc_feature: MA Experiment 20000534 PARAMETER Experiment Name: Zm_Hybrid_Pollen_P Parameter: Age (day) Value: 8
  misc_feature: MA Experiment 20000534 PARAMETER Experiment Name: Zm_Hybrid_Pollen_P Parameter: Organism Value: Zea mays
  misc_feature: MA Experiment 20000534 PARAMETER Experiment Name: Zm_Hybrid_Pollen_P Parameter: Plant Line Value: 35A19
  misc_feature: MA Experiment 20000534 PARAMETER Experiment Name: Zm_Hybrid_Pollen_P Parameter: Tissue Value: Pollen vs. Aerial
  misc_feature: MA Experiment ID: 20000535 Result: Down-regulated in Transcription
  misc_feature: MA Experiment 20000535 PARAMETER Experiment Name: Zm_Hybrid_Seed_Dev_P Parameter: DAP Value: 30 vs. 12
  misc_feature: MA Experiment 20000535 PARAMETER Experiment Name: Zm_Hybrid_Seed_Dev_P Parameter: Organism Value: Zea mays
  misc_feature: MA Experiment 20000535 PARAMETER Experiment Name: Zm_Hybrid_Seed_Dev_P Parameter: Plant Line Value: 35A19
  misc_feature: MA Experiment 20000535 PARAMETER Experiment Name: Zm_Hybrid_Seed_Dev_P Parameter: Tissue Value: Embryo vs. Unfert Floret
aaaagcaaaccgagctattaacggacgagaaacacccaacgccgtggaggtggaggcgcctagtacactatactagtagcgggtgtggtacctgggctgggcctgggcctggatcttgggtcccctccccgtgttagtacccaggcccgaccttattgacgagcgcgagcgcgttgctggtgacctgcgcgacctcgacgaccttgccccggatggcggcgcgcgtgccggcgtcgacggcgcgggacgagaggccgtcgaggcaggtgtcctcgtcggtgagcgcggcgctgcaccaggtctgcacgttgctgaggtgccacctgaacgccggcgtccccgcgcggcccatcccggcgccgcccatctcctgcgccgcgtcgcggaggtggcccacgctgtccgccagattgtccaggcagtctcgcacgggacctgccgacgccgacgccgacgccgatcccgaccccttcttcgcgcctttgccgttgctggcgccgcacaggcggcccacgtacgccgacgcggcgcgcgcgcggtccgcgctcaccgacagcgcggcgcgcgccagctcccgcgggctccgcggcggcggcgacccgccgtacgacgccaggctctgctcgcacaccgacgggtactgcgtcgtgcggcacgacttgcggacgaagtcgctggctgccggcgacgcggcggacacgagccccgctgcggcggcggcggcggcggcgagcagcaggaggaggggggcagcggcagcgacactgcgcgggtgagccatgattgattgtcttggtgagctgcgctgagctggtgcggtgtgcggggtgtgtgtgctgtgcttgtgcagcagggcaggcaggtcacggagtcacagtggagagagtggtggctgcttcgcttgaatgattgaatgcctattgtaatcacccacctagctgtgtctgcttatatagggagatttggaaatatgtgctgttttcggagatgatttttttagaaagcaaaaaaaaacggaggcagtagtgttatgctatatttctctcattttgc

SEQ ID NO: 494 - protein, 187 aa, Zea mays subsp. mays
  peptide (1)..(187): Ceres Seq. ID no. 14309628
MAARVPASTARDERPSRQVSSSVSAALHQVCTLLRCHLNAGVPARPIPAPPISCAASRRWPTLSARLSRQSRTGPADADADADPDPFFAPLPLLAPHRRPTYADAARARSALTDSAARASSRGLRGGGDPPYDARLCSHTDGYCVVRHDLRTKSLAAGDAADTSPAAAAAAAASSRRRGAAAATLRG

SEQ ID NO: 495 - DNA, 651 bp, Zea mays subsp. mays
  misc_feature (1)..(651): Ceres Seq. ID no. 12635272
agagattaatgttctagacaataacaatagaggtggaagaaacatagataagagaatacattaggtagcttgagatacgagtacaacaatatacataaacaagggagagaatcagccaaagaagctaggatcgtagccattgctagaagtggccaagacatagtaagcaacgatgtgaccaatagaaccccaagcaagaacatcgacgatgttgaatccaacagggtcgttcgatttcaagaggctaacgtattccttggcacgatcatctccggcttcgaaatgggttttgccgttctgctccggaacctgtttggccacattctctctctggaagttgaagaagacgaaccggccaaggaagagggagagaccagtgctgaggcttataacgacggatgggctgagctcggctctcacgacggcggaggaagatcttcttccggcggtggtggatagcttgggtaaggaggaggaggaggagccaccgaggcggagaggacggaggccgtggaatgagatggagttcgggtttttctgggagattacagtggagaaagttgagggtgtgagcaaagcagatgcgcttgtcgacatgttatcttcttcttcttttggagagctttagcgaaagagagaatgagtggtttt

SEQ ID NO: 496 - protein, 139 aa, Zea mays subsp. mays
  peptide (1)..(139): Ceres Seq. ID no. 12635273
MLNPTGSFDFKRLTYSLARSSPASKWVLPFCSGTCLATFSLWKLKKTNRPRKRERPVLRLITTDGLSSALTTAEEDLLPAVVDSLGKEEEEEPPRRRGRRPWNEMEFGFFWEITVEKVEGVSKADALVDMLSSSSFGEL

SEQ ID NO: 497 - DNA, 1071 bp, Zea mays subsp. mays
  misc_feature (1)..(1071): Ceres Seq. ID no. 13600601
cctagaagttgttctttatggccattatttcttacaaaagacgaatatgtttacacagggtgttacaacacagagaaactgatggtaccaagagaaacaaacaagattgtaggatacaagagaatgggaaaccaacataaaacaccatgtgatgaatacgatatatgatcatctcagtggaacttgaggctggtcaagacattgttgttgacgggatccgccaaatgatcaagaaggttctggtaaggccccacaccggtcactagtccctgcacaaaatagcctaggatggcgagcattgccagtctaccgttcttgacctccttgagtttcaactccttcatcgacttctcgtcttttccaaacccaagagggttgaagaatggtccaccggggtaagccgggtcacctgaacccgcgaaacctttctctagacccaagaagtattgtttacccatagatcctgggttgtaccagtcctgcaacctcctgtgctcggcaaatcccatcaaagccatctcgagaacaaagagtgtgtaagggtctgcccagtagctgtatgtccctgcaggtggaatcacaccggtttggaaccagggaagagcagtgtctgcaggaatcagaccggcctttcctagaatctcaggtgcaatagctccagctgcacccaacatagcgaacctcccgttgatgatctctccgtaggctagccatctcggctcgatgaagcctccagtaccctctgggtctgaaagaccaagcggatcgaatccaaagtcgccaggtaagctgccatccaagtaagagagactctgtgatgatgcaaaccacaattgcctgtttgctccttgcttggcaggtggagttgaggcagccttaacaaccaaggaaaccttcctctgtgatacggacacagctggttttgcgccgaatatctgtctagcagtctgaacagaggaagtaagtgaagaagacacaagcgcttgtgctgccattctttgcttaaactcttctcttcagtcaccaagggacgatgattattgaataatggtctgcagggaacctagcgtt

SEQ ID NO: 498 - protein, 55 aa, Zea mays subsp. mays
  peptide (1)..(55): Ceres Seq. ID no. 13600602
PRSCSLWPLFLTKDEYVYTGCYNTEKLMVPRETNKIVGYKRMGNQHKTPCDEYDI

SEQ ID NO: 499 - protein, 40 aa, Zea mays subsp. mays
  peptide (1)..(40): Ceres Seq. ID no. 13600603
MAIISYKRRICLHRVLQHRETDGTKRNKQDCRIQENGKPT

SEQ ID NO: 500 - protein, 36 aa, Zea mays subsp. mays
  peptide (1)..(36): Ceres Seq. ID no. 13600604
MASIASLPFLTSLSFNSFIDFSSFPNPRGLKNGPPG

SEQ ID NO: 501 - DNA, 784 bp, Zea mays subsp. mays
  misc_feature (1)..(784): Ceres Seq. ID no. 13599640
aaccctccgggcccggcgacacaaggcaaggaaaaaaaaggatggctctccggcgcaacgccggatccctcgcgctccgcgccgccgcctacctccgccgccaccgtccccatcctcctcccccactggccctcgccgcccccgctcccactcccatacgctccccgctggccccgcctttccggcacttcgctgctccgcctggtactcagaccaataggaagcgaggcaaggaggaggacgatgccagcgcgggcccgcgcatgaacaacgccatcgccgctcccttcgtcaggctcgtcatggatgaaggccacaacattctcccccggcatgaagccttgcagcttgcgatcaggatggacatggacttggttgaggtagcgacttgctacaaaggcatcaacacaaacatgaaggtagccaacatggaactcgcaatgctgcccgaatctgataatggccaaggacgacttgatcaaacaatgatcaaccctgccgcagaaactcggaactgctaggcaggctacattcagatcggccggtggataacgctctggtcagggacggcgctgttgtggtttcaggcggcaaggtgaagcaacgggtggcgctgaagctgctgcagcacaaaaagtggagagagctggagttggagatggagctcaacgtgtagaaatatgctgtcaagttgtaacttctaatctgaaatctgaaattaaaattacctccctgctgtcagacgatactgcatgcgggttttatccaataatttgtttggcct

SEQ ID NO: 502 - protein, 172 aa, Zea mays subsp. mays
  peptide (1)..(172): Ceres Seq. ID no. 13599641
PSGPGDTRQGKKRMALRRNAGSLALRAAAYLRRHRPHPPPPLALAAPAPTPIRSPLAPPFRHFAAPPGTQTNRKRGKEEDDASAGPRMNNAIAAPFVRLVMDEGHNILPRHEALQLAIRMDMDLVEVATCYKGINTNMKVANMELAMLPESDNGQGRLDQTMINPAAETRNC

SEQ ID NO: 503 - protein, 159 aa, Zea mays subsp. mays
  peptide (1)..(159): Ceres Seq. ID no. 13599642
MALRRNAGSLALRAAAYLRRHRPHPPPPLALAAPAPTPIRSPLAPPFRHFAAPPGTQTNRKRGKEEDDASAGPRMNNAIAAPFVRLVMDEGHNILPRHEALQLAIRMDMDLVEVATCYKGINTNMKVANMELAMLPESDNGQGRLDQTMINPAAETRNC

SEQ ID NO: 504 - protein, 88 aa, Zea mays subsp. mays
  peptide (1)..(88): Ceres Seq. ID no. 13599643
NPPGPATQGKEKKGWLSGATPDPSRSAPPPTSAATVPILLPHWPSPPPLPLPYAPRWPRLSGTSLLRLVLRPIGSEARRRTMPARARA

SEQ ID NO: 505 - DNA, 722 bp, Zea mays subsp. mays
  misc_feature (1)..(722): Ceres Seq. ID no. 13599549
agcttttttttttttttttttgaaaataaaaacgagtgtttcaacgcacacccgaatagtccattattattaagtcgagaagcaagagtatgcaacgatacattgaaaaagcaagaaacaataccaaaaacacacgaactttattgggaaccaacagagaaaagtagcgattcataaacctgatcatggatccagccatagtcccttatagaattaagtggatggtgcaaggagagggcgaatcaagttaggaacatgagcctggtgatcctcaagacgacccttaacactgtctccatcccagcgaacaagtgttggcactccagtgaccttgaagcgaggatcgactctccacggatgcatcggattcctccacgtcggcctatctcccgcgtaagcccgaataacattcacttcctccgctgattcctctagagtcttgtatatcacaggctcagctctaacgcaatcaggacaccagctgcggttggtggtgggatcattgttggcgaggaagaggatgaaattgattttgttacggtttgattcatcagatttcaattcttccaacaccttctccaaggttgagggatctgcgtccaccttcttcacactcatttttattcttttctctacaacactctcgatttcgatttcgatttcgatttctttaccaattttagttggactgctctccttaaattgaggcccgtgtttgattc

SEQ ID NO: 506 - protein, 61 aa, Zea mays subsp. mays
  peptide (1)..(61): Ceres Seq. ID no. 13599550
MKLILLRFDSSDFNSSNTFSKVEGSASTFFTLIFILFSTTLSISISISISLPILVGLLSLN

SEQ ID NO: 507 - protein, 58 aa, Zea mays subsp. mays
  peptide (1)..(58): Ceres Seq. ID no. 13599551
SFFFFFFENKNECFNAHPNSPLLLSREARVCNDTLKKQETIPKTHELYWEPTEKSSDS

SEQ ID NO: 508 - protein, 56 aa, Zea mays subsp. mays
  peptide (1)..(56): Ceres Seq. ID no. 13599552
MSLVILKTTLNTVSIPANKCWHSSDLEARIDSPRMHRIPPRRPISRVSPNNIHFLR

SEQ ID NO: 509 - DNA, 1015 bp, Zea mays subsp. mays
  misc_feature (1)..(1015): Ceres Seq. ID no. 13599568
gaaaatgataattatatattccattcagtgaaaagaacaaatacgacaatgaaaagcagtacacttcgattcctcgtattggctctgaaggctaaaccgcgaggctaacttattcaatcttattacaactgcatgcgagcttagctagaagcttgaatacgtgtcttctgctgaacaattattaaatctcattggcatgcatatatcaaattatatactcatcatttcagggcaagctcccagggattaagacccaccagcgaacttggacttgagaagttcgacgaccccggcctccacccttagtgccttggtgagcaccggcgtggggattggcgggttggaaccgaagagcatgagcggcacgaaaacgatgccggggttctggctgttgaaggaaacaaccatgtaggcctctgtcttaccaacgttgaactggaagtgcatgagcccgcgtgggatgaggaacgtctctccagcacgcaccaccctagagtagagcttgtttccggagtcgaggcttccgaggattccaacgaggagctcacctttcatcaccatgccgatctcggtcccgcgcgggtggacatgcggcgggttggtgcctcccggcgcgaagtccacacggttcatggacacacccagcgtgttcgtaccgggccactcggccacgtcgagctccgtcacggccgagccattcggggtggacgtgttgccggccttggccagcttggtcgagaagaggaagtcgtcaccggcctccgacatgggcttgcatggatgcccgttcacagagaccgccttgccgtcgaggtcagcaacgcagaagtcttggagagggtcagggtcggaggccaggacggccggagcaagcagcagcatggcaaacaggctagcccctaggtttttggagtaacccatggcttgctatgtagcaagcttagctagcactgatcagctagagtttgttgatcaagagtgcttcactggtggttgcagcaaagctgtggtggat

SEQ ID NO: 510 - protein, 118 aa, Zea mays subsp. mays
  peptide (1)..(118): Ceres Seq. ID no. 13599569
MPISVPRGWTCGGLVPPGAKSTRFMDTPSVFVPGHSATSSSVTAEPFGVDVLPALASLVEKRKSSPASDMGLHGCPFTETALPSRSATQKSWRGSGSEARTAGASSSMANRLAPRFLE

SEQ ID NO: 511 - protein, 104 aa, Zea mays subsp. mays
  peptide (1)..(104): Ceres Seq. ID no. 13599570
MRRVGASRREVHTVHGHTQRVRTGPLGHVELRHGRAIRGGRVAGLGQLGREEEVVTGLRHGLAWMPVHRDRLAVEVSNAEVLERVRVGGQDGRSKQQHGKQASP

SEQ ID NO: 512 - protein, 94 aa, Zea mays subsp. mays
  peptide (1)..(94): Ceres Seq. ID no. 13599571
MDTPSVFVPGHSATSSSVTAEPFGVDVLPALASLVEKRKSSPASDMGLHGCPFTETALPSRSATQKSWRGSGSEARTAGASSSMANRLAPRFLE

SEQ ID NO: 513 - DNA, 700 bp, Zea mays subsp. mays
  misc_feature (1)..(700): Ceres Seq. ID no. 13587227
gccactctttcatagatatataaagatacattaaaaacagataacacacacgcatatatattaagcttaatatcaagttgttacatacgataatatatagagaaatcatagagatcgcgaaatatcatattcatatgatcatttccactttcttcgtccgaacatgccatgcttgcctcgtttgcctccaaacatgccgtgcttgccacgcttatgcttccctccaaacatgctgtgctttcctcgcttgtactttcctccaccgaaaaaccctttcttgtacttaccaccgtgatggtggccataaccaccatgatggcccgcgtggtgacttcccattgcagccgccgcagctgttgccgctccagctatcaatcccccgactcctcctccaagacctggacggtgaggaccagggtaaccggcgggaggataagcaccaggaggaggtggataagctgcaggtggatagccctgcggagggtaaccctgtggagggtacccttgctgagggtaaccatgcggtggtggataagctcccggcggaggaggaggataagctcccggtggatacccatggccgggatgattatgatgtgaaaagaatcctttgtcttgttcgtgatgcttgtctttacccattctgatttgaaatcaagaggcagaaagataagaagatttatatgaaaaacttttcgat

SEQ ID NO: 514 - protein, 170 aa, Zea mays subsp. mays
  peptide (1)..(170): Ceres Seq. ID no. 13587228
MIISTFFVRTCHACLVCLQTCRACHAYASLQTCCAFLACTFLHRKTLSCTYHRDGGHNHHDGPRGDFPLQPPQLLPLQLSIPRLLLQDLDGEDQGNRREDKHQEEVDKLQVDSPAEGNPVEGTLAEGNHAVVDKLPAEEEDKLPVDTHGRDDYDVKRILCLVRDACLYPF

SEQ ID NO: 515 - protein, 143 aa, Zea mays subsp. mays
  peptide (1)..(143): Ceres Seq. ID no. 13587229
MLASFASKHAVLATLMLPSKHAVLSSLVLSSTEKPFLVLTTVMVAITTMMARVVTSHCSRRSCCRSSYQSPDSSSKTWTVRTRVTGGRISTRRRWISCRWIALRRVTLWRVPLLRVTMRWWISSRRRRRISSRWIPMAGMIMM

SEQ ID NO: 516 - protein, 128 aa, Zea mays subsp. mays
  peptide (1)..(128): Ceres Seq. ID no. 13587230
MLPSKHAVLSSLVLSSTEKPFLVLTTVMVAITTMMARVVTSHCSRRSCCRSSYQSPDSSSKTWTVRTRVTGGRISTRRRWISCRWIALRRVTLWRVPLLRVTMRWWISSRRRRRISSRWIPMAGMIMM

SEQ ID NO: 517 - DNA, 1171 bp, Zea mays subsp. mays
  misc_feature (1)..(1171): Ceres Seq. ID no. 13599444
agccatacgaatatgtttgttattattattttttaaatccagccaaacaattttcccggaaagcgcaagaaaatataaacaagaacatgacgaccaaagctaatccaagtttcaatgtctcgacttaaagtaagcagttccaggatcgatcacgataatggacaaaatagtcattttgagagaaacggatggaacttactatatagttccttgttttcacttcttcgagctaggctccaagttcatcgcttgaaggttaagcaacagatcgttggagctcaggtacaccttgttagctgattttgcaatggtctgagcaatctctcttgcagcttcgatctttctcagagttatgaatgcctcattgtttgcaattgcttgtcctataagttgagcacttttagcttctccctccgcacggataacagcacttctcttgtcttgctcagctttctccacaatgaacttggcacgttcagcttcctgagcagcgacttgctttgcctcgattgcagctgtgaactctttgccaaaagtgagagtcgtgatggagacatcatcaagagcaatgtcgaagttcgaagctctctccgtcagaatcttgcgtatctctctgctcacagcttctctctgagtgatgagctggcttgcattgtactgagccaccacagccttcagtgtttcatggatgatggaagggagaaccctttcactgtaattctcgcctagggttcggtaaatatgaggcaaacggtcacccatgggacgtgtgagaaccctaagtccaattttgatcgtctgaagatcatgactaccagtgctgctctcaacaagatagggtcgtgcacggacgtcatagatgattggcctctcaaaccatggcaacataaagtgcgtaccttccgggtacaccttttccttgataccggttaatcggttgaacatgacggcacgatgcccaccctcgacattgtagaggctgttagtgatggcgtagacaccgaggccaccgataacgctgaccttgagaagcgcggagagagcaggagatccagggatgttcggcactttgttgaaactcatgatcttagatcagctcttaatcaccggtgaggctagggtttaggaaggatcacgatcggagatagtcggcgaagaagcttagggtttt

SEQ ID NO: 518 - protein, 63 aa, Zea mays subsp. mays
  peptide (1)..(63): Ceres Seq. ID no. 13599445
MRQTVTHGTCENPKSNFDRLKIMTTSAALNKIGSCTDVIDDWPLKPWQHKVRTFRVHLFLDTG

SEQ ID NO: 519 - protein, 61 aa, Zea mays subsp. mays
  peptide (1)..(61): Ceres Seq. ID no. 13599446
MSRLKVSSSRIDHDNGQNSHFERNGWNLLYSSLFSLLRARLQVHRLKVKQQIVGAQVHLVS

SEQ ID NO: 520 - protein, 52 aa, Zea mays subsp. mays
  peptide (1)..(52): Ceres Seq. ID no. 13599447
MPTLDIVEAVSDGVDTEATDNADLEKRGESRRSRDVRHFVETHDLRSALNHR

SEQ ID NO: 521 - DNA, 819 bp, Zea mays subsp. mays
  misc_feature (1)..(819): Ceres Seq. ID no. 13599448
ccaggagacaacaataacgaccaaaagcaaattacaattcagtaaaaaaaatgttacaaaggaaaattttattaaacaaaaaaaaaagatgaaattccccaatttgttttcgtgttcattactttcacatcaccggagggtttcctccgtcgccggaactccgactcataccttcagtaatcgacgcgagcttctgaagattcagtttaatcacagtatcagcaaacaaacgcgtatcctcctccgtgttcccctccggcacatccacgacgtacgattcaagaacaacggtccagatccgtccatctctctcgaatccatgaaccgtcgtcaccgacttgtaattcctcagcctgtgctcgcctccggtgatgctaaaccccgtcaccctccgctcgtcgtcgaggagatcgagcctctccctcgacgtgttcgccggaaggccgctgatcacgtccacgtagcgcgtgcaccccactcgcatctcgaatccttcttcgacggagcatcttttgatgaagtgtttgtaaatctggggacgatcgaagcgtctcacgacggaccagacggtttcgggaggggactggatgcgttgggcgaggagggaggagcagcgaccgggaccgagttggtaggtgtggaactcggtgattgagtcggttagctcggcgaactcgtcgtgagtcagctcggaaggaatcatttggtgatggagagtagtggttgtgtgagtctcttgttccccttctctgattggctctgaatctgccattggtgtcgaatttaaacttgcttccaatttggggtcgaatcgaagag

SEQ ID NO: 522 - protein, 217 aa, Zea mays subsp. mays
  peptide (1)..(217): Ceres Seq. ID no. 13599449
QETTITTKSKLQFSKKNVTKENFIKQKKKMKFPNLFSCSLLSHHRRVSSVAGTPTHTFSNRRELLKIQFNHSISKQTRILLRVPLRHIHDVRFKNNGPDPSISLESMNRRHRLVIPQPVLASGDAKPRHPPLVVEEIEPLPRRVRRKAADHVHVARAPHSHLESFFDGASFDEVFVNLGTIEASHDGPDGFGRGLDALGEEGGAATGTELVGVELGD

SEQ ID NO: 523 - protein, 188 aa, Zea mays subsp. mays
  peptide (1)..(188): Ceres Seq. ID no. 13599450
MKFPNLFSCSLLSHHRRVSSVAGTPTHTFSNRRELLKIQFNHSISKQTRILLRVPLRHIHDVRFKNNGPDPSISLESMNRRHRLVIPQPVLASGDAKPRHPPLVVEEIEPLPRRVRRKAADHVHVARAPHSHLESFFDGASFDEVFVNLGTIEASHDGPDGFGRGLDALGEEGGAATGTELVGVELGD

SEQ ID NO: 524 - protein, 111 aa, Zea mays subsp. mays
  peptide (1)..(111): Ceres Seq. ID no. 13599451
MNRRHRLVIPQPVLASGDAKPRHPPLVVEEIEPLPRRVRRKAADHVHVARAPHSHLESFFDGASFDEVFVNLGTIEASHDGPDGFGRGLDALGEEGGAATGTELVGVELGD

SEQ ID NO: 525 - DNA, 911 bp, Zea mays subsp. mays
  misc_feature (1)..(911): Ceres Seq. ID no. 12635907
ggcagagcagcatcagttgatctttgcgtttgagaagtccatctctggatgctgagacatgaacttcttgagaatgtcttgcttctgtagctcatcactcgttggaagacccatctgcttttgcctttgatcaaacatcatcttctcaacagtggagcgagtttcagggtcaaggtcagctaatttactgttctccggttcaaccttctgagtatcgatctcaggctcacctttcacacagcatttccaccactccatctgatcttgcttagtcaacagaatcgaaatcatcttttgatcctcgatattccagtagcagtcatcaggcttcacagatcggtagagttctccatcgatgattggatcctgtcccttgagaccaagcttaagacggttctttttgatctcgtatacaacagagcgtgctttagtgccagtaggaactggaatgttaacagtaacctcctggagagtctggacccatgagtagttctcaaggtcataaccatttcctttgttaggagcaatgggggaagcttcttgtttcttctcctccacttgaattggctctgagcttgaagcagccgtggctggcttcacgctctccttctccacaggcttcttcttctcaacactctccttctcagctttcttctcggcctttccaagcttctccttcgccgccctaaccgcggcggagatctcctcctcagcggagggtttcttgagaaaatcgctctgttcggcgagaaagtcgaacactttctccaagaaacttgatgggttcgaggaatcgagcgtcgccctgaagggcaggatcctggggcgggtgctgctttcgtcttcaacctcggagatgatcgccattgtggagggggttttcgtttctagggttttgctgttgaccagct

SEQ ID NO: 526 - protein, 44 aa, Zea mays subsp. mays
  peptide (1)..(44): Ceres Seq. ID no. 12635908
MIGSCPLRPSLRRFFLISYTTERALVPVGTGMLTVTSWRVWTHE

SEQ ID NO: 527 - DNA, 2130 bp, Zea mays subsp. mays
  misc_feature (1)..(2130): Ceres Seq. ID no. 13599656
  misc_feature: MA Experiment ID: 108533 Result: Down-regulated in Transcription
  misc_feature: MA Experiment 108533 PARAMETER Experiment Name: Zm_4deg_Cold_P Parameter: Age (hr) Value: 8
  misc_feature: MA Experiment 108533 PARAMETER Experiment Name: Zm_4deg_Cold_P Parameter: Organism Value: Zea mays
  misc_feature: MA Experiment 108533 PARAMETER Experiment Name: Zm_4deg_Cold_P Parameter: Plant Line Value: 35A19
  misc_feature: MA Experiment 108533 PARAMETER Experiment Name: Zm_4deg_Cold_P Parameter: Temperature (deg C) Value: 4 vs. 22
  misc_feature: MA Experiment 108533 PARAMETER Experiment Name: Zm_4deg_Cold_P Parameter: Timepoint (hr) Value: 1
  misc_feature: MA Experiment 108533 PARAMETER Experiment Name: Zm_4deg_Cold_P Parameter: Tissue Value: Aerial
  misc_feature: MA Experiment ID: 108534 Result: Down-regulated in Transcription
  misc_feature: MA Experiment 108534 PARAMETER Experiment Name: Zm_4deg_Cold_P Parameter: Age (hr) Value: 8
  misc_feature: MA Experiment 108534 PARAMETER Experiment Name: Zm_4deg_Cold_P Parameter: Organism Value: Zea mays
  misc_feature: MA Experiment 108534 PARAMETER Experiment Name: Zm_4deg_Cold_P Parameter: Plant Line Value: 35A19
  misc_feature: MA Experiment 108534 PARAMETER Experiment Name: Zm_4deg_Cold_P Parameter: Temperature (deg C) Value: 4 vs. 22
  misc_feature: MA Experiment 108534 PARAMETER Experiment Name: Zm_4deg_Cold_P Parameter: Timepoint (hr) Value: 6
  misc_feature: MA Experiment 108534 PARAMETER Experiment Name: Zm_4deg_Cold_P Parameter: Tissue Value: Aerial
aaacttcgcgcgccacaaacttctacgcctatactacgccatgcatatgcagttcattcacccaacgcttatcccgtaaggctataaagcacatgcgaaagacgttcattcactctgtaaggcgttcttgttcttcacccaacgcttctcgcacgggggtcttctattgaccattgaagaaaaacattgactggagatagcatctggaatatatgaatcgagtataaatgaaattagtcacgtatgttggtattcaatatttgttcagacgaactaggtctgaaaatctgggcaattccagattctcatgtgagatgataaaaacgtcataattatttgctaagtttaatgacctacgtcagtttctgcgtactaaaaactattcgctagttgagtcgttccggcatattcaaaattattagctacagttgttcctgcatgcgccagattctcatgtgagatgataaaaacgtcataattatttgctaagtttaatgacctacgtcagtttctgcgtactaaaaactattcgctagttgagtcgttccggcatattcaaaattattagctacagttgttcctgcatgcgtctaatgtccttcggtgaacttgtctgtcattatcatttaaaaacgtatctagatgcattatggaagatttttagtttcctttgttatatttgagaagttatatattgtatataccgagagatgcacctgtgtattatttgttgtagcttcgaatgcgagacgtatggttgcagtcattttattgtagttagtttaactgctgtgccatatgaagattaactgctctgccatattaactgcatgaagattaactgcatgtgccatatgaagacctcctgcctcatcacggtgtttgtatataagatcaactgcagtgcctacacggtggactgagtatttgtatgatgcgaaggtcactgttcagcatcgtcagtatgaaatggctatggccttcaaagctttctttcttggtcaccggacagggaagaaattttctgctcaagctcacaattagatactagacataactcagataagagcttgttcaacttgcactatagttcatttgagtacttacctattattgatctctcttgagttgaagctaggtttcaagtatctcctaaggtttataggtgaaaaccagggatttttttttgcactacaatctgtgacgttttaatacttgattactagttgttcatgcattgctattgtattcgcatatcccctaggtttaagagcaaggtttaagagcctttctaacaaggtgactcaatgatgtctcaaatttaaaatactacatttaaagtgttcaggtcgccaaaaacaaattgtgcttctacatttaagctttaatcatgtattttaggaagtaaattatattattagaaaaaatgtttagaatgatgtagaaaacatggatagagccttagtccgagagtagtatatttggatcttaatgtgcccgaaatttataaaatagggcactgttggagctgtttttactgatttgctctatattttaagatagggtactgatttaaagcacggttgtagttgttttaaatacaacatttcaaatttccacttatacacaatgttagcttatttttaccgtccgcgtggaagctgcattgacgttgaggctggcggcagtgcgggcggcagcgtgggcgagaagaggccgctgccgcccgcgcgcggacgaggcggacgagaggccagcaccgggcgatggcgctcgcgcccggcgagagcgagcagtatcgcctcgctctcgcccgcgctggagcgtccgtccgggtgagaggcgggcgagagggaggcgaggcactggcggggcgagagcgcgggtgagagcgacgtggcgtgatctgattggtccacgtgtcgcgatctgattggtccacgtgtgctagccgttgcaactagccgtttttgaccgtttggagtccaaaaatttcgaaaaaaattgcaaaaaatcacaaattttatccctaattcctctatatattatgttgtgtgttttctgagcgttgaaataaatccgcgtgaattaaaaaaaaaaaaaaaaaaaactcgagggggggcccggtac

SEQ ID NO: 528 - protein, 69 aa, Zea mays subsp. mays
  peptide (1)..(69): Ceres Seq. ID no. 13599657
MLAYFYRPRGSCIDVEAGGSAGGSVGEKRPLPPARGRGGREASTGRWRSRPARASSIASLSPALERPSG

SEQ ID NO: 529 - protein, 55 aa, Zea mays subsp. mays
  peptide (1)..(55): Ceres Seq. ID no. 13599658
TSRATNFYAYTTPCICSSFTQRLSRKAIKHMRKTFIHSVRRSCSSPNASRTGVFY

SEQ ID NO: 530 - protein, 44 aa, Zea mays subsp. mays
  peptide (1)..(44): Ceres Seq. ID no. 13599659
MHYGRFLVSFVIFEKLYIVYTERCTCVLFVVASNARRMVAVILL

SEQ ID NO: 531 - DNA, 1813 bp, Zea mays subsp. mays
  misc_feature (1)..(1813): Ceres Seq. ID no. 13599900
attattaagtcccatgacatttttttggcctgaatgcctgatacactttctaatagcattaaagctgccacaatatctaaggttgtaggttgatgattatctaaagttgatgagtctacttctcgtcaggttgttcaccatgccatgcccacacaatatcttctagtgccggtctcatgctttggttcataaagttatgatactcaaggatgtcaccattgattttcttgatctccacgagatgataatttggtgtgatttgaaatatctcagcatttatagacatcacaccttttattcctgatttggcagcttccatattcaacaatccaccagtttttgttataaccttcagatccaggctctttgcaacctccattagctttgtgataattgtcatagctgtgttggtagacataaatttagactccttgtttgagttctcaaatataccagagagatcaaacccgttagacagggagatgatatcaaaagcattcaaaatagtcagtttctctgccgctgaattacactcgaccatattgctatttaaggaattcaaagccaaatccatgtcactaggcacataatctctcgttgtagaatcaaacaatcttgcatcaagaccaattctaaaccaaggatgagtccttatttcttcaatagatattcgtctattagggtttggatgaaggatgcgccgcagaagctttcgaacatctgaagaaaaccaacttggccatttgagttctgctttgcaaattttcttatacatgtccatcatgttcttgtcttggaaaggaagatagcccgccaacaacacatagaggatcactccacaagcccatatgtcagcttttgcaccatcatatcctttttgactaattacttctggagcaacatatgcaggagtcccacaaattgtgtggagtaacccatcttttctcttgcagtttggaagtgcactcaaaccaaagtctgaaatctttaagttgtgacttccgtcaagaagaagattttcgggctttagatctctatgataaacttgtctagtatggcagaagtcaacagcactgatcaattgttggaaatatgtacgagcaacatcttcttttaaccttccacgttgaacctttttgaacaactctcctcccttgacatactctatcacaaaatatatcttggttttggtagccataacctcatacaattggacaatgtttggatgttttaccaacttcatcaccgaaatctcttgaattatttgatccataagaccacacttcttgatcttatctttgtcaatcaccttgatagcaacgctttctgaagtcttaacattgcgagcatggtaaactttggcaaaactcccttttccaagtaactttcccatctcatatctctgcattagaatattctctttctcagccatcttctcagtgttctactttcaaacttgaataagttggcgatgaacaacaatgacgtataagatgctggtaattataagtgaccagcaattttaaccatctccacctagaaagaaaccagagacgatggttgagctacaactcgcggccccattatgtgtgtgtgcatgaggcaattgttgtgcatatatttgcagtccaatgtcatcgagatcaagtaaagtacaactatgtttgtgtatcctgccaatttccaggcaaggtactccatcatgcaaccacatctttctgcatccctttgatattttggacctctgactggaagcaaaatactgatcccgggcgatccaggcaacgcggaggagccgctcccgaagtcagat

SEQ ID NO: 532 - protein, 49 aa, Zea mays subsp. mays
  peptide (1)..(49): Ceres Seq. ID no. 13599901
MQESHKLCGVTHLFSCSLEVHSNQSLKSLSCDFRQEEDFRALDLYDKLV

SEQ ID NO: 533 - protein, 38 aa, Zea mays subsp. mays
  peptide (1)..(38): Ceres Seq. ID no. 13599902
MSSRSSKVQLCLCILPISRQGTPSCNHIFLHPFDILDL

SEQ ID NO: 534 - protein, 37 aa, Zea mays subsp. mays
  peptide (1)..(37): Ceres Seq. ID no. 13599903
MRRRSFRTSEENQLGHLSSALQIFLYMSIMFLSWKGR

SEQ ID NO: 535 - DNA, 2492 bp, Zea mays subsp. mays
  misc_feature (1)..(2492): Ceres Seq. ID no. 14308929
atgcaaaaccatggggtcggctgtgcgaggtgccagacggtttgtgataggtcaccaaaccgttcacgtgtaggtcaccatgaaacagataattatgatcttctctacgggtccatggaccgtccgcgtgtagatggcaaactgtctgcactggcgcagagggctttccgtagaacctagaccttgcctcctaggaggaaccccatcatggagaagagatcatagggttgcttcgagatcagtacgccacccaaagtgcctctagacgatgtagagtagaagagatgtgaagatggagattgcgaaactacaactaaagttatgctacttctactcctaaggcatgataatatagatagataagttcgattggattacatacatacatacgtacatacatacacacacacacgcacgcacgcacgcacacacacacacatacatatatacatacctacatacagtttgtatatttggagccttgacttccaataactagaggaagccctggctcaacggtgccatccggttcagatgcaccaggttcggaaggctataaaaacacccctaggacgtcaaggattaggttttagcaggggtggcagttccctcaggcgagcgagcggcagcgacaatcctaagggccagtggtggtggcgccccaaggagggcgatcgacgatgacgctccagaaggatcgagcgacggtggcgctcccctaggatcaagcgacggcagcgctcccccaggaccgagcgatgaccgatggcggtggtcccccaggaccaagtggtgaccgacggtggcgctccccaggatcgaggatctaggaggcgcacatgcggcgatggatctgggagacacacacgcagcgatggatctgggaggcacgcgcgacatcggctcctcggaggcgcatgccccggagtggcgcccgctggcatctcacctccggcgatgacactggcattccctaggcgcgagcggtggtggatcgacggccctgtttttatgcgattatgtatacatatttatgcaacatcaataggtttttatgatacatttttgattcatggctctccttccatcttatgtatgtttatgatatttctattcacattttatgtaaacgtttgttgttttttacgtagtgtaccgcaatgcatgaataacttccacatgtagcataattagtattagtatatatcataaactatttctaacgagcctaactgcatggctgttggagagatcctatattcatgtacgaaataaagcattgaaaatcatatttttgtttcatgcatgccaacccattttctttcaactcacattcttgtcatcctaattttgtgcgcatgcaacagaaaatatattttgtacacagtgtaccgcagtgcataaataccttcaccgtgtattataattagtctcagtatatatcataaactagttctaacgagtctagatgtatggctgttgaagagatcctatactttcaacgcactattactctttcttgctagagttagagacagaccggaggaatgaaaggtgttaatgaaaggagagagttgcagagagagactaagggagagaggagacaactagatagggttttgtaggggacgatgaaaaattcaccatgttgtatagagaccaagggagaggagagagagaccaaggaagcatgttctagtagagaaagaccattttccatagctctatctagagaggtggacgatgaaactgtagatgttgtcattagaaataatatcacatgaaggatcgtgttcaatttctcatgtggctgaataagaacagtaaggataaagttacattcatagatgaatctgtatttagacttgccaactgataattagtggattgattatgttgttactgtttatttgaccaattttttatagaaatttcatataaataggagaaaaggtattaaagttgctaatggtctcgaaatttacattgaaggtattgtagacattgcgtaagaactagatggtggctccattctacaaatgagtgatattttatttatgacttccatgataaggaatctaatttctatatcatgttcagatgataataatattcattgtcattttagaaacatatattgccattacataagacaagctctatttactttcctattatgcctcttcttttatgaatatatgtaatgtaatcgttaagcatagaatcaatcatcattgaaattgtggtactatagtttatgccatatttcaaggaggagaatttaatgattattaaaagaagaatttttcagtcatgatattttttagattttgacaattgcatggactgcattaagaaaaagtatgtgaaacaaattaagaaagatattaaacaaagcgctagagttttagaaattcacacatatatttatagtcctttccttgcaaaaaatatgtagatgatttagtttttattatatttactgatgattt

SEQ ID NO: 536 - protein, 139 aa, Zea mays subsp. mays
  peptide (1)..(139): Ceres Seq. ID no. 14308930
MAVVPQDQVVTDGGAPQDRGSRRRTCGDGSGRHTRSDGSGRHARHRLLGGACPGVAPAGISPPAMTLAFPRRERWWIDGPVFMRLCIHIYATSIGFYDTFLIHGSPSILCMFMIFLFTFYVNVCCFLRSVPQCMNNFHM

SEQ ID NO: 537 - protein, 75 aa, Zea mays subsp. mays
  peptide (1)..(75): Ceres Seq. ID no. 14308931
MTLAFPRRERWWIDGPVFMRLCIHIYATSIGFYDTFLIHGSPSILCMFMIFLFTFYVNVCCFLRSVPQCMNNFHM

SEQ ID NO: 538 - DNA, 1848 bp, Zea mays subsp. mays
  misc_feature (1)..(1848): Ceres Seq. ID no. 15227301
tagtcccccccccccccccccataattggtataagagcaagtgtaataagataatataagtgtaatgtataagttgtcacattaaatttatgttgagacggagagaatgttaagacggaggacagaaaagataaataagctataaactcatagaaaaccaacacttcaactcgaagaaaataagatgcaccatatgttaatggttttatatgtaagactaatagtatacgagtaaattgctagattttttatatgagtgatatgatagtagcctataactaggggtggtaatgattcatggtccaaatagtttttcacgattttttgacctttaattaattttagttaaaaataaatagaaatagagctcgatctaaatacgatgtaatccttaaataaactttatagtgtaaaatttaaagactaactccacccttacatataataactagcaacctgctaaattattagccatcctctaacgttgttttccaacagcttaacaacaccattatgcgatatgtgacctacttttggggaaaaaaaagaaacatatctacgcctatgttcatattctcctccaaacataaaaagaaaggcaacgagataatgccgtcccacatggcatgggaccacccgtcattttcacaagcaaccttgaactgaagcgaaagtggcgaacccggagggcatatctggcattcctaattcttgtaggcccttgcttacgagcgcagccacccaatagcaaccacagctgaggctgcggcctctgtgccatccaggggtcggcatcagcctctctccctcgctctctctgactcgtcgcggcataaacaaacaaaccaaacaaagcaaagcaaaggcaaaaccccacctccaccacacctcgtcgtttgcttttcctcggtgcgggcggtgcggcacaagcccccagaccggttgcctccattactgagctgtgcgtgcgtggtggctgtctgccttgtggcggcgccggtcatggtgatggtggagatggacggtggcgtgggaggaggaggaggaggagggcagacgccggcgccacggcggtggcgcctggcggacgagcggtgtgacctgcgcgccatggagacggactacgtgcggcggtttcaccggcacgagccccgcgaacaccagtgctcctccgccgtcgccaagcacatcaaggcgcccgtccacctcgtgagcgcctgcctctcaacctccctctcgcgtgccgctgaatcaaatatcaatctccgctattgcttgctgccgctatgctttttctccgtgccgtgctgtatgtatccacgttccatggcggcgagcagggtgttcgtgccgttgcccagtcgatccgccgcagagacatcgtttccaccggttattggtttctccttttgtttggccccggcccgcccgcccgcccgccggtttcggattggtgatgcgctgctccttgattaggaaagacgccgacttgttacgagtcagcgagtcacccactcgtttggcccgtttcttctcagttgggaacatggatgcctgatttggagagagagaggccgtcttcaaccggccctgctcgtttctcttatcgccccttctttttttttttcacgcgattggttgggcggatccattgctgtgctgattgctcggaggacggacccacgtcgctttcgctcaaagctaagatttccatctcctgccaagaagcctgtgaattttttcctgcatccttcgtccgtccagcttttgctccagactgaggctttctctaagagatgaacatgggggatgcatgattggtggcaaaggcaaataatgcacacaaag

SEQ ID NO: 539 - protein, 157 aa, Zea mays subsp. mays
  peptide (1)..(157): Ceres Seq. ID no. 15227302
MVMVEMDGGVGGGGGGGQTPAPRRWRLADERCDLRAMETDYVRRFHRHEPREHQCSSAVAKHIKAPVHLVSACLSTSLSRAAESNINLRYCLLPLCFFSVPCCMYPRSMAASRVFVPLPSRSAAETSFPPVIGFSFCLAPARPPARRFRIGDALLLD

SEQ ID NO: 540 - protein, 155 aa, Zea mays subsp. mays
  peptide (1)..(155): Ceres Seq. ID no. 15227303
MVEMDGGVGGGGGGGQTPAPRRWRLADERCDLRAMETDYVRRFHRHEPREHQCSSAVAKHIKAPVHLVSACLSTSLSRAAESNINLRYCLLPLCFFSVPCCMYPRSMAASRVFVPLPSRSAAETSFPPVIGFSFCLAPARPPARRFRIGDALLLD

SEQ ID NO: 541 - protein, 152 aa, Zea mays subsp. mays
  peptide (1)..(152): Ceres Seq. ID no. 15227304
MDGGVGGGGGGGQTPAPRRWRLADERCDLRAMETDYVRRFHRHEPREHQCSSAVAKHIKAPVHLVSACLSTSLSRAAESNINLRYCLLPLCFFSVPCCMYPRSMAASRVFVPLPSRSAAETSFPPVIGFSFCLAPARPPARRFRIGDALLLD

SEQ ID NO: 542 - DNA, 2085 bp, Zea mays subsp. mays
  misc_feature (1)..(2085): Ceres Seq. ID no. 13623233
aggatcccccaggttatcggaacctcggaaagcagtttatcaggccccgttccccgttccccgtcctccatcctcagtcccaggtctcttctagttctgtcgttctctggccaaggcatttccgtgcaggacgtacgtcccgaggatgcagactcgcaaccctgaccagccttccccggacccacgcgagcgggacaccgagcagacgacgtctacaaggcggaagcgacgcaagtatactgctgtagcttggtacgttcagcattcatttggtttgtcctgttcagggagtttgcatcaagccgaatattgctgcaaaccgatgatggctgtgcctgcaactgcatgcggtggactgtagctagggcctaatggtcgagtgcttcccaagctaactccaggcgattgcgcagttctgaatgcagaagacggaaactcaaatgcatcccagactcaaaagaatcaagctgtgagagatgcatatccaaggggcatcatgcttgcgactacgatgcactctatcgtgagcatagagactcacagaaagtgaagagcaacaggtaaatgagcctactagagcattagttattgctgtcctgatgtttggctaatgactatggcaaaagctccgcaacagttgctgctctccgtcaagatgtcaagttcctacgcgataccctgagcggcttgataacaacggtccaagcaaatgccgaacccagtgatggaaatacccgacctcagagccagccgttagacacccatcaagcggttcccatctcaatgcaatcacggcggccgagctctccagctcctgaagctgtgacattcgtggcagggaccccccgttctgacgcctctgggattgatgtcgctcctgtgagtcaaaagttgcccacctgaagaagtcatgcagatagtacaagggaagcgagatttctgacagaactcaagccgcgacatgtcacctctccacactcgcttcggggtggcccagcagagcctcgcttcataggtccaacccgatcagcatacagtctggaggttggggaacgtgctctttctcgtctgggtatacctgtttttgatatgcctccacccagtggccaggaatcgccggcagaatccccgcgacagccttctggcaatactgaagaccagttctgggaaacctgcgatgcagccgagttcacgcggttgatcaccatctatcaggaagagatcgagtcggtctacccgtgcttgaacacaggctcgctgatcaaatatgcaccggccattccagaactgggacgcatgccggaggacgagattcgcaagacaatcgagacccgtcgcctgtcacttacagttaaagacgtgcatctcgccaaacttgccatggccacaacaattgtcatcgaaggccatggaaagagtgaaaagagttccaagcttgttgaacctgtggaacgcagcttgttaagcattctggagccgagccgagagctgaaagacttgcaactgttcatagccttggtaagttgctgctacgccgtcatcgatgtggaagtgtatcaggcctcactaacccatgttcaatctcacgagatagagcgtatactacttccattctgacgaagaccttttggcctggcgaaccatcggtctcgccgcccgagaggcattagtacttggccttcaccggagaggtaccttgatggaatcgttcagcgttcctgaagagcgcgacgcagcgataagggttttctggactatctatgtcttggatcgtcgatggagtttcgggaccagcttgtcctttgccctcgtcgatcgagacatagaccctgaacttccagaaccagtaggtcattccctctacccacaaagtgacaaagtggaatatcgagtataatcgctgactcagttgcgcagggagaggactgtgcctatttgcagtgtatggtcgggtacggtcgactttgctcaacattatgggatgccctggtgccctttggccagcgcaatcccggcggtgatgtggattcactcatgaaggagctcgacatcaagacacaggagtggctcgagggggggcccggt

SEQ ID NO: 543 - protein, 175 aa, Zea mays subsp. mays
  peptide (1)..(175): Ceres Seq. ID no. 15219369
MPPPSGQESPAESPRQPSGNTEDQFWETCDAAEFTRLITIYQEEIESVYPCLNTGSLIKYAPAIPELGRMPEDEIRKTIETRRLSLTVKDVHLAKLAMATTIVIEGHGKSEKSSKLVEPVERSLLSILEPSRELKDLQLFIALVSCCYAVIDVEVYQASLTHVQSHEIERILLPF

SEQ ID NO: 544 - protein, 106 aa, Zea mays subsp. mays
  peptide (1)..(106): Ceres Seq. ID no. 15219370
MPEDEIRKTIETRRLSLTVKDVHLAKLAMATTIVIEGHGKSEKSSKLVEPVERSLLSILEPSRELKDLQLFIALVSCCYAVIDVEVYQASLTHVQSHEIERILLPF

SEQ ID NO: 545 - DNA, 2446 bp, Zea mays subsp. mays
  misc_feature (1)..(2446): Ceres Seq. ID no. 13599880
caacagttatggtcaatcacagggtcctaactatggccaacctcaatacccgcaacatgcgcctcagcagaactacagccatgggtatggtgatcctagatacaatgctccccctccgaaccagcagtactatggtcagccgccaatgggcccgcagcaaggctatcctcaacagccagatccctatgctaggcctccatacagtggacctggtcaatggcctcccaggggtgctccggctgcagatggctcttaccaggcgccagctgcatcttatgggccgccttctcagcacccttctgcttatgggcaaacgtacagtgcagcaactggatctgatggatatgctcaacagggttacccacagcagggtgggcaggcaccagctccatatggtcagagtgcaccagcagctccaggctatcctcagcagcaaggtggctatgcacagtacccacagacccaaccagcatatggtgagcaagcagctcaaaccaatgcgagctatgggtaccagggagctccagcagatcctaactatggaagtgcctacccacagccaggatatggtcctcctggtcaggctactggtcaggctggttatgcctcctcagcagccagccagcctgcgtatggccaggcaggatacacccagccgcctacaaatcctccaggttatgagcagtctgcggcaccagcaacaacccagagcggctatgctgcgcccccagcaaatccacagcagcctgctgcagcaaaaggggtctcgccacagcctggtggtggtgctgctgcatatggtgctggtgggcagtggacagcatgaccctcctcgaacctcaaacatggctcgctggtagcaatatcgtgctcaatatttgcaccttccggatgcatccttggttatcggaagagattgtgtaactccttgattagtgatacttggcatctctgtagtagcacctactagtagttcgttggttaactgtgacaataaacatcctaattcctattcacttcgaatcaaacttcgcagcttgccaagtaatttttttggatttgtgtttattcatgtaaaatagttactggtttggctcacagaatgatgattctgtttctgcagttcattcaaatttggttctgatggatgttaaacctagtgatgacaatttaacccgcaaatctgaaattagataggtgcgtgtatgtgtgaagattttgacccgtggttgcaacccatacctaacctgaagtttcgtgggtgttagatgcgggtttttatttcaacctgtatttgacccgaaattcaacccgtatttgaccccaaatttggtttactccttattttgcgcaataatgactaaagatacaatagtaattattttcaattagtgacttggttaatgattcatgaagtgttttgttggtgcttaacgtaaggtttaaatccataaatataactcaattattgctggtatttaaatacttataactaaattattgcttgaaagtgtataatgagtaaaacccacgggtgatcttaaacccactcgaaacctgatggatttggatgtgggtttaaatttgcacccgcgtgtgcgatcgcgggtgagtttaggtagatttcacgagtttgatcgcgaacatggtttttctccaccgactcaaatctgattcattgtcatccctagtcaagccgaacatactatccctagtcaagccgaacatactgttgctcttgcaatgtgagaagcgttatgtacatatggatcgattagcggttgattgcaactatagtaagatcttgtccagtagtttatccatatggtcacctaaaatactgttttgcacctaaaatattgttttgcacggtagaccgcactgttcgcagagtggagtttaaaataggagatcataaggaaactgtaccattgtcgaatagtattctactccctctattttcgaatatttgttagctgctagtttatttttgaactaaaacacgataaataaaaaaactaaggaacatactactaagattgtctcaacgggtaatctaaaataggggtcacaaaattgtagatgacattgtttgatgctgtttgtagagtaaagtttgaaataggagacacgatagggaatctgctagagatagcctaaggtcttgatcggttatttccatgccatatgaattggagggaattggaaaaaaataggaaggattttgatttgttatggatttaagtccatccgatcttctccaatctatatgaattaagataaaaatgaacatatgttgagtgtgggggtgaagtagatggtgagggttcccatgctccaagtagatggtgagggtgaagtagaatgtgggtggtgaccccactccaaattgatggtgagggtgaagttgaagatgtcgatggtgattctcgagggggggcccggt

SEQ ID NO: 546 - protein, 285 aa, Zea mays subsp. mays
  peptide (1)..(285): Ceres Seq. ID no. 15218898
TVMVNHRVLTMANLNTRNMRLSRTTAMGMVILDTMLPLRTSSTMVSRQWARSKAILNSQIPMLGLHTVDLVNGLPGVLRLQMALTRRQLHLMGRLLSTLLLMGKRTVQQLDLMDMLNRVTHSRVGRHQLHMVRVHQQLQAILSSKVAMHSTHRPNQHMVSKQLKPMRAMGTRELQQILTMEVPTHSQDMVLLVRLLVRLVMPPQQPASLRMARQDTPSRLQILQVMSSLRHQQQPRAAMLRPQQIHSSLLQQKGSRHSLVVVLLHMVLVGSGQHDPPRTSNMARW

SEQ ID NO: 547 - protein, 283 aa, Zea mays subsp. mays
  peptide (1)..(283): Ceres Seq. ID no. 15218899
MVNHRVLTMANLNTRNMRLSRTTAMGMVILDTMLPLRTSSTMVSRQWARSKAILNSQIPMLGLHTVDLVNGLPGVLRLQMALTRRQLHLMGRLLSTLLLMGKRTVQQLDLMDMLNRVTHSRVGRHQLHMVRVHQQLQAILSSKVAMHSTHRPNQHMVSKQLKPMRAMGTRELQQILTMEVPTHSQDMVLLVRLLVRLVMPPQQPASLRMARQDTPSRLQILQVMSSLRHQQQPRAAMLRPQQIHSSLLQQKGSRHSLVVVLLHMVLVGSGQHDPPRTSNMARW

SEQ ID NO: 548 - protein, 275 aa, Zea mays subsp. mays
  peptide (1)..(275): Ceres Seq. ID no. 15218900
MANLNTRNMRLSRTTAMGMVILDTMLPLRTSSTMVSRQWARSKAILNSQIPMLGLHTVDLVNGLPGVLRLQMALTRRQLHLMGRLLSTLLLMGKRTVQQLDLMDMLNRVTHSRVGRHQLHMVRVHQQLQAILSSKVAMHSTHRPNQHMVSKQLKPMRAMGTRELQQILTMEVPTHSQDMVLLVRLLVRLVMPPQQPASLRMARQDTPSRLQILQVMSSLRHQQQPRAAMLRPQQIHSSLLQQKGSRHSLVVVLLHMVLVGSGQHDPPRTSNMARW

SEQ ID NO: 549 - DNA, 2630 bp, Zea mays subsp. mays
  misc_feature (1)..(2630): Ceres Seq. ID no. 13599765
ctagtccccccccccccccctcgtccttagttacgtcctctcttccctttaccaactccagacggaccatgcctcttctcgatgcccaaacctctccttccggcagcgataccaccctttccactctttccaccccggccaccccggccaccatcaaaccctcccctgcccctgaatgcaccacctcttgcgccgccacgctcccttccaggactcatcttactcttcaccgccgcaacaacatcctcatccatctcctcatcctcgtcatcacctcccctgcggttcgagaacttcagcttaccgccacgaccacgtttggcaacatccttgcccttgagagcagcaacgtaagcgcccacccctgagtgctctgggtcgactgctctgccgtcgacgtccatatcttcgtcgtcgtccttgccgaggatgagcttgccgtcgagatcggtcttggcctttgtcttagtgggtttgcgttgcttcatgggcttcgtggaggagatgttggccattgccttcttgtcgagcaagtcaagcggctcgtcttcgtcttccatgatatatgtgttgccgcccttctgggacttcttgggccggaaggaaacctcgttgtcggagccgtcttctgagtcactgctgtaaagtgcctggtcgtactcgttctcgtactggcgcttaccggctgcgccatcctcgtcatcactgtcatcgtgtctgttgcgggcaccttccttcttcttcttagcctgatccctgactttacgaatgttcgcgaggatcttcttgccgtcctcaggggcatgctgatagatgttgtcgtagccaaagcgacgaaccatgcgctccagaatgtgcttgacctttgccctgaagtgacccttgtgctccgaactccatgtgaccaggttcgggacgagcgtcgacagacggggaagcatgagatcgacaggcaggctgatgacgcagactttgacgaacccaagacagctcttgacaatctcacgattgtttgatgtcaggaacaggtccattgtctgcacgagatcagaaagagtctgctcgctcaacgagttgcggaactcataaagcagccggctgatggccgtgatcgatgcggaaatcatgtgtggcgtgctacccgccaaaccagcgctcaccattgtgatgaactcctcgatattggctgtgccgtttggggcgtcagccgacatgtgaggcaccttcgtgttgtcgatcgttgcgccattggcctctaccatgcggttgcccatcttcacaagcaagtcgtacgctgtttccctggcgcgctcgttattctccttgcagcagataacgacctcactaagcacagatgggatgaagtgcaaggagtcgtcggcggtgaaggggagcagcgccatgatcgcggagagtctgtcgcggcgagcaggggtagagaccttgtccgtgctggagacaataagggtctgaagctcggcatttcgctccttgagggcgagcttgccgagcccggagtcagcaagacggggaataagcttgtaagccttcttttgaagctgtggctcttcttgcttggtgatgatgacggaggcaatttcaaagagcgctgaaaagctctctcggggaaggtagacggagatggtgatgacgagatccataagggtctgggcggtagatggcatatggtccttcttttggccagcttccttcttgtcggctccagcgggcttggagagctcgggaaccagcatttgactgaccctgtcgaatgtgtccatgatctcttgggagggcgtgatactgaggaaggtgttaatggtctggagaatgaggcctctgctattgggaagagtctgagtgtaaacattgaaaagcacagccagcatattgccggcatagcttccaaggagggcaaggttcttgcgtgcagcttcccgcctgacgcggctctggagaagcaaatcttcttcctctgaaccgtcgatctcggcgatggccttgttagactcaatcaacgtcttgagtgccctgcagacatccaggcgcaaatccacctgcttgtaaaggaggtttgcaatcatctcggcgaatgactgatcgaaggcatccgcaagatccaggggcagatcacagtaacccggcagaattgaccagatttgttgcaccagagtctcgtaaatctttacctccatagttttctcagcctgtccgtgatcgagcaccttctggaacatcagttcactgagggggaccatttcagttttgaagtggttgaggttggtgttgctggtatagtcgcgcaggatagggaacatccacgcacggccaggttggcccttaacaggcttcgctaagttgagaggcagaacgttgagcacagcctcggggcccatggcgcggacagccttgccaataacctcatcggcttccttcttgctctggaaggatgagttctctcggagttcaccgaccgtcttggttacacccaagaggatagggtatgatcgccagcgaagagcatcgaacatggctccgaagacgccaaaggtttgtagccatgctgcctggtattgaacggtcagaagcgcctctgaggccttcgcgatcttctcgagggggggcccggt

SEQ ID NO: 550 - protein, 121 aa, Zea mays subsp. mays
  peptide (1)..(121): Ceres Seq. ID no. 15219239
SPPPPPSSLVTSSLPFTNSRRTMPLLDAQTSPSGSDTTLSTLSTPATPATIKPSPAPECTTSCAATLPSRTHLTLHRRNNILIHLLILVITSPAVRELQLTATTTFGNILALESSNVSAHP

SEQ ID NO: 551 - protein, 99 aa, Zea mays subsp. mays
  peptide (1)..(99): Ceres Seq. ID no. 15219240
MPLLDAQTSPSGSDTTLSTLSTPATPATIKPSPAPECTTSCAATLPSRTHLTLHRRNNILIHLLILVITSPAVRELQLTATTTFGNILALESSNVSAHP

SEQ ID NO: 552 - protein, 97 aa, Zea mays subsp. mays
  peptide (1)..(97): Ceres Seq. ID no. 15219241
MVLLLASFLLVGSSGLGELGNQHLTDPVECVHDLLGGRDTEEGVNGLENEASAIGKSLSVNIEKHSQHIAGIASKEGKVLACSFPPDAALEKQIFFL

SEQ ID NO: 553 - DNA, 3211 bp, Zea mays subsp. mays
  misc_feature (1)..(3211): Ceres Seq. ID no. 13599858
ttctcattttcttcaactgtacagactttcaagaggaagggatctgatctagatcctcgaagttatatatctggaaaacaggctcttcagatatcgaacctcctttatataaatgttgttaatcagcttccagcatttgtttcatttgagttgtgtttactgcctagctctccatccaacaattgatatcttactgactggtggtcgagattcaatttgcagggtatgatctctcttgcaatcacaccttatgaaaaaaatcattgcatttaatggtcacttggttttgcttgggttatatatacatgtgtgggacatcagaacaaaagtatgtgtttctgctttaacaggacatgacaacattgtatgttcagtgtttgctcggcctatggtaagaatgcattttaacctgtcaagttcacgattcaccacaatattttcggccaaatggtacacaatatttcatgatgtagttttatttggagtcactccctcagttaaccaatggattatttgaagcagtgtctctgttctgtagatactttgcttctttgaaaatacctgccatcaattgttttactaaagtttagagtgtaataataaggcaaatgagcaaccttgatagaattcatatgccatcagtagttttaccatttaagctacactattttaaaatatatttttgctatggtaagtactcttatgtgtcctgctttactgttcatccattctcaagtatactctttgatcttttgatatgtgtgcaggcccaaaacatctgcaatttattttttgataagtcctccaagatttggttagttgcttcatgctttctctttttctctcttaatacttagctcaattttgttcatactggtatgtttgatctgtgatatactgctatgagcaaccttaattttgtattgccttacaaatgatttttagctgtcgcttgccaagtataggtcatattgtgggtagtcacaccaaaactaaaactaatggcaattggtttgcaataggcagtgctctttctgttagctctggatgtcacggcaatgaacaaacacgttgagtatgatagtgatgctaaaattattgcaatcgattgaagccctaccatgtggcaaccattgatccatgcccaaaatgtgcctgccactggtgttcttatcccaacactcgatcaacatgcaagtagaaatgaagcctagagccaaatgatgcgagaggagtatggtctagacacgagccagttcacataaacccttcagacccaagcaggtaccagcagaatggcacgccagctaaagaaaggtgtcatggtgttgttcaaacttcgagtggtgtgtggaatagaagaatcccaattcccaaccatattatttgtcacgcttggtatgtcttctatataaatgttctatgcacctgtaattttattgtgaatgaggaactgttagccattgacatcattttttgtgttttwagggagtttgtttattgttgccaatctcgaccttttttcatgtagctctatttaaccttgatgatttactcaaatatatgtaagatttggttgtgccatgaagtgagatgatattgatagatctcttttgctttgtgtacatcagaaatgagttagattctagatttcttgagatggcaaaacttcccattgggttttcagccaatgtgaaaagaataagctggtgttccattggtgttaaatggcagtgactctatgattcaattttatgtgccatatctttctgctatccaactatttgcagatatattgagacatgcctcaagaaatagtttatttagagcaactaaaccagccaaattagtgtctgctaccaatatgttgcattttccccatgacagatatgataccagttttgattgaatcaccttcatattttcatctaaatcattttttgttgtatctctctacctgtttgagtttgccggtaggtacaggggaaatacgacaacatcatcgcggcggtgaagagctactacatgtcgatgagcggtacactaccaatagtgtcggtgaagagctaccaatctgaatgaatggtttcaagtgtgagagtgagcaatgagcttggtgcaagacacccaaaatatgcttatttctcagtgtgggcagtgactgcaatctctatactaatatttatcattcttgccattgtgatcctctacctgtgcaactacaccagctacatgttgcatgttcacatatgcacttttgtattagtaatatctcttgtatagtgcttttctcctctttatatccatgaagtaaaactcatttctctctcaaatagaaatgaaaaaatgattttgtttccctttccaagtggttcagttcctgagcaagtggcgttgtttatgttcatggccatgtgaatgggtctccaacataatacttgtctaatactcaagatctgatgccctattttgttagcagaaagattgatagattcacttttgtttctaatccggtcccctattttggtattgggtctcccaagggagtcatattataaggagaacatggaacaggaaaaactcttcttgccaaggttagtgttctgtcttacaagcatataatatgccaatatattgcttagtattgctgggcaagcttcgatcctcattgatatgtgttttgtctatgtttatctgaattacacattcatttttctactttcagttttcaaatgtacttgggtagtgtttaactgaaactgtctgcagactgtggctaactcaacattgcaactttcttgcatgttgttggtagtgagctcattcaaaagtaccttggggtgccgtcctccaccttggcatcacacccacctcccccgatgaagactcggtacacgacctggcgcgcactcgccatatcccctccgtgcaaacaacatttgtctatgtttatccaaagaatgattagttttagcaaaaatgattagattagtgtatggttgtcgccaactcgccatgtttgcttgtcattaataattatttattgactctttagaaataatttgtgtgacattgataatatttgttccacataagttcaatcaatttgggtcaccgtatttataacaaaaaaaaaaaaaaaaaaaactcgagggggggcccggtacccaattcgctgtttaaacacaataaagttggaackggagggggg

SEQ ID NO: 554 - protein, 88 aa, Zea mays subsp. mays
  peptide (1)..(88): Ceres Seq. ID no. 15219289
MKKIIAFNGHLVLLGLYIHVWDIRTKVCVSALTGHDNIVCSVFARPMVRMHFNLSSSRFTTIFSAKWYTIFHDVVLFGVTPSVNQWII

SEQ ID NO: 555 - protein, 82 aa, Zea mays subsp. mays
  peptide (1)..(82): Ceres Seq. ID no. 15219290
MSNLDRIHMPSVVLPFKLHYFKIYFCYGKYSYVSCFTVHPFSSILFDLLICVQAQNICNLFFDKSSKIWLVASCFLFFSLNT

SEQ ID NO: 556 - protein, 74 aa, Zea mays subsp. mays
  peptide (1)..(74): Ceres Seq. ID no. 15219291
MPSVVLPFKLHYFKIYFCYGKYSYVSCFTVHPFSSILFDLLICVQAQNICNLFFDKSSKIWLVASCFLFFSLNT

SEQ ID NO: 557 - DNA, 2001 bp, Zea mays subsp. mays
  misc_feature (1)..(2001): Ceres Seq. ID no. 15224654
atattgcatttaatgcgtcgtcagatgtcagataaagccagtcgcggacggtctggtcgtgcaccttgacggtccgcgaggacgctataattcatttggctgaacccgtcaccttcgggtttttcggttcctcacctaccggacggtccgcgcctgagcccggacggtccgcgcgtggtctcggacggtgcttgctcttccatcggacagtccgcagtagagacacatgtttttgcattggttctgtccgagggttatttaggtgtcgcggacggtccgcgcttggcctgattttccaaaaagcttctcctgtccggaataatctacggtattccggacagtcgatttagtataattgtaaatgaacctttggcacctgtagaacatatgatctagagcaaaccagttagtccaattatttgtgttgggcaattcaaccaccaaaatcaattaggaaaaggtgtaagcctattttccttttagagtcctccatcgcaacactggctctgtgcttggagtgggactcggcagcggtggctgactcgcccagttggttggcggaacgacagccaatggcaccgcgtcgcgtctggcgactgcggtcctcctcgtatcggggaccagatgcggaggtgagttccagcgtcgaggcggtccccaacggcgaggacccatcgggatgcgtcggggcggtgctatccgcccgtcaacaagatcttgcattgctcggtcgagtgcacggcgcagagaagaaattttgaagatgccatggcgagaggcttcaatcgagtcgtcgttcacggcggcgacaatgtggttcaccacaaattcgcgctggtacatagccattttcttaccgttctttctcccatgtttgtctcttcttcttctggcgagagcgggtgctgataacatgttagaaaacaaagaaaactgaagcaaatgatgcgtgtgttatttccattcgatggtggtgtgtatttatacatagtgaaacgacagaaaacttgtctgttcgccatggacggttttctcgtcgtagaagagggagagggagagggatatggatgcgtgttccggaacaggatttacattaaggaatattattaacactaatcctattaactaatgaccgtcgatcttgattaatctccacctttgatattgagtgtgtttcttcctccggattgcttacgtggacaaaatcatttttccttaacatatttgaccagcaacaataaaattgtgtgcgtcaatatatgcatgctacacgcgcgccattattagtccggccggccatgcgtcgttatgctggttctattaatttgtgcatcgatattatacctgctcttaaatcatcgttagaaaaaataattaattcttcaatatctcttatccccaagctttctgagcaaccattgaccattcacaatcatcgataagcatatggagtatataatgacatataagtccattatatatatgtccatactctagctagttggatcactctagctggcagccatagtcgtcattatcgtctcaaatggctgacaaagcggttagcttattatatgttatataaaaaaatagggtcataaccattataattatcattatttgatttgactcgcacaaacgccatgtgattctatttctatttcgtcaacaagaggtacacgcataaatgaatcattattagagccatgtgatcctagtaggccctcactagttttaatgatttataacaacccaagatgtgcggaagccaacgattaaacgatgtacatacgaaggcgaagctaggaagcttcggctccaatgtcagtacgcaacgacaagtgagcgagggaaaacctggagacttgctcaacacatctgcaaaaggaaaagacaatgatgcccctacaagatcatgtagtctcaatgtatagaatgttgtactcctactcgtcactataaatagaggaacaatgccatgttgacaaacaccttttcttt

SEQ ID NO: 558 - protein, 85 aa, Zea mays subsp. mays
  peptide (1)..(85): Ceres Seq. ID no. 15224655
MRRGGAIRPSTRSCIARSSARRREEILKMPWREASIESSFTAATMWFTTNSRWYIAIFLPFFLPCLSLLLLARAGADNMLENKEN

SEQ ID NO: 559 - protein, 62 aa, Zea mays subsp. mays
  peptide (1)..(62): Ceres Seq. ID no. 15224656
MAPRRVWRLRSSSYRGPDAEVSSSVEAVPNGEDPSGCVGAVLSARQQDLALLGRVHGAEKKF

SEQ ID NO: 560 - protein, 60 aa, Zea mays subsp. mays
  peptide (1)..(60): Ceres Seq. ID no. 15224657
MHATRAPLLVRPAMRRYAGSINLCIDIIPALKSSLEKIINSSISLIPKLSEQPLTIHNHR

SEQ ID NO: 561 - DNA, 1819 bp, Zea mays subsp. mays
  misc_feature (1)..(1819): Ceres Seq. ID no. 15225023
aaccgcgggctctgcgacattgcccaggccgagtcgctccgctacaagcttctcggtgaactcgccgtgagaaggttatgctcttgaccgtgcatctttactgttgtagtcactctcacagcaggctcggctttttgctgtgccagaccctgtgttctaactctaaggtgacgaaattgatcaccccctccattgcattttatagttagtgggagggacttattactcttccattgctcaagtgttggagggttatgtacttctgaactaggtaaattttggagatagttattttagttgtgttttgtgcatgtcatctataaagcaaataggttaccgtgtaccaactttgtgtcggaagatgactatatcacctgtgccaactggtagtgtacctctgagaagctttggtcataggcttctgagatatttatggttggccacattacttgtctgtttgtttgtttttgtatgttttgagcttgttttattattgattattactgattactgatatgtgaatctttaattgctaaaatattcttgttagtatgcttggcacggcaccttttgtttacctctagtatttaatctttactaaattggtttgtttgattttcagggcatgttatggtgttctcttatttgtcatcgagagtggtactaagggctgcgaggtgtgagttccacaaataaaaaccattccagtttttgtttctatctcgctgcaccatgttatcctgacaatttttgctagtgtgctatttaaactgatggaacaattacagaacactttcctttgtcgaaattcatgagtgaattgttaacctagtatggtcctgcaggatagtgtgtatcagctttgcgctgttttgatgcgtcttttgctgaaagtgtttcctgctatatcaatctgagttaaatgggcagttgggttaagcatatctgctttctccgacaatcattttcctcacatgtactcaggaagttatttttttgcgttctatatgctgctgtcatctgttttgttggttagctttgtcagatatatttgtttcaacggcaagttagtgtaggctagagttgaaacccaacaaaaaccatatgtcaaggttaaagcgataggctaaatctttggtatatttcatcctttcaaatctcttactgctttatgtcaacttcgaccttcctctatctctctttttattgctattgtgacttgaaagatgttagaacaggtattctacatttatgttcttctcatccggattgccatatgttttcttcagttctgcacaactagttgctctgcaggatagtgtgtatcggctttgtgctaacttatatgcattttgtgccgtaagtgtttcctgctatatagactgaaggaaagtgggcagttgggttagacttgtatcctgtcttttccaacaatcattttcctctcatgtgacataatacatttgttcttggaaactagtttttgaattgctgtcttagcatttacatgtttagctgctttattatactgtatgcatccaggggtatggaatatggtctgttgcatgtgctttttcctggtatgcaaagcatgtagtttgaattccatgggttgtgttatatgtttcgctatctaagtcagcttcatctgaaaatgataagcagatcagtttcaattggaacatgccaagctgaagcgatactcacctgcaaggagcgtcttctctgtgtactgcgtcgaagctttacctttttatgtaaattacgctgtaaatgtacagttcctctggacactgaatttctaagggctttttttttt

SEQ ID NO: 562 - protein, 67 aa, Zea mays subsp. mays
  peptide (1)..(67): Ceres Seq. ID no. 15225024
MSSIKQIGYRVPTLCRKMTISPVPTGSVPLRSFGHRLLRYLWLATLLVCLFVFVCFELVLLLIITDY

SEQ ID NO: 563 - protein, 66 aa, Zea mays subsp. mays
  peptide (1)..(66): Ceres Seq. ID no. 15225025
MFRYLSQLHLKMISRSVSIGTCQAEAILTCKERLLCVLRRSFTFLCKLRCKCTVPLDTEFLRAFFF

SEQ ID NO: 564 - protein, 55 aa, Zea mays subsp. mays
  peptide (1)..(55): Ceres Seq. ID no. 15225026
MISRSVSIGTCQAEAILTCKERLLCVLRRSFTFLCKLRCKCTVPLDTEFLRAFFF

SEQ ID NO: 565 - DNA, 1810 bp, Zea mays subsp. mays
  misc_feature (1)..(1810): Ceres Seq. ID no. 13600199
  misc_feature: MA Experiment ID: 108535 Result: Down-regulated in Transcription
  misc_feature: MA Experiment 108535 PARAMETER Experiment Name: Zm_Meristem_P Parameter: Age (day) Value: 8
  misc_feature: MA Experiment 108535 PARAMETER Experiment Name: Zm_Meristem_P Parameter: Organism Value: Zea mays
  misc_feature: MA Experiment 108535 PARAMETER Experiment Name: Zm_Meristem_P Parameter: Plant Line Value: 35A19
  misc_feature: MA Experiment 108535 PARAMETER Experiment Name: Zm_Meristem_P Parameter: Tissue Value: Root Meristem vs. Above Root Meristem
  misc_feature: MA Experiment ID: 20000535 Result: Down-regulated in Transcription
  misc_feature: MA Experiment 20000535 PARAMETER Experiment Name: Zm_Hybrid_Seed_Dev_P Parameter: DAP Value: 30 vs. 12
  misc_feature: MA Experiment 20000535 PARAMETER Experiment Name: Zm_Hybrid_Seed_Dev_P Parameter: Organism Value: Zea mays
  misc_feature: MA Experiment 20000535 PARAMETER Experiment Name: Zm_Hybrid_Seed_Dev_P Parameter: Plant Line Value: 35A19
  misc_feature: MA Experiment 20000535 PARAMETER Experiment Name: Zm_Hybrid_Seed_Dev_P Parameter: Tissue Value: Embryo vs. Unfert Floret
  misc_feature (1752)..(1752): n is a, c, t, g, unknown, or other
  misc_feature (1754)..(1754): n is a, c, t, g, unknown, or other
  misc_feature (1790)..(1790): n is a, c, t, g, unknown, or other
  misc_feature (1791)..(1791): n is a, c, t, g, unknown, or other
gtccccccccccccccccatctacaatggaggagcatgcaattactgaccgtgagcttccgattgagggtcttgatcaaccactgtcagattttggaaatgatccggagttgttttctgaagcacagcctgtttcttcccatggtcaaggtcagggttggctcagtgaggggggtgacaaagctgaggtcgtggatgcttccattagcaatgatgttgtggtagtagcagagaacacctgcactgatatctctcttggggatattgagcagtttctcatgcaaatatctgatgatcagcaaaacgatgaattgttctcagatttatcaacaccacttccaaaattgcagttccagtgcgatgatcgtcaggtttggcttgatgccgaaatgggacatgaagtttatgctgcggatcctactgccagcagtggtgctgttgtaactgcagaatgcactgtcacagaacttccacttggagatcttgaagggcttctgctgcaaatagccaatgaccagcacatggtcgaatcccaatcagatctttctgcaccaactccacatcataacttcaatcaggctgacattggggatttacatgaatctcatggtgctcgggttggtaatctttcttgtatagttcaggaaagcacattttgtgaaccacggactgaaccaagtgatcaatttccacagtctaatgtaaccaatttgccatttagcggagaagcaaattcttctgaagggaccagtgtggcacattctgtgtcaggtttgatcagttaccacagtcaagatgctgatgaagagttccttgaaatcaacgatttctttgatctggaggatgtaggtcagaatgcaaattgtatgacaactgagtacatgatgtctgcaacaaatgggatgtttgacaatttggaatactctgatgcttcttcgtttctacctgggtcatttgacacagttggattggtagctgaaaatcaatattttgataccgattacagtggaattcaaaaccagggatatcaaaatacaaccgaagtaaggacatataatcaggctgctcttactgtgcggagccatatgaagcatgatcatgtagtcttatcctcgcatgcatcaggcactctgaatatccatgcggcaaatgagctacataaccagagctccacatcttcacaatcatggttcaatgcggctctatcagccttgttggactctgtacctagtagtccagcattagctgctgaaatcgaaaacactgttatcaacagaacactccagcgcatctctagcttccgaccacatcaaactgcaggtgaagaaaacacttttatcaacagaacacttcagcacatctctagcttcaggtcacagcaagcaacaggggaagaaccaggcacccctagtattcaggttaccagaggtggcaggmtgatgttcatatctctactggttatacttgcttctgttatatggacctttacttcaggctccgccctcaacttttgcaagggtttatggaaatcctcttctacgtgacagattaagtgggaacctggtgaccttgtcctctgtaaattttttggtcctcggtaccatttatggtttgaatatcatttccctttcaaaagggtgaagaggtagaaacattttgagggtggtaatatgattataggttgtagagcctatttaaaacggtaaaatgcaagggggaaaagcatatctgatggtaatatttgaaactaatngnttactgttctcatttgtatttkgacagatatatgtnntgaatgcaattaacctatt

SEQ ID NO: 566 - protein, 513 aa, Zea mays subsp. mays
  peptide (1)..(513): Ceres Seq. ID no. 15218917
  misc_feature (479)..(479): Xaa is any aa, unknown or other
SPPPPPSTMEEHAITDRELPIEGLDQPLSDFGNDPELFSEAQPVSSHGQGQGWLSEGGDKAEVVDASISNDVVVVAENTCTDISLGDIEQFLMQISDDQQNDELFSDLSTPLPKLQFQCDDRQVWLDAEMGHEVYAADPTASSGAVVTAECTVTELPLGDLEGLLLQIANDQHMVESQSDLSAPTPHHNFNQADIGDLHESHGARVGNLSCIVQESTFCEPRTEPSDQFPQSNVTNLPFSGEANSSEGTSVAHSVSGLISYHSQDADEEFLEINDFFDLEDVGQNANCMTTEYMMSATNGMFDNLEYSDASSFLPGSFDTVGLVAENQYFDTDYSGIQNQGYQNTTEVRTYNQAALTVRSHMKHDHVVLSSHASGTLNIHAANELHNQSSTSSQSWFNAALSALLDSVPSSPALAAEIENTVINRTLQRISSFRPHQTAGEENTFINRTLQHISSFRSQQATGEEPGTPSIQVTRGGRXMFISLLVILASVIWTFTSGSALNFCKGLWKSSST

SEQ ID NO: 567 - protein, 505 aa, Zea mays subsp. mays
  peptide (1)..(505): Ceres Seq. ID no. 15218918
  misc_feature (471)..(471): Xaa is any aa, unknown or other
MEEHAITDRELPIEGLDQPLSDFGNDPELFSEAQPVSSHGQGQGWLSEGGDKAEVVDASISNDVVVVAENTCTDISLGDIEQFLMQISDDQQNDELFSDLSTPLPKLQFQCDDRQVWLDAEMGHEVYAADPTASSGAVVTAECTVTELPLGDLEGLLLQIANDQHMVESQSDLSAPTPHHNFNQADIGDLHESHGARVGNLSCIVQESTFCEPRTEPSDQFPQSNVTNLPFSGEANSSEGTSVAHSVSGLISYHSQDADEEFLEINDFFDLEDVGQNANCMTTEYMMSATNGMFDNLEYSDASSFLPGSFDTVGLVAENQYFDTDYSGIQNQGYQNTTEVRTYNQAALTVRSHMKHDHVVLSSHASGTLNIHAANELHNQSSTSSQSWFNAALSALLDSVPSSPALAAEIENTVINRTLQRISSFRPHQTAGEENTFINRTLQHISSFRSQQATGEEPGTPSIQVTRGGRXMFISLLVILASVIWTFTSGSALNFCKGLWKSSST

SEQ ID NO: 568 - protein, 421 aa, Zea mays subsp. mays
  peptide (1)..(421): Ceres Seq. ID no. 15218919
  misc_feature (387)..(387): Xaa is any aa, unknown or other
MQISDDQQNDELFSDLSTPLPKLQFQCDDRQVWLDAEMGHEVYAADPTASSGAVVTAECTVTELPLGDLEGLLLQIANDQHMVESQSDLSAPTPHHNFNQADIGDLHESHGARVGNLSCIVQESTFCEPRTEPSDQFPQSNVTNLPFSGEANSSEGTSVAHSVSGLISYHSQDADEEFLEINDFFDLEDVGQNANCMTTEYMMSATNGMFDNLEYSDASSFLPGSFDTVGLVAENQYFDTDYSGIQNQGYQNTTEVRTYNQAALTVRSHMKHDHVVLSSHASGTLNIHAANELHNQSSTSSQSWFNAALSALLDSVPSSPALAAEIENTVINRTLQRISSFRPHQTAGEENTFINRTLQHISSFRSQQATGEEPGTPSIQVTRGGRXMFISLLVILASVIWTFTSGSALNFCKGLWKSSST

SEQ ID NO: 569 - DNA, 802 bp, Zea mays subsp. mays
  misc_feature (1)..(802): Ceres Seq. ID no. 13600216
ttgggtaccgggccccccctcgagtttttttttttttttttttgcatgaaaagattaattgcataacagttttttttcttacattcaccagtaaaagtggtattaagaatgcatttcaccgaatgaatatgacaggcccccacaaataagagctgacagaacagagaaaataaaaggttacactccgtgtgggcggacaccatttacagctgaaggtcatcaagtgtcaattcttctactgacatcaactttaattttgtgatgaactggggaggatcatcaaggctagatgaaccaaggatgatgtctcgcttcagcttggatgaaagcttgtgtgcagcacgtaactctgatcgagtagcaccgcctattacaaaaacaaatatacgctgaccaagtttcctgaagtcactggaggcatgcttcaacacagaatcacttgaatatccatcatcagagccacgaggtcttgcccatgtgccacctgttcgtctggatcgcattgagtgagcggggcttgttcgggcagagttactggttggcagtccatgaacagtaggactagggtcattcatacagttatattcatcttttggcagctcacctttgctaagattttcaatcaattgctccaaaatagggtaaaatcgagagagtgcccatgttgattcttcccctgttcgctcttttcgatttgtgtgtttcttcttgtgaacatnaaatttcagtgtaaaaccccctactgaagactttttggtatcaggcccacataagcaacgcatattatttacagcaatcatgt

SEQ ID NO: 570 - protein, 48 aa, Zea mays subsp. mays
  peptide (1)..(48): Ceres Seq. ID no. 13600217
GYRAPPRVFFFFFLHEKINCITVFFLTFTSKSGIKNAFHRMNMTGPHK

SEQ ID NO: 571 - protein, 43 aa, Zea mays subsp. mays
  peptide (1)..(43): Ceres Seq. ID no. 13600218
MNWGGSSRLDEPRMMSRFSLDESLCAARNSDRVAPPITKTNIR

SEQ ID NO: 572 - protein, 39 aa, Zea mays subsp. mays
  peptide (1)..(39): Ceres Seq. ID no. 13600219
MNSRTRVIHTVIFIFWQLTFAKIFNQLLQNRVKSRECPC

SEQ ID NO: 573 - DNA, 767 bp, Zea mays subsp. mays
  misc_feature (1)..(767): Ceres Seq. ID no. 13599983
ttgggtaccgggccccccctcgagttttttttttttttttttttaaaactgatcaccaccatcgttttattcttcatcagtaactaaacagcagagcagaatgcagcaaaatagtctcgccaattttgttccccccaactcaactaaacagcactccgttacaaccgaacaaatgtttcaaatgttctacgaaaactgcccaaaacgtcataacttcgacagctaatggggactaccgacaacggatggtttttaacgtaaatctccctcaccaatgggtgctaaaacgtaacaacaaacagcatgtgcgtccggggattctctctctcgcgcgcgtattctctcaactcccccctctctaccgtgttaggcccgcttgttccaagacttgcctcggtaggatttctgcttcgtcctccgctgcgatacgtagtccgcctcctcctggaacgggtttggcccgccaaagtcttgctttgacctccgcaccttcttcgtcttccctcggtcgtactcctcgtcccactcatctaagatgtagccaccgctcttgcgtttggactgcggctcagcgacctttatatttggcacgtctacatcatcccaacgcggaacggtagcttccatcaggtccgttgcgcgaatactggcaggctgggtcgctaccaacttagcatccgtggaagggctcggatcagactttggaacgtcggcgctgcaagaaggtgcacctgtgccagcaccgacacgggctccgtcgaccttgt

SEQ ID NO: 574 - protein, 124 aa, Zea mays subsp. mays
  peptide (1)..(124): Ceres Seq. ID no. 13599984
MVFNVNLPHQWVLKRNNKQHVRPGILSLARVFSQLPPLYRVRPACSKTCLGRISASSSAAIRSPPPPGTGLARQSLALTSAPSSSSLGRTPRPTHLRCSHRSCVWTAAQRPLYLARLHHPNAER

SEQ ID NO: 575 - DNA, 683 bp, Zea mays subsp. mays
  misc_feature (1)..(683): Ceres Seq. ID no. 13600225
gagtttttttttttttttttttctttttttttttttttttttttttttttttttttttttttttttttttttttttaacccgggctccccaaaaaaaacaaaaaaggcttcgaaaaacgggccaaaacttttctattcaagttccccaaaaaaaacgagccaaagggcttcgaaaaacaaaccaaaacttttctattcaggttccggggaacataccctggaacccctcttaagcatacatagcaaatatcaaagggccccccccccctctggggggatgggcccccaaagctgatcagggaaacttttctactaaagaggcccccccagggggaggaaaatttgggacccatcagggccgcttctgggaaaaagccccaaaacccgcgttcttttttcccttctggagaagcccaacttccccctttttcttttcttggcccatcttcaaagccttaaaaaggcccccctgcttgcgagacttgaaagcagtaccaaaatcatcctcctcccccccccctgggtaacgggcaccccccccacgatcggacggagaatcatcttttgcattcggggatttaccggctccctggtttgacaaacaaaaaaaagcaacgccctcaatttccttcttcagttcatcgaggaattgcttctcaagaatccccagtttcctctttttt

SEQ ID NO: 576 - protein, 97 aa, Zea mays subsp. mays
  peptide (1)..(97): Ceres Seq. ID no. 13600226
SFFFFFFLFFFFFFFFFFFFFFFFFNPGSPKKTKKASKNGPKLFYSSSPKKTSQRASKNKPKLFYSGSGEHTLEPLLSIHSKYQRAPPPSGGMGPQS

SEQ ID NO: 577 - protein, 76 aa, Zea mays subsp. mays
  peptide (1)..(76): Ceres Seq. ID no. 13600227
VFFFFFFFFFFFFFFFFFFFFFFFLTRAPQKKQKRLRKTGQNFSIQVPQKKRAKGLRKTNQNFSIQVPGNIPWNPS

SEQ ID NO: 578 - DNA, 1728 bp, Zea mays subsp. mays
  misc_feature (1)..(1728): Ceres Seq. ID no. 13635680
agcgcgagtgccactggaaattcccgaaggtagcaagttcgtggtggagtcctctggtgcaccggacatgtccggtggtgcaccggacactgtccggtggcacaccggacagtccggtgcgccagaccagaggtgccttcggttggccctttttgctcctttgttgaatccaaaacttggtctttttattggctgagtgtgaacctttaacacctgtataatctatacacttgggcaaactagttagtccaattatttgtgttgggcaattcaaccaccaaaattatttaggaactcggtgaaagcctaattccctttcaatttccaccgcccactttgaaatcctacccgaggcctctcggcactggatgatctcccccagggggaaggatgacaccacagtcacagggtagtagtgttgcaacttccgccgcgtcagaatcaccgcgtacagcagcttctgaatttgtgggtagcggatcttggtctcggacagtacctcactgatgaagtagaccggcctctggacgggcaaagtatgcccttcttctcgtctctcaaccatgatcgcgacgctgaccacctgagtggtagcggcgacgtagatcaagagggcttctccggcagcggggggcagcaagatgggcgcgttcatgaggagcgccttcaggttcccaagggcttcctcggcctcaggggtccaagtgaagcactcggcctttcttaagaggcggtataggggtaggcctctttcgccgaggcgcgagatgaagcggcttagagccgcaaggcatcccatgaccctctatacgcctttcaagtccttgatgggccccatgttggtgatggccgtgattttctctgggttggcctcgatgccccgctcggagatgatgaaccccaagagcatgcctcgggggactccgaagacgcacttctcgggattgagttttaagcctttcgccttgagacaccggaatgtcgtttcaaggtcggaaaggaggtcggaggctttcctcgtcttgactacgatgtcatcgacgtaagcctcgaccgttcgaccaatgtgttcgccgaacacgtggttcatgcacctttggtacgtcgcacccgcattcctcaaaccaaatggcatagtaacgtagcagtacatgccaaaaggtgtgatgaaagaagtcgcgagctggtcggactctttcatcctgatttggtgataccctgagtaggcatcgaggaaagacagggtttcacacccagcagtggaatccatgatttgatcgatgcgaggcagagggtagggaaccttcggacatgctttatttagaccagtgtagtctacacacatccaccatttccctcctttctttctcacaagcacagggttggcaagccattcgggatggaatacctctttgatgaaccctgcagccatcagcttgtggatctcctcgcctatggctctacgtttttcttcgtcgaatcggcgcagaggctgcttcacgggtcgggctccagctcggatgtccagcaagtgctcggtgacttccctcggtatgccaggcatgtccgagggactccacgcaaagacttcgacgttcgtgcggagaaagtcgacgagcactacttcctatttggggtccagctcggagccgatccggatctgcttggaggtgtcgttgctggggtcgagagggatggatttgaccgtctccgctgggtcgaaattgc

SEQ ID NO: 579 - protein, 134 aa, Zea mays subsp. mays
  peptide (1)..(134): Ceres Seq. ID no. 13635681
MGAFMRSAFRFPRASSASGVQVKHSAFLKRRYRGRPLSPRREMKRLRAARHPMTLYTPFKSLMGPMLVMAVIFSGLASMPRSEMMNPKSMPRGTPKTHFSGLSFKPFALRHRNVVSRSERRSEAFLVLTTMSST

SEQ ID NO: 580 - protein, 130 aa, Zea mays subsp. mays
  peptide (1)..(130): Ceres Seq. ID no. 13635682
MRSAFRFPRASSASGVQVKHSAFLKRRYRGRPLSPRREMKRLRAARHPMTLYTPFKSLMGPMLVMAVIFSGLASMPRSEMMNPKSMPRGTPKTHFSGLSFKPFALRHRNVVSRSERRSEAFLVLTTMSST

SEQ ID NO: 581 - protein, 109 aa, Zea mays subsp. mays
  peptide (1)..(109): Ceres Seq. ID no. 13635683
MEYLFDEPCSHQLVDLLAYGSTFFFVESAQRLLHGSGSSSDVQQVLGDFPRYARHVRGTPRKDFDVRAEKVDEHYFLFGVQLGADPDLLGGVVAGVERDGFDRLRWVEI

SEQ ID NO: 582 - DNA, 552 bp, Zea mays subsp. mays
  misc_feature (1)..(552): Ceres Seq. ID no. 12594094
tgtattcgaatcatacttagtggtggacgcctaaggatcaggacgtggtgcctcccgcactggtccgcggctgctggagcagctgccacggctggcatcgcagtggtcttgttaacctcaagagccaaatgattcagctgagtttcggtctcatattggtggagctgttgtatctgcagcaaagttggttactacaatgctggaacagtggagtttattgtggacactctttctggggagttctacttcatggagatgaatactcgactccctcctcccctcctagatcctgtgatctgctacgaagctgccatcaacgccctcctccccctctccgctcagctcctcctcgctctttcgtagaggagaggatttcacactgatgcaagcgctcatcaaggcagatttctggcttctgtttttctcgtctaccagataatcaagaaagattttagtattgcaagatttgctcagatgatgcggaggttaaatttctttgtggcattctgttgcattgggcatatataatagagcatgagatcattgtcaagg

SEQ ID NO: 583 - protein, 84 aa, Zea mays subsp. mays
  peptide (1)..(84): Ceres Seq. ID no. 12594095
MIQLSFGLILVELLYLQQSWLLQCWNSGVYCGHSFWGVLLHGDEYSTPSSPPRSCDLLRSCHQRPPPPLRSAPPRSFVEERISH

SEQ ID NO: 584 - protein, 43 aa, Zea mays subsp. mays
  peptide (1)..(43): Ceres Seq. ID no. 12594096
CIRIILSGGRLRIRTWCLPHWSAAAGAAATAGIAVVLLTSRAK

SEQ ID NO: 585 - DNA, 2050 bp, Zea mays subsp. mays
  misc_feature (1)..(2050): Ceres Seq. ID no. 13600268
ctttattgtgtttaaacagcgaattgggtaccgggccccccctcgagttttttttttttttttttttacaataatataattttcattcatatgaaaatatagaaagagtacatattacataactgggtgttcgagtgcagaacttattattacattaccgggaggcaaaacatcctccccaaataagtttagtgtttttcctcctaattgggcaccacctttgagcagaaacagcagaacttggttgtttcatcacctacaataacatgggttcgaaaaccatgaggtcaaagtgtacttttgcaagtcttacccgtgaaaggaaaagactatcaaggatatgctgccttttaggaatcaaggtaaagctcataaaaattcaaagactctgtttgcagaaaagcttactatgagtggatccttaaaaatccatttttattatcaggttaagtagttacctacatctagagttctttctatcctagatcaggcacttggcctatactagtcgtcttttatcatcccatcagttcactggattgctacatgtaagtcagtgaccaagtcttcatgttcgagaagtaacggcgatctgaatcgattaagacccagctggggatctccaaccgcatgatatatgtagcacttaacccttgcatatgtcaactcgccaccgggtttctcaaaaccagaatggattcacgccaaccaagagcacatatacaccaccgtccagcctcttgccacggagggtacacgctactctcaccatctctccactcctattgcatggtggcctttctggtattggtccgatcgaggaaaagcttacccatgacgaggcatgtggccagttaaaagatcctcgatcatcaagcctacatcgattcggtccttaatcaactcagacagagacactacaccgagacttccttctcgtgcaagtaacacacccggtctcgtctttatcatttacaacccaaagtttggtacctaacagaggtacatcttttcagatgttgaacccatcacggccatgatggattcaccgtcatcagtcttttctttgtaaaattcccatcctatatgaagcatcaccttttgtttaaaacaaaacattttgttttctacagcaaagctaagcattagaaaactttatgtaaatcaagtgacaaggaatggtaatcagttccaaggaagggaatgcatcaattgtttagcacacaactcctaccacctaatgcatcatataaggtgataaagtttttaaaacatcaaggaaaggggataatgcaccggggcttgccttgtgttgcaggaggttctgggtctactccacagatgtcgaagtagaagttattctcggctggaggattctcagcttgagcgacaacttcttcttcaatcacagtttcttcctcattttctatacatgacaatacatgtatatgaatgcttatgtgatgtcatgaatatgcagttacataatagaaacatactaagttgtatgttgaatacaactttgcttcatggtacacactaatcactagggtttcctaagttgatattctatcagtattaagcagataaacactaggaggctagttattgggtttgtgatcaaacagtgtccaaatcacttcaaacttcacccacagtcttcaatcatcatactaggcctacccaaaaagttttaccatttttggagttactaaattatttctaaaattctaaaaggcttggtttgaactcctttaaaggctacataattctaggtttgggataaaaatcttggaactatttttattaaatactatatgattttttggagtctggtaaagttggtctcatgattttaccaattttttactattttctacaaatctcctaatctgctagtaaaaagaaaaagagaaaacatgaatattgttgggccaattctggcccaaaccagcccgcgcacaggggaaacatgcgcgcgcccgcgctcgcggctttgcatagaggcctatggcgttttaaataactggtaaagaatccctaagcacta

SEQ ID NO: 586 - protein, 79 aa, Zea mays subsp. mays
  peptide (1)..(79): Ceres Seq. ID no. 13600269
MSTRHRVSQNQNGFTPTKSTYTPPSSLLPRRVHATLTISPLLLHGGLSGIGPIEEKLTHDEACGQLKDPRSSSLHRFGP

SEQ ID NO: 587 - protein, 75 aa, Zea mays subsp. mays
  peptide (1)..(75): Ceres Seq. ID no. 13600270
MIYVALNPCICQLATGFLKTRMDSRQPRAHIHHRPASCHGGYTLLSPSLHSYCMVAFLVLVRSRKSLPMTRHVAS

SEQ ID NO: 588 - protein, 54 aa, Zea mays subsp. mays
  peptide (1)..(54): Ceres Seq. ID no. 13600271
MDSRQPRAHIHHRPASCHGGYTLLSPSLHSYCMVAFLVLVRSRKSLPMTRHVAS

SEQ ID NO: 589 - DNA, 2109 bp, Zea mays subsp. mays
  misc_feature (1)..(2109): Ceres Seq. ID no. 14313467
ccccccccccccccccccccctcttggaaggaattccagtcttccatcaggctatggataagcaagagcaccctgaatcctcccaagatcccccgccggagttgtttgagcccctcaccatgaagaagattccagcaccatcccttgaagtcaaggaagaagctgcaagcaccctgccagcaccgtcgccctctgaggagctacaagagccagtccagcttgaagaagagttcaaccccgtcttgccatctcagttgccgctagaagaagtcatcaacattagctccctcttaacccatccaggagatgtctcagattgaagttgtgtgcaagccttgccagaagagaagctgcctggtctaaagttagttatgcccagtcctctgcatgcgttgggtagtgaagtttttcttcactttggctagagccctgcatgtatgagagttaatcatgtagactcgtgttttgaaaaactctatttgtgtggccccctagggcatttcaaaatgaacttcgcttgatgttttctccccttttgagtgcatatgtgatgctttaacgttagtgctcataagttgcatttaacatagttctcaattcaggagccaagcaatagtagttatgcttagcccccgaatctgagtagaccgtgctttggaaaaactctattcttcccttattcaaaacatttgatttgtctgtgcttatcattgctgagcttgtgtgttttctttcgttttaagaaaggttttctctaaaaacatagatcacaaattagagctaatcctcaccttatgcttccattctcatcttaacccttctcaagagaaaagcaccttacccaagaagatactaggaagcttacccttgaagcctggaataagctacagaggaacctatccagtcactcagtcaaaaggaccgaccgtgaaaatcaaagcaccgcccctgagtcaaattaaacagaaaaagaggacagaaggagttattaccatacagagaggcaaagattcttggaactagggaccacaaacatcagggtcattgaccccaccactcacccgtgccccccgcacgcgtgtcccatctccaaccaccacccacaccccttttttgcagcgcactaccgccccacccccacccctttgcagcgcacccactgccaccattactgccagcaacaccatcccccctccatcgcacttgttgccttgtgtcacctgctccatcaccaccactccgcaaccgagcacccccactcgcctataaattcccccaccagttccctcaatccccacctcactcaaagcaaaacagtcccgataaaatcccctctgccaaatcgcaagtaactccattttccactccctcgcccctgaaatcacaatgcttggtgattcttgggttgaagactgttgtacatggttcatagtcttcggtttcctcttctgtatgatggtaatactctttgatagaatcctctagtgggaagagcaaagagaaataaagggtcagtgagaagagaaaagaagacagcgaagagaagatgagaagaaggttgtcccaaagtcaaccctgtgtcagtcatctctccgtagcctgctcaagcagcaacagcagaagaaggccccgtaacacccttgttatgaggtacttcaaggagttcaaatccccaagattcaagagttctaccctcattctttttaagtggggtagtgttctagcaaggttcctgctatggagaaaaagaagaaggcctatagcaagcttgtggaggaccagatcatcaaagcttataagtttctggatgagaagtggtcacccaagttctgttgatgaagcaccagaagaccaatcaaggaaggaatccatgtgggagttcgcaagagaagtttgagtgttggcatcgatgcttcttcaataagctagttgccaagtgaaagctagaagcctgaagatgatcttgagtagccagaatcagcgtttgcaatcagcagccggatgctccgcaagggccagaatttgttgaagttccatctcctcgaagagttgcaaagtgaagatatgtagctgaagtaaagctatacccataacccttctaagccgaat

SEQ ID NO: 590 - protein, 88 aa, Zea mays subsp. mays
  peptide (1)..(88): Ceres Seq. ID no. 14313468
MDKQEHPESSQDPPPELFEPLTMKKIPAPSLEVKEEAASTLPAPSPSEELQEPVQLEEEFNPVLPSQLPLEEVINISSLLTHPGDVSD

SEQ ID NO: 591 - protein, 116 aa, Zea mays subsp. mays
  peptide (1)..(116): Ceres Seq. ID no. 14313469
MRRRLSQSQPCVSHLSVACSSSNSRRRPRNTLVMRYFKEFKSPRFKSSTLILFKWGSVLARFLLWRKRRRPIASLWRTRSSKLISFWMRSGHPSSVDEAPEDQSRKESMWEFAREV

SEQ ID NO: 592 - protein, 105 aa, Zea mays subsp. mays
  peptide (1)..(105): Ceres Seq. ID no. 14313470
PPPPPPLLEGIPVFHQAMDKQEHPESSQDPPPELFEPLTMKKIPAPSLEVKEEAASTLPAPSPSEELQEPVQLEEEFNPVLPSQLPLEEVINISSLLTHPGDVSD

SEQ ID NO: 593 - DNA, 694 bp, Zea mays subsp. mays
  misc_feature (1)..(694): Ceres Seq. ID no. 13600014
gatctatggttctaggttgatcttggtcttgcagtcgggattgccataagactggtgtccacgctgaggtgagcggtacgggtgctgagtcccaacgggagcgggggaaccaccatccaggtgacgacgctccgcgcgctcagcccgcagcagggcgatctcagcacgagccctactcagctcgtctaatgcatggtccagctccgtgtttagcacggcggctaggttgactttgctgctcaacctaggattgccctcaccgacaggtgagacaatcacgcctcctgtgctgccagatggacggcgggggtaatacttcaggtcaaggccgtcagctgccccaccgaaaactgagcagtagtgtgaaagcgcacgccgtgcagcatcttgcatggctgcctcagctgagtcccgctcagagatagaatagtgctctgagcagacctcagccccctggagattgttctccggacggcgcaccaagcaggtcgcctcccagcggtccgggtagaccccgcgactatgctggtagaccacacagcgatactcgatggaccaagtacgccggttaagtgcccgacgtagcagggtgtcgagcgcgtcgtggaagtgacacccgcgagcagcgtcgcgagtgatgggtcgagcaacccatccttccggctcatggttagcagagaagtcggtgtcgtgg

SEQ ID NO: 594 - protein, 42 aa, Zea mays subsp. mays
  peptide (1)..(42): Ceres Seq. ID no. 13600015
MDGGGNTSGQGRQLPHRKLSSSVKAHAVQHLAWLPQLSPAQR

SEQ ID NO: 595 - DNA, 983 bp, Zea mays subsp. mays
  misc_feature (1)..(983): Ceres Seq. ID no. 13587275
gcggcggtgttgacccacccacccgttcctcccccaccccatcagcgctggaggcggcggtgcgtaagtcccccggacccttcggcggcggcggcggcgcgcggttatgccgagaggctcccaggtttcatcatcgtgctctgctggagttatagcattttcagcaaggatatggagtacaccccctgcacagcaagttcctctgtatcccacatctcgctgctcgaggaagttcttggctggaggttttgtctttacggagacttcctggtcatctcttttgtcaactgcacttgaggatcaacccacgcttagtgactgccttgcctggtcccatgctgtcagacattagagttgcccagtgattacactattacagtgcagctgtagcacatttatttgagcatggtggatctgtttctctggcaacattccagtaatctttgtcttggtgctaatcagccagcagaagttaccatcaagacatctttggacacttggatctaacgcttagagctttgccttcgcatataggctctaggtttgggttttcgttttctgctagctttcttctactctaccactgtaagttttcagtctgatcggtccaaagtttggtgtgtattggttacgctgtccttcaccagccttcactttgcatggcgtgaccttagagaagacgtgttcaagattttgttgtcgcaaaagcatgggaatagcatacatagctttgagaggagtctccagtgactttggtgttgtaacatccaaagacactcctgttatacatatatgagtcctgttttttactatacaactgttctgaaataagggcagttctgtgcaccaccagcgaataaaatggagagatatacaattatcaacgaagttggtgatggaacatttgggagtgtttggcgtgcaaccaataaggaaagcggtgaagtggttgcgatcaagaagatgaagaaaaagtattattc

SEQ ID NO: 596 - protein, 98 aa, Zea mays subsp. mays
  peptide (1)..(98): Ceres Seq. ID no. 13587276
AAVLTHPPVPPPPHQRWRRRCVSPPDPSAAAAARGYAERLPGFIIVLCWSYSIFSKDMEYTPCTASSSVSHISLLEEVLGWRFCLYGDFLVISFVNCT

SEQ ID NO: 597 - protein, 81 aa, Zea mays subsp. mays
  peptide (1)..(81): Ceres Seq. ID no. 13587277
MPRGSQVSSSCSAGVIAFSARIWSTPPAQQVPLYPTSRCSRKFLAGGFVFTETSWSSLLSTALEDQPTLSDCLAWSHAVRH

SEQ ID NO: 598 - protein, 50 aa, Zea mays subsp. mays
  peptide (1)..(50): Ceres Seq. ID no. 13587278
GGVDPPTRSSPTPSALEAAVRKSPGPFGGGGGARLCREAPRFHHRALLEL

SEQ ID NO: 599 - DNA, 1066 bp, Zea mays subsp. mays
  misc_feature (1)..(1066): Ceres Seq. ID no. 14305282
ttcacccttctcgctaaaatgtttggtttgcttttaagtaatgtagacttgccatggctaagctagagatgacatgtgtgtcttgttttataagttcctttatctagtgatgcgatataggagttccttagacattgacgcttatgtcctctatcaaatttgtgttatcagtgatgcttgtgtgtgatcaataggagaactaataaaaagtcgtgtccaaataaataaaatgtgcgtgcttgtgatgttatttttctgttgcgtaaatatataaaatgatgtcatctttttaatggtgttaatgttgatcgccgataaagcgtagataactaatgttaacgtgtagttgcctacggtgtcttccaatttaaatgtttagttcgccactatgtctttctatatctgtgctacttttgtgctcctttcattatattcatacatatgcaccttgcatctcatttaggactgagacaggatgatcgtgcaagtgatgtggtgccacccacaagatgcagtcggtggacgacctcaagaatggacttaaccagtggatgctcgccaagcgagtacctcccccagcaaacactatctaagtgtcaaattaaaggcaagccccggttttatgcataaccgttatatatgctattttactgcacttaatgattataggtttgtactgtgcacttaagtgtaggagttacctaaaaccctagttgcattaactcaggattccatttgagatggacactagtatgctaggtcgagtaggtgctttactaattagggatctcggtagaagtcgagtgatttttctagcactcgcgcgaggtcaggaattggtgtatccaattttatatcgtaatgatgatggtctgtggacaacgatccatggggatgcgttgtctacgagacggaaattggaataaggattaaggtgtggtaccgtgtgtcaagcgtttgaacgtactaaacatatgccgagaaatatggtaaatcggtaagcctagtacctgagtgaacctggcatcagattgccctcctcacgcgacctgagacgtggtctccc

SEQ ID NO: 600 - protein, 62 aa, Zea mays subsp. mays
  peptide (1)..(62): Ceres Seq. ID no. 14305283
MHLASHLGLRQDDRASDVVPPTRCSRWTTSRMDLTSGCSPSEYLPQQTLSKCQIKGKPRFYA

SEQ ID NO: 601 - protein, 61 aa, Zea mays subsp. mays
  peptide (1)..(61): Ceres Seq. ID no. 14305284
MDTSMLGRVGALLIRDLGRSRVIFLALARGQELVYPILYRNDDGLWTTIHGDALSTRRKLE

SEQ ID NO: 602 - protein, 57 aa, Zea mays subsp. mays
  peptide (1)..(57): Ceres Seq. ID no. 14305285
MLGRVGALLIRDLGRSRVIFLALARGQELVYPILYRNDDGLWTTIHGDALSTRRKLE

SEQ ID NO: 603 - DNA, 743 bp, Zea mays subsp. mays
  misc_feature (1)..(743): Ceres Seq. ID no. 12589502
  misc_feature: MA Experiment ID: 108522 Result: Down-regulated in Transcription
  misc_feature: MA Experiment 108522 PARAMETER Experiment Name: Zm_42deg_Heat_P Parameter: Age (day) Value: 8
  misc_feature: MA Experiment 108522 PARAMETER Experiment Name: Zm_42deg_Heat_P Parameter: Organism Value: Zea mays
  misc_feature: MA Experiment 108522 PARAMETER Experiment Name: Zm_42deg_Heat_P Parameter: Plant Line Value: 35A19
  misc_feature: MA Experiment 108522 PARAMETER Experiment Name: Zm_42deg_Heat_P Parameter: Temperature (deg C) Value: 42 vs. 22
  misc_feature: MA Experiment 108522 PARAMETER Experiment Name: Zm_42deg_Heat_P Parameter: Timepoint (hr) Value: 1
  misc_feature: MA Experiment 108522 PARAMETER Experiment Name: Zm_42deg_Heat_P Parameter: Tissue Value: Aerial
cagctacgtaggccccccccccttttattaatattgtataaacatatgattggaacaaatgcccatgtgagataagccttgtttagcctctgttgatacttggcgtcttctattaaagctgcacgctgaaaacaatcatgtaacacaaatacgagtgtttgtctgaatcgtatggatgttagaaattgttcccgtggatttattgtgatagtattaatcttgtttctggtctattttttgctgtggttaatcaattattgtttggaaattaatatgcactagcactatctatcccgatgtattcatttctaattatggtaaaaaaaaagactcttgagttaacgttactcacattttttgcttgcagcttcaaatcaacgaccaacgttttgaggatgcagaggaggaacaggagagccatgaaaataatggacattagaaacagagacatgttcctcgagagcatcatgtgatttattttgttgtaaatcactaccgatgcagctcggtttgcctactgtttcatctacactttctcttcctttttccttgatgttataggattaacatcactgggtgactttctggaattgcatcgatggttccttttggtgagaaaaggtcttgctgctggtcaagaatgtaacttgtagagcatgatgttgaatcgtgtgaaattagttcagtacttttgatctaacaaatagaaggtcgaattgggaaaggagataaaaaaaaaaaaa

SEQ ID NO: 604 - protein, 58 aa, Zea mays subsp. mays
  peptide (1)..(58): Ceres Seq. ID no. 12589503
MYSFLIMVKKKTLELTLLTFFACSFKSTTNVLRMQRRNRRAMKIMDIRNRDMFLESIM

SEQ ID NO: 605 - protein, 52 aa, Zea mays subsp. mays
  peptide (1)..(52): Ceres Seq. ID no. 12589504
MVKKKTLELTLLTFFACSFKSTTNVLRMQRRNRRAMKIMDIRNRDMFLESIM

SEQ ID NO: 606 - protein, 36 aa, Zea mays subsp. mays
  peptide (1)..(36): Ceres Seq. ID no. 12589505
MDVRNCSRGFIVIVLILFLVYFLLWLINYCLEINMH

SEQ ID NO: 607 - DNA, 1474 bp, Zea mays subsp. mays
  misc_feature (1)..(1474): Ceres Seq. ID no. 13599079
gtaatcaggaaaaacgaaattgatatatctatatatggtagtactgtacaagaggtagctagccgctcatgcagatagcgaacccaaaagactatatagctatcaaagtatatatgtttaagacaccactactatagtatatatattttacaaatatgaaacattatccaaatataaaacccacgagtaaccaccatctggtacgtcttgagacttgatgtgtaagtaactcacgaaccagtgggcccgcgcatcgactcgcttcgccacgtacactggcagctctcgatgcagctagcaacgaagtagctggtgcagggcgcacggcgtcatcgatcaacgagagttgaagagggacgacgaatcgacgacctgctggcgctgggcgccggcggagtcgatcatcatggtgggggacgaccaggcggccgtgtggtcccagatgccggcggcttcgtcgaacacctcgggaggcacctcctggaagccctgcaggccgaagtcctcagccttgggcagccgcgtcatgaagtcctcgaagtcatctgcctcctgatgcagaggagccgccgccagctcgcgcaacatctgctgatggcgctgcatcgccatcgtggtggtggtggtgtcgtcgacgtggcagccctggacggcagccatcatcacgccgcacgaagacggcggcggcggcggcatttggaacgtcgtctggtggtgggtgtacgtgggcgaggttgccgcggccgccatggtcaccggcgacgagttggagttggagttggagtcggagttggacgacgacgcgtcggcggagcagcaggatgagtgcaccatcatcataggcgccgccatggagggctgctgctgctgcaggtactggtggtggcggctgtgcccgccagcagcagcagcagcagggccagccacggtgtcaggggacggagacgccacgattgccggtcctcctcctgcagccgccgagggaggaggtagctgcaggttgaggcgcgcacagtctccgtagagcgccctggcggcggcgtcgtaggcgcgcgcggcctcgagcgcgctgccgaatgtgccgagccagagacgtgcgccgcggttgggctcgcggatctcggccacccacttgccccaggtgcgctggcggacgccccggaaagggcactgctggttgtccggcccgcccttgcccttcatgcaccccttgcgcgaccggcgcagcgggcagcacttgcggccgccgggcttgctgccgccgccgttctggtgctgctgctgctggtgcgtacgttgctgctggtggacctgtgagtgatggacgaactgctgctgttgctgtcgatgcaccaccggcacctccacggcgacaggcggcgccaaccgatccatctggagtagcttcgtccacagatcgatatggcgaccggcgatggatgctaacaatgcaatccttgcctggtgtgtgcct

SEQ ID NO: 608 - protein, 132 aa, Zea mays subsp. mays
  peptide (1)..(132): Ceres Seq. ID no. 13599080
MCRARDVRRGWARGSRPPTCPRCAGGRPGKGTAGCPARPCPSCTPCATGAAGSTCGRRACCRRRSGAAAAGAYVAAGGPVSDGRTAAVAVDAPPAPPRRQAAPTDPSGVASSTDRYGDRRWMLTMQSLPGVC

SEQ ID NO: 609 - protein, 91 aa, Zea mays subsp. mays
  peptide (1)..(91): Ceres Seq. ID no. 13599081
MVTGDELELELESELDDDASAEQQDECTIIIGAAMEGCCCCRYWWWRLCPPAAAAAGPATVSGDGDATIAGPPPAAAEGGGSCRLRRAQSP

SEQ ID NO: 610 - protein, 89 aa, Zea mays subsp. mays
  peptide (1)..(89): Ceres Seq. ID no. 13599082
MQRSRRQLAQHLLMALHRHRGGGGVVDVAALDGSHHHAARRRRRRRHLERRLVVGVRGRGCRGRHGHRRRVGVGVGVGVGRRRVGGAAG

SEQ ID NO: 611 - DNA, 469 bp, Zea mays subsp. mays
  misc_feature (1)..(469): Ceres Seq. ID no. 13586889
ttctctctgcccaagccccccgccaccagcccaccaccactgtacagcacaccactcctcgtctgctccctcaacaccctctcctctccctccttcaatgcgagaagctccgtcggcgtgcgagctctgaagccatggtagccggcgccgggaacccggggcgtcctgtcgcggttcttgccctcctcctcctcgccgccgccgcgccgcccggtgcctgggccgggtccgcggccgtgaacggggaccgcctccgggcagagcagatccggaagcaggcctcggacgcggccgcatccgctgccgcgctcgccgcggcgtcgcgccggctccacctggaccgcgcgcgacacctccgcctcctctcctcgctccaccgcaacctcaccaacacgctccgcgccctctccgtagccgccgacttcgcctcggacccttcctccggcaacgtatcgtcctcccgccagct

SEQ ID NO: 612 - protein, 155 aa, Zea mays subsp. mays
  peptide (1)..(155): Ceres Seq. ID no. 13586890
LSAQAPRHQPTTTVQHTTPRLLPQHPLLSLLQCEKLRRRASSEAMVAGAGNPGRPVAVLALLLLAAAAPPGAWAGSAAVNGDRLRAEQIRKQASDAAASAAALAAASRRLHLDRARHLRLLSSLHRNLTNTLRALSVAADFASDPSSGNVSSSRQ

SEQ ID NO: 613 - protein, 111 aa, Zea mays subsp. mays
  peptide (1)..(111): Ceres Seq. ID no. 13586891
MVAGAGNPGRPVAVLALLLLAAAAPPGAWAGSAAVNGDRLRAEQIRKQASDAAASAAALAAASRRLHLDRARHLRLLSSLHRNLTNTLRALSVAADFASDPSSGNVSSSRQ

SEQ ID NO: 614 - DNA, 1007 bp, Zea mays subsp. mays
  misc_feature (1)..(1007): Ceres Seq. ID no. 13599087
acggtatcgataagcttttttttttttttttttaagcgcaaagccaaatttaaccaagttctagtgattaaaaagtcatacaatgttcagagatgataattctagcgcttatagtagttgttgagtcaaccgacatggtcatacaaatttatagagtacatcagtaattgaagagctacggaacgcttaaataaaaacagagctgcaaatgttttagcggtttggttatatgtacacaaaagcattcatgctccaaaagtgatgatgctcatcataggtatgcaaaatagttacctgagtttccagagttggcagcgtgaagatgtcacagagttcttaaagtccccagcgtgaagaacaattggcttttttcacagagctcgtagaggtagcagcataaatatatccttcaacgacaacctgagttcccagagttagtagcgtgaagttgtcccagagttcccagcgtgatttcgtgaacaacaattggccttttttgtcacccaaagtagtagcgtgaagatgtccttcaatcataacattcgatgccgatggtggtgcagttggagcaacgcgcgatagtgacggccaaagacgaagatgatgaaggccggtatggatcagcgaggagttgtagtggctgacagcggagctaccgatgccgatgtgcggcgtgggtgtcgaggaaagcattggcggcactgacgtcgaactggataaggttcttcaatacacaacctccagtcgaaaatgtaaggggaaagggcatttttccggatggattctggtgaagaacacgaaccctaaagccacaaaggcgagaaaaccctgaacaaaacgatgccgccgaagcggatgagcagaatgtgcggcggccgtgagagggaggaagaaacggcggagagatcgaggatgagagggaactgtagcacggagcggcagagcgcgaggacgaagaggcaacggagagagcgacaacgaagataatctgtagcgcgggggcgaat

SEQ ID NO: 615 - protein, 57 aa, Zea mays subsp. mays
  peptide (1)..(57): Ceres Seq. ID no. 13599088
MPMCGVGVEESIGGTDVELDKVLQYTTSSRKCKGKGHFSGWILVKNTNPKATKARKP

SEQ ID NO: 616 - protein, 55 aa, Zea mays subsp. mays
  peptide (1)..(55): Ceres Seq. ID no. 13599089
MCGVGVEESIGGTDVELDKVLQYTTSSRKCKGKGHFSGWILVKNTNPKATKARKP

SEQ ID NO: 617 - protein, 48 aa, Zea mays subsp. mays
  peptide (1)..(48): Ceres Seq. ID no. 13599090
MPPKRMSRMCGGREREEETAERSRMRGNCSTERQSARTKRQRRERQRR

SEQ ID NO: 618 - DNA, 723 bp, Zea mays subsp. mays
  misc_feature (1)..(723): Ceres Seq. ID no. 13599149
gaaccaaaactaagtttatggataaaaatacattttaagatttttaaaacctatatgacaccacctctcatattacacagtacgacattttatccaacaaagctgctacagctgcggctcgttatctttacaccgcgttcttgttagctgtttccgccgcggcaccagtagtcacggcaccaccacggccgctctggctctcgcttccgccgccaccgtcgccgtcgcttcgctgcttgagatcacggaagacccgcgagctctcctcgaagatgtgcgcgcggcggtcgtagtcggtgggccggcgcccctcgtcctcccccatgatggccgcctcctccagcacctccagctcttcgggcgccagcccggcctcctccgcctgatcgaccgccgacgccggcccgtccttgcgcggctcgacgggctccgtcgtcccgcctccgcgcggcgtgtttgcgcgcaagcgccgcgcgggagccgcgcgccagacgcagacgcggctcgtcgtggtggcccgggcctggcacgccgtggccgcgcgcgcgcggggtacctccggctgtggccgcgcgggggccaagcacgagcggcaaacgggttgcatgtctcgggagtcgggacagggccagcgggcgccgggggatcggtgaggtgatgcggcaggttcgtcgggaacggtgaacacacgatttgggttcggactttgggtgcagagccggt

SEQ ID NO: 619 - protein, 48 aa, Zea mays subsp. mays
  peptide (1)..(48): Ceres Seq. ID no. 13599150
EPKLSLWIKIHFKIFKTYMTPPLILHSTTFYPTKLLQLRLVIFTPRSC

SEQ ID NO: 620 - protein, 30 aa, Zea mays subsp. mays
  peptide (1)..(30): Ceres Seq. ID no. 13599151
MTPPLILHSTTFYPTKLLQLRLVIFTPRSC

SEQ ID NO: 621 - DNA, 1276 bp, Zea mays subsp. mays
  misc_feature (1)..(1276): Ceres Seq. ID no. 12590542
ctcatatttccctattattatataatgatacatgcgcactttttacatagacttccggctgaccaactcccacctcgataaaagagctataccaacgtagggtgacaaagtaggcatgtacatgtacatatctcaaaagagatctgacatctcaaaacagacccaaaaaaaaactgctcgcttcattctctctcactaatctaactttgacccctaagcatcccaggctgctcctcagcactgggtggtggtggtgctcatctgcttcctgttggccagagaagagaagaccctggcagtcttcaccttcttcaccagaagcccccatttgtcgccatcatcgccgcccttggcagccgccttatcctgctcctgctgcttaaacctcatgcagagcggggtgttgcagcggtcggtacggtcgcagagcgcggagtggaggcggagcagctgccacatgcgctggcaccgcgcgcagctcttgcggtggcactgggagaagtggcggatgagcagctgcaggccccggcacgtggcgtagcgcgcgcacggcgccggcgccggcgcccgccccgccgggccgacctccgtgcatccctccgtgcagatgtggtccaggcagtccatggcctcgctcagctccatgtacacgcgctgctccgcgcgcttccgccgccacttgcgccgccgcatgtcggcctcgtgcaggcgctgcaggacgtggagctcctgccaggggtcgttctcctgcaggaagcgccaggcctcggtgcgctccacggccgcgaactccttggccagcagcctggcgcagcgcaggtgcaggcgcggcgcgtcgcagaggccggccagctgcagcacgtccaccaccgagtccgcggtgaggcgcgcgccgatggcgccctcgcacgcccgcttcagccacggcacctggtacgcgtgcgccagcaccagcacctgcaccgcgtgctcctccatgtcgtcatcctcatcctcgccgcaccaggacagaggaatgcgcggggatcctccggcgcccgcccgtcgtgacgacgtcgacgtcggcggcggccgggtcgccggcgccggcgcggttgccgagccgcggtgcctcgcacatctcgttgtctggcgagaggtggtggaatggaagggaacgagccgggggcgtggggggataaaaaaaatatctgcggaaaaggtccggggcgcggcgggggcgggagacgtcgcagttgcttgcgttgcgtgctcttgtctgggtagccaggccaat

SEQ ID NO: 622 - protein, 223 aa, Zea mays subsp. mays
  peptide (1)..(223): Ceres Seq. ID no. 12590543
MWSRQSMASLSSMYTRCSARFRRHLRRRMSASCRRCRTWSSCQGSFSCRKRQASVRSTAANSLASSLAQRRCRRGASQRPASCSTSTTESAVRRAPMAPSHARFSHGTWYACASTSTCTACSSMSSSSSSPHQDRGMRGDPPAPARRDDVDVGGGRVAGAGAVAEPRCLAHLVVWREVVEWKGTSRGRGGIKKISAEKVRGAAGAGDVAVACVACSCLGSQAN

SEQ ID NO: 623 - protein, 217 aa, Zea mays subsp. mays
  peptide (1)..(217): Ceres Seq. ID no. 12590544
MASLSSMYTRCSARFRRHLRRRMSASCRRCRTWSSCQGSFSCRKRQASVRSTAANSLASSLAQRRCRRGASQRPASCSTSTTESAVRRAPMAPSHARFSHGTWYACASTSTCTACSSMSSSSSSPHQDRGMRGDPPAPARRDDVDVGGGRVAGAGAVAEPRCLAHLVVWREVVEWKGTSRGRGGIKKISAEKVRGAAGAGDVAVACVACSCLGSQAN

SEQ ID NO: 624 - protein, 211 aa, Zea mays subsp. mays
  peptide (1)..(211): Ceres Seq. ID no. 12590545
MYTRCSARFRRHLRRRMSASCRRCRTWSSCQGSFSCRKRQASVRSTAANSLASSLAQRRCRRGASQRPASCSTSTTESAVRRAPMAPSHARFSHGTWYACASTSTCTACSSMSSSSSSPHQDRGMRGDPPAPARRDDVDVGGGRVAGAGAVAEPRCLAHLVVWREVVEWKGTSRGRGGIKKISAEKVRGAAGAGDVAVACVACSCLGSQAN

SEQ ID NO: 625 - DNA, 854 bp, Zea mays subsp. mays
  misc_feature (1)..(854): Ceres Seq. ID no. 14306335
ctctctgttaattccggggagcaccagccaagctcctcccctgcggctcgcctccctcacggcgccgcctgctccccattgccgacctccactccagcacctgagcaagcgctcctgaggtcatcttccccatcttcctctagtgccggccgccaggtcatcttccccatcttcctctagtgccggccgccaggtcgtcttccccatccctcccatggcgccctcacctctgctcctcccagcgccctggctctgttcaaccttcacagtgagctcgccctcagccatggcggatgccgcctccacctcccccttggtgctcgccgagctcgccctcagccctgccgcgcccctgctttctgttcccagtgcgccctctgttctgttccaatcgttctccacgccgtgttcccccatggctccccttgcctctccggtcagcactagcccgaacggtacagcagcataccggtgccaaacccgtgtccgcgacgctcgccaagtgctcgatgaaataccgcagtgagctccacctcgacctgtgcagccccaacccgcgacgtcgcaacacccttgccctccgtcgatgtcgcgcttcgcgcattgctcctcgacgaagagccagaaccgtggtagacatgcatgcgcaatccgaactaattttacctggttgttcgctttatgtgattgtagtttgctctaattacgtgtggtcgatggcgtgaatatgtgtgtgaaaatgtaagcacatactctcatgcttaacaaaacaatccaaaatattaccatatatggttgcaacagcagagtgccaaacaatggaaatcaaaatcgacttacttcttcgtgtgctt

SEQ ID NO: 626 - protein, 143 aa, Zea mays subsp. mays
  peptide (1)..(143): Ceres Seq. ID no. 14306336
MPPPPPPWCSPSSPSALPRPCFLFPVRPLFCSNRSPRRVPPWLPLPLRSALARTVQQHTGAKPVSATLAKCSMKYRSELHLDLCSPNPRRRNTLALRRCRASRIAPRRRARTVVDMHAQSELILPGCSLYVIVVCSNYVWSMA

SEQ ID NO: 627 - protein, 103 aa, Zea mays subsp. mays
  peptide (1)..(103): Ceres Seq. ID no. 14306337
MAPSPLLLPAPWLCSTFTVSSPSAMADAASTSPLVLAELALSPAAPLLSVPSAPSVLFQSFSTPCSPMAPLASPVSTSPNGTAAYRCQTRVRDARQVLDEIPQ

SEQ ID NO: 628 - protein, 79 aa, Zea mays subsp. mays
  peptide (1)..(79): Ceres Seq. ID no. 14306338
MADAASTSPLVLAELALSPAAPLLSVPSAPSVLFQSFSTPCSPMAPLASPVSTSPNGTAAYRCQTRVRDARQVLDEIPQ

SEQ ID NO: 629 - DNA, 1184 bp, Zea mays subsp. mays
  misc_feature (1)..(1184): Ceres Seq. ID no. 13600595
cattgaagatgactggggagtactattaaatcaaccttatagcatctatggaatcatgtatacatgatacattatgggaaattacgtagcagtaatccttacatgagaggaggttgatgcaaactgtataatgcatgccttttaccaaagtagaatgtgttcagctcaccatattcatcaataggagcatcatagtcgtagctagttgcaatgaatggaccaccagctgtgcgcccaaaatttgttccaccatgatacatgtaataattaacaaaagagccacccttctgaataaacttggccacaccatatgctagatcctctactggtctatgtggaactggaataccaaatcctgtataccaagatgtccaagcctcagtccacattgtaggcttgtgaggtttgtttggggagaaccagtcacaataaaatccattgcaagtattaataattggatccggggcatcatcttctttgcacatgacccatggaacacttgtgttgagcgcaaccgccatgttagctgcccatgacgcataggccttggcgggctctccctgatcccactccaagggcccaaattcattctcaatctgggaaagaattattggccctccctgccattcaaagagcccttcggacttcatcatgtcaacgatctttgtggtgaaattctgcatctcagccttgaacggttcattatcagtcctaaagctaatgcccgggacatacttgagccaaacagggaaaccaccgaaattccactcggcgcagacgtaggggccaatgcggaggtgcacgtagagtccggcctgcttcaccagcttgatgaagtgcaccagatcataccgaccctcgaagtagtactgtcgacgggagggctcatggccgttccagaagacgtacgtctgcacgacgtcgaggccgccgtccttggccttctgtatcagatccggccacatctcggggacgctccttgggtagtggatggagccggacatcaggatccggcgctggccgttcaccacgacggccttgcggtcgtaggtgacggccgccgacgccgcggcggcgagcacggcaaccgcgaccgcgaccgcgacggaggccaggcccgctggcgccgcgggggccatggagcggggaggagaggaaagggagggagggagggaagtgaaaag

SEQ ID NO: 630 - protein, 99 aa, Zea mays subsp. mays
  peptide (1)..(99): Ceres Seq. ID no. 13600596
MAVPEDVRLHDVEAAVLGLLYQIRPHLGDAPWVVDGAGHQDPALAVHHDGLAVVGDGRRRRGGEHGNRDRDRDGGQARWRRGGHGAGRRGKGGREGSEK

SEQ ID NO: 631 - protein, 67 aa, Zea mays subsp. mays
  peptide (1)..(67): Ceres Seq. ID no. 13600597
MWNWNTKSCIPRCPSLSPHCRLVRFVWGEPVTIKSIASINNWIRGIIFFAHDPWNTCVERNRHVSCP

SEQ ID NO: 632 - protein, 60 aa, Zea mays subsp. mays
  peptide (1)..(60): Ceres Seq. ID no. 13600598
MPFTKVECVQLTIFINRSIIVVASCNEWTTSCAPKICSTMIHVIINKRATLLNKLGHTIC

SEQ ID NO: 633 - DNA, 1349 bp, Zea mays subsp. mays
  misc_feature (1)..(1349): Ceres Seq. ID no. 13599520
cagagaatgttacggtcttacggatatagaacaggttcatataacagagcagaacatatcacaaacattttgtgaaacttacgtttctccaaaagacaaactaatctcaggttgctaaggtttcaacttaagtaactacgctcatgttaatccacgatcagcatactaaattctgcgactcttagctgctttctcccatatatccgcaatgatactagggcattcccgtttcagttgctcataccctttactggccaccacatcaccaattatattagaagagttcataaactcaatgcaagcatctttgagctggctgcaatggtgctggtcggctagagccagcgtggtcgccacagtctcggcacaaagaacctcgcacagcttgctctcgcacatcaatttcatcctttccatggcatacctatctgcagcgacaagcaaatgcctaagcatttcttcatactcttcatcattcaggtcatccatcggaggcaacgaatccttgtagatgaagtgaagcagtcctctgaaagcagcaggctgcatatcttcaacagttatgttgtgcctttttttgtccctcattggcccgtagaactctgccctgaagaccgctgaacgcatcgcgaggattatcttatgagctgagaaaaccgcatgcttcacattgaaagatacatcagccccctctgtggcctccagcaagctactgagattatcaaacagatcggacggcggcacttggaccacaacattcgtcttggcgtcctccacctgcgcctccttgaacttgatcactgtaagattgcactggatgccaagaatgtcgtccacaatccactctccaagctcactcttcctccggaatttggtaaagccccagctcacggctgcattgtcacgggtgtcaaaaatcgacgggtctacctggctagggtttggccgggcataaggccgcggcggcggagccgctgtggcctggtcgactagccagatatcgtagagcaccctcacctccgtgttctcggtcttgagctcgaggtaggccgacacccagccattgctgtcttccctgtcgccgtcggggtagaagcggacgcaccagtcgtagccgccgacggcgaaggtagcggaccggatgaacttgccgacgccgaagcccctgtgcaggctgtacccgtcgatcttgaagacgtgcgacccgtgcgcagtctccggggcgcaggtcgaggcggtcctcgtcagtgagctctcggacgcggccatcgctggcctctggtggggcagcaactaagcgcggcggcggcggcggcggcgggatggggaaattttttggggctggggat

SEQ ID NO: 634 - protein, 110 aa, Zea mays subsp. mays
  peptide (1)..(110): Ceres Seq. ID no. 13599521
MLHIERYISPLCGLQQATEIIKQIGRRHLDHNIRLGVLHLRLLELDHCKIALDAKNVVHNPLSKLTLPPEFGKAPAHGCIVTGVKNRRVYLARVWPGIRPRRRSRCGLVD

SEQ ID NO: 635 - protein, 100 aa, Zea mays subsp. mays
  peptide (1)..(100): Ceres Seq. ID no. 13599522
MILGHSRFSCSYPLLATTSPIILEEFINSMQASLSWLQWCWSARASVVATVSAQRTSHSLLSHINFILSMAYLSAATSKCLSISSYSSSFRSSIGGNESL

SEQ ID NO: 636 - protein, 71 aa, Zea mays subsp. mays
  peptide (1)..(71): Ceres Seq. ID no. 13599523
MQASLSWLQWCWSARASVVATVSAQRTSHSLLSHINFILSMAYLSAATSKCLSISSYSSSFRSSIGGNESL

SEQ ID NO: 637 - DNA, 794 bp, Zea mays subsp. mays
  misc_feature (1)..(794): Ceres Seq. ID no. 13599189
cgagaagaataataactttctgttggtttgtgccttcaacaaaatcatttattccaaaaagtccaacacaattacgaaaaggaaaaataaaatcattttctaatttattccatcatttgtagtagtaaaaaagagactttcactcatcatcagcccgagagagctgcgttcatagcactgtgaacttcgacaccaatctgtgcttctgctttctcaagatctgttgtggcagaagcaagtttctgtgtaaactcagctaaacccttttggacttggcttgcgtcgatgttctcaagcggcacggcctcaaccgcgataatgtcagcaacggaatttgcgtggagaaatgcaaatccactgctcacaaagtatttcttgatgtcagtaccttcgtggacggacatgataccgggtttgagctcagcgattgttggaacgtgtccaggcaaaacacccatttgtcctgttgtcgcgggaatgatgaccatgtcgacctctttcccggaaagctcagatgcgtaagggaggacgaaattgacggtgagcttcgtcggaatcgaggaagcagtcgatggacgaggcttcatgaaggaagaaggagtctgcggcgggtccatgttcggtgcgactttcttccatgcctccacgaaactcgaatcgatcgtcgacgggacttccgttgaaaacgcacggtttgtcgccgatttggcggtgatagatcgggagacgaggcgagaagcttgtctgaacatggcggcgatttggtggtgatgatgatgctgagaggaagagag

SEQ ID NO: 638 - protein, 78 aa, Zea mays subsp. mays
  peptide (1)..(78): Ceres Seq. ID no. 13599190
MFSSGTASTAIMSATEFAWRNANPLLTKYFLMSVPSWTDMIPGLSSAIVGTCPGKTPICPVVAGMMTMSTSFPESSDA

SEQ ID NO: 639 - protein, 67 aa, Zea mays subsp. mays
  peptide (1)..(67): Ceres Seq. ID no. 13599191
MSATEFAWRNANPLLTKYFLMSVPSWTDMIPGLSSAIVGTCPGKTPICPVVAGMMTMSTSFPESSDA

SEQ ID NO: 640 - protein, 61 aa, Zea mays subsp. mays
  peptide (1)..(61): Ceres Seq. ID no. 13599192
MKEEGVCGGSMFGATFFHASTKLESIVDGTSVENARFVADLAVIDRETRREACLNMAAIWW

SEQ ID NO: 641 - DNA, 1031 bp, Zea mays subsp. mays
  misc_feature (1)..(1031): Ceres Seq. ID no. 13587596
caggaaaaacgaaattgatatatctatatatggtagtactgtacaagaggtagctagccgctcatgcagatagcaaacccaaaagactatatagctatcaaagtatatatgtttaagacaccactactatagtatatatattttacaaatatgaaacattatccaaatataaaacccacgagtaaccaccatctggtacgtcttgagacttgatgtgtaagtaactcacgaaccagtgggcccgcgcatcgactcgcttcgccacgtacactggcagctctcgatgcagctagcaacgaagtagctggtgcagggcgcacggcgtcatcgatcaacgagagttgaagagggacgacgaatcgacgacctgctggcgctgggcgccggcggagtcgatcatcatggtgggggacgaccaggcggccgtgtggtcccagatgccggcggcttcgtcgaacacctcgggaggcacctcctggaagccctgcaggccgaagtcctcagccttgggcagccgcgtcatgaagtcctcgaagtcatctgcctcctgatgcagaggagccgccgccagctcgcgcaacatctgctgatggcgctgcatcgccatcgtggtggtggtggtgtcgttgacgtggcagccctggacggcagccatcatcacgccgcacgaagacggcggcggcggcggcatttggaacgtcgtctggtggtgggtgtacgtgggcgaggttgccgcggccgccatggtcaccggcgacgagctggagttggagttggagtcggagttggacgacgacgcgtcggcggagcagcaggatgagtgcaccatcatcataggcgccgccatggagggctgctgctggtggacctgtgagtgatggacgaactgctgctgttgctgtcgatgcaccaccggcacctccacggcgacaggcggcgccaaccgatccatctggagtagcttcgtccacagatcgatatggcgaccggcgatggatgctaacaatgcaatccttgcctggtgtgtgcct

SEQ ID NO: 642 - protein, 89 aa, Zea mays subsp. mays
  peptide (1)..(89): Ceres Seq. ID no. 13587597
MQRSRRQLAQHLLMALHRHRGGGGVVDVAALDGSHHHAARRRRRRRHLERRLVVGVRGRGCRGRHGHRRRAGVGVGVGVGRRRVGGAAG

SEQ ID NO: 643 - protein, 76 aa, Zea mays subsp. mays
  peptide (1)..(76): Ceres Seq. ID no. 13587598
MALHRHRGGGGVVDVAALDGSHHHAARRRRRRRHLERRLVVGVRGRGCRGRHGHRRRAGVGVGVGVGRRRVGGAAG

SEQ ID NO: 644 - protein, 49 aa, Zea mays subsp. mays
  peptide (1)..(49): Ceres Seq. ID no. 13587599
MVGDDQAAVWSQMPAASSNTSGGTSWKPCRPKSSALGSRVMKSSKSSAS

SEQ ID NO: 645 - DNA, 1744 bp, Zea mays subsp. mays
  misc_feature (1)..(1744): Ceres Seq. ID no. 15179131
tgaaggaaaagggtaggttaaacaaaattagtccaaaattatgattccagtacttataagaatgcagttataatttccaatgtattaggagttataattttgcataaaatgggtgctcttcatgatgccacaaacaaaacagacaccaataatcaggcaataccgtaaaataaacagtagtagacttaccctctttgtggcctctgcttggcattctcgttcatattactgtttaaggtattttattctttgtgatttgtagtgatgacaacattaatgagttcttgatgaacatgggcactttgtgttgtgcatatgccatcttcggatagcagatgaacttctgatgaagatgtgcctgaacatatctgttcttcctgccatgcattttaccataatatgtttctttgaaatatgttaataagtgcaatgaaaagattttatggctgctttgctccttaaaatggtgcctctgccatgaacgattgtttttaaaataaatgctacgattaactaccttcttgtcatcatctttaaagattgtcagattcccgtataagcatctgttgcagcagctgcaacgaacaagccatatactgcttgttatcaagttttttgtttctccaaaatattccatgcgatcattcttgcaatggtttatgtttagtattttgttgccttaatcttggatttcctgcaaacttacaatggcggttcttttgtacatgttgaacaagtattcctaaactgtactgtatataaggtaagattgaatgttagtattctgttttcttcatggtatctagtatttttgtattataattgattatctatatgtttgctaaaacatgagttgttgggagttctgtacaaaggaatctggtctatatttatggtcgtctacatgccacttccagtccattctaataatattttttatttgagtttttgagtgatttctttcatggcttggagtaagaaatacagtttattacaaaaatcatcttcaggatgaagatatcgaataccttgtgtaaccaatcgctaagcctcaagccagtactattggaagtgaattagatggatctgaccctgatgatattgatgaagacatagaataagtcgacgatgatgatgaggggaccatagattagccttcatcctcgcacggaaccaagcggaagagagatgatccctcgccagacccaactaccaatcaagaattacgaggatctccttcgttgtgttggtcgctgaccaggaggcaaaaacatagagggaataagcgacagacaggcacggcgaggcatacctgggacggtctggacacggacagcttgtggtgactcctgcggaggctgccagcaagactgaggaagagtaggcggagtgaagaaggaggcgtcgcggtgcgcggcggaggagctcatggcccgcgcgacgaggacggtggtggtggtgatggagaaccacacctgccccaggcccacatcgacggcctcacggaccgtgagtacaacaacctcgatgcctccgaccccaactccctagagatctttagtgccacagccatggcactcatggcacgcacattaacccagcgggaggagagtcggggctacacacgggttattgccggagggagcgcgctggcggcttgagcgaggccgccggcttccgcgcgacgccctgctcatccggtggaggcggctgcgagcggagaggttagggattagggcaaggt

SEQ ID NO: 646 - protein, 60 aa, Zea mays subsp. mays
  peptide (1)..(60): Ceres Seq. ID no. 15179132
MLRLTTFLSSSLKIVRFPYKHLLQQLQRTSHILLVIKFFVSPKYSMRSFLQWFMFSILLP

SEQ ID NO: 647 - protein, 46 aa, Zea mays subsp. mays
  peptide (1)..(46): Ceres Seq. ID no. 15179133
MMPQTKQTPIIRQYRKINSSRLTLFVASAWHSRSYYCLRYFILCDL

SEQ ID NO: 648 - protein, 45 aa, Zea mays subsp. mays
  peptide (1)..(45): Ceres Seq. ID no. 15179134
MPQTKQTPIIRQYRKINSSRLTLFVASAWHSRSYYCLRYFILCDL

SEQ ID NO: 649 - DNA, 1138 bp, Zea mays subsp. mays
  misc_feature (1)..(1138): Ceres Seq. ID no. 15225613
ttttttttttttttttcatgccaaaattcaaatcaaatcatattcaaataaagaaaaaggtaaactactcagagttcattctgatcagtgttcactggccactggggatcccgacaccactgcagtgtgccgggccggggggcgggctacgactacgatcgatcacgtcgcgccaacgccaaggaagtcgaagaagggcagggcggcgagctttccacatccgccgccgccgtcggaagccgctgcaggcgacggaacggagcgaagcatgatgcagcgcagcagtggcgaggccgaggaggagccgaggaggcacgcgcacgtcgtgccgtcgcacgagctctggctctgtcgccggcggtggaagtggaagcaggggacggcggcggcgcacacggagcctagggaggagaggtcggtgccggaggaggtggacgatgcggactcgtcggactcggacccgccgttgccgtcgccgcacgagcggggtcgggtggccttgccggcgcggaacggcaggggagatggtgcacggtggtggtgggcggcgggtgatgacgacgaggagggcttgcgtcggcgcggcggcgcgccggtccgctcccgctgcctgcgcgccgtgaggacgtgccagtggttcttgacggcgttgtcggtgcggcctgggaagaggcgcgcgatgagcgcccacttgttgccgtgggcgcggtgcgccgctaccagccgctgctcctccgccgccgagaacgggcggcggttcacccgcgggtccagctggttgaaccaccgcagccggcagcttttccctgatctgccgtggagtttgctggcgatgaggttccagttcttggggccgtacagcgccacgaggtccttgagcttggcatcctcggctggccgccagtggcctctcgcgtgcccagcgcggctgtcgtcatggccgtgggtctcttgtgcctcatggagcgcagacagagcggcggccaccggtggagcggccatttgggacctagtcgcagtcgcagacggaggagagtggtggagtagagtgctgcaaagtttagatggcggatcttgcagagcgttgctagctctctctgtcagcttgtgttggatggacgagtgcctagccttttag

SEQ ID NO: 650 - protein, 378 aa, Zea mays subsp. mays
  peptide (1)..(378): Ceres Seq. ID no. 15225614
FFFFFHAKIQIKSYSNKEKGKLLRVHSDQCSLATGDPDTTAVCRAGGRATTTIDHVAPTPRKSKKGRAASFPHPPPPSEAAAGDGTERSMMQRSSGEAEEEPRRHAHVVPSHELWLCRRRWKWKQGTAAAHTEPREERSVPEEVDDADSSDSDPPLPSPHERGRVALPARNGRGDGARWWWAAGDDDEEGLRRRGGAPVRSRCLRAVRTCQWFLTALSVRPGKRRAMSAHLLPWARCAATSRCSSAAENGRRFTRGSSWLNHRSRQLFPDLPWSLLAMRFQFLGPYSATRSLSLASSAGRQWPLACPARLSSWPWVSCASWSADRAAATGGAAIWDLVAVADGGEWWSRVLQSLDGGSCRALLALSVSLCWMDECLAF

SEQ ID NO: 651 - protein, 289 aa, Zea mays subsp. mays
  peptide (1)..(289): Ceres Seq. ID no. 15225615
MMQRSSGEAEEEPRRHAHVVPSHELWLCRRRWKWKQGTAAAHTEPREERSVPEEVDDADSSDSDPPLPSPHERGRVALPARNGRGDGARWWWAAGDDDEEGLRRRGGAPVRSRCLRAVRTCQWFLTALSVRPGKRRAMSAHLLPWARCAATSRCSSAAENGRRFTRGSSWLNHRSRQLFPDLPWSLLAMRFQFLGPYSATRSLSLASSAGRQWPLACPARLSSWPWVSCASWSADRAAATGGAAIWDLVAVADGGEWWSRVLQSLDGGSCRALLALSVSLCWMDECLAF

SEQ ID NO: 652 - protein, 288 aa, Zea mays subsp. mays
  peptide (1)..(288): Ceres Seq. ID no. 15225616
MQRSSGEAEEEPRRHAHVVPSHELWLCRRRWKWKQGTAAAHTEPREERSVPEEVDDADSSDSDPPLPSPHERGRVALPARNGRGDGARWWWAAGDDDEEGLRRRGGAPVRSRCLRAVRTCQWFLTALSVRPGKRRAMSAHLLPWARCAATSRCSSAAENGRRFTRGSSWLNHRSRQLFPDLPWSLLAMRFQFLGPYSATRSLSLASSAGRQWPLACPARLSSWPWVSCASWSADRAAATGGAAIWDLVAVADGGEWWSRVLQSLDGGSCRALLALSVSLCWMDECLAF

SEQ ID NO: 653 - DNA, 833 bp, Zea mays subsp. mays
  misc_feature (1)..(833): Ceres Seq. ID no. 14305544
  misc_feature: MA Experiment ID: 108529 Result: Down-regulated in Transcription
  misc_feature: MA Experiment 108529 PARAMETER Experiment Name: Zm_Imbibed_Seeds_P Parameter: Age (day) Value: 5 vs. 2
  misc_feature: MA Experiment 108529 PARAMETER Experiment Name: Zm_Imbibed_Seeds_P Parameter: Organism Value: Zea mays
  misc_feature: MA Experiment 108529 PARAMETER Experiment Name: Zm_Imbibed_Seeds_P Parameter: Plant Line Value: 35A19
  misc_feature: MA Experiment 108529 PARAMETER Experiment Name: Zm_Imbibed_Seeds_P Parameter: Tissue Value: Roots vs. Embryo
  misc_feature: MA Experiment ID: 108543 Result: Up-regulated in Transcription
aaaaagtgaacgagctctcagtctctcagactctcacacactctagctgctgctctctcccactgtctcgccgtcttgctcaaacgcagtgcccggtggtctggtcggtcgctctctcgacccatgggagttggccggggttcctgctccagccactgaagacgcggcggcggctcctgctcatggcaggagctcaatgcgccacagggccgcgcgccgcgccgctcctcctcgtcctcgtcctcgtcctgtgcggcttccttgtgctgctcgtgcctacgtctcggcgcggggacgacgacgagacagaggagttccccgtcgcgtcttccgcttcgtcgtcgtcgtggcactggcacgccgctgatgggcgccgccgtgccctgccgcggccggccgccgcgacgtggccgtggcgccccgcccagccccgggcgcgcgggaggtggaactccgcggggcaggacggcaagcacgaggtccccagtggccccaacccggactccaatcggtagccgtagccagagaggtgggtggtcgtgaactccgatccgccgtctgtgtttgtttcggcgaacggcgaccaagctccctccctgtcccctgctcctgctcctggaggccggtcgtctagctaggcctggccgtcgtatcgctcctccatgcttcttgctgctccgtgctggagccagtacgtgcgtcgtttgcttgctgtgttgtatcttcttcttcgccgttctcttcgttagagaatgaacatgaccatcatctgacgcatgcattgctcaattctcgtccaaccgacgattgattggtgacctggaatcaggagc

SEQ ID NO: 654 - protein, 170 aa, Zea mays subsp. mays
  peptide (1)..(170): Ceres Seq. ID no. 14305545
KVNELSVSQTLTHSSCCSLPLSRRLAQTQCPVVWSVALSTHGSWPGFLLQPLKTRRRLLLMAGAQCATGPRAAPLLLVLVLVLCGFLVLLVPTSRRGDDDETEEFPVASSASSSSWHWHAADGRRRALPRPAAATWPWRPAQPRARGRWNSAGQDGKHEVPSGPNPDSNR

SEQ ID NO: 655 - protein, 110 aa, Zea mays subsp. mays
  peptide (1)..(110): Ceres Seq. ID no. 14305546
MAGAQCATGPRAAPLLLVLVLVLCGFLVLLVPTSRRGDDDETEEFPVASSASSSSWHWHAADGRRRALPRPAAATWPWRPAQPRARGRWNSAGQDGKHEVPSGPNPDSNR

SEQ ID NO: 656 - DNA, 922 bp, Zea mays subsp. mays
  misc_feature (1)..(922): Ceres Seq. ID no. 13586110
  misc_feature: MA Experiment ID: 108597 Result: Up-regulated in Transcription
  misc_feature: MA Experiment 108597 PARAMETER Experiment Name: Zm_100uM_ABA_P Parameter: Age (day) Value: 9
  misc_feature: MA Experiment 108597 PARAMETER Experiment Name: Zm_100uM_ABA_P Parameter: Organism Value: Zea mays
  misc_feature: MA Experiment 108597 PARAMETER Experiment Name: Zm_100uM_ABA_P Parameter: Plant Line Value: 35A19
  misc_feature: MA Experiment 108597 PARAMETER Experiment Name: Zm_100uM_ABA_P Parameter: Timepoint (hr) Value: 24
  misc_feature: MA Experiment 108597 PARAMETER Experiment Name: Zm_100uM_ABA_P Parameter: Tissue Value: Aerial
  misc_feature: MA Experiment 108597 PARAMETER Experiment Name: Zm_100uM_ABA_P Parameter: Treatment Value: 100uM ABA vs. No Treatment
ttaactattttctccacatgtttgtgctatggacttcattactcttacgagtgcatgttgcttttgcaacgcataagatgttgacttaaatccgaaactatgtggtatgtgaatacaaggttggcacacttattatgtatttaaatttatattggctgtactgtttacatacaacttcatattctacacttagtgtatttttagcctctatctgtaaactatatcatgtattcagctgtctctctctgggaggaggacgatgagcaggaagcggaagaagaaagtggggcgtcggccgccgaccgtcaggccaacaggataagcaaggggtagaagggcaagggcaggccgacgtgctacatgaggagcaagcgctcggagctgcgacgtgtctggtgacatccaggtggacaggaaccgctctttcatctacgtcagcgggatagaaagggagtggaggaccaggccatatgcgtgctaccacgaccccgtggccatggcccacatccgcgagtacaccctcaagccgctctcggagccggcggtggcgcccgtgtgcaccaggaacaactctgtccctggcttcctcttctccaacggtggcttctccggcaacctgtagcacggctacacagatgtgctggtgccatttgttcatcaggagtcaggacgcaccagttccggggcgggtgcagctcttgctcagcgggatgaaggtatgctgggtgggcaagctccactctattcttccagcgacgtggacaatgaccaagaggtgcactgcttccaacagatcgtggtcggcgccaccttacacagggacatgggcgtggacccacgccgctcgccgggccacctaaactcttcgtcacaagctacatatttgtggaagctatgacttgactacaaacttatatcaatc

SEQ ID NO: 657 - protein, 129 aa, Zea mays subsp. mays
  peptide (1)..(129): Ceres Seq. ID no. 13586111
MRATTTPWPWPTSASTPSSRSRSRRWRPCAPGTTLSLASSSPTVASPATCSTATQMCWCHLFIRSQDAPVPGRVQLLLSGMKVCWVGKLHSILPATWTMTKRCTASNRSWSAPPYTGTWAWTHAARRAT

SEQ ID NO: 658 - protein, 74 aa, Zea mays subsp. mays
  peptide (1)..(74): Ceres Seq. ID no. 13586112
MCWCHLFIRSQDAPVPGRVQLLLSGMKVCWVGKLHSILPATWTMTKRCTASNRSWSAPPYTGTWAWTHAARRAT

SEQ ID NO: 659 - DNA, 516 bp, Zea mays subsp. mays
  misc_feature (1)..(516): Ceres Seq. ID no. 13637257
aacatgcaccagatcgccttttgattcatgggtttcacagggcaccgcattttgctcataggccttgcatatatacatggggatttcatgccacactttacagtgctgcatagccatacatgcatcgatccctagctctttgcttgccgcggatttctcctgctcatacaacacaagccatgaggggtttccagctgctactcatcatagtggcattgcttgccggggagttgcactgcgcaagagcagcatcagcagcagatgcaccggaggctgcaccacagtcccccgaagcaccaacagcagatgagcaaacgccaccgcagcgcctgggccaacatcaccacctccacctccacgacgtcggggatcaccacatcgacggccaccagcaccgacggatcagcaggatccagcaccgccaaggttggtcgtgccaccacaggaacctcctgcaccggcaccacctggaatgacgatcaaccgcactacgggctgtactacactccttgtact

SEQ ID NO: 660 - protein, 118 aa, Zea mays subsp. mays
  peptide (1)..(118): Ceres Seq. ID no. 13637258
MHRSLALCLPRISPAHTTQAMRGFQLLLIIVALLAGELHCARAASAADAPEAAPQSPEAPTADEQTPPQRLGQHHHLHLHDVGDHHIDGHQHRRISRIQHRQGWSCHHRNLLHRHHLE

SEQ ID NO: 661 - protein, 98 aa, Zea mays subsp. mays
  peptide (1)..(98): Ceres Seq. ID no. 13637259
MRGFQLLLIIVALLAGELHCARAASAADAPEAAPQSPEAPTADEQTPPQRLGQHHHLHLHDVGDHHIDGHQHRRISRIQHRQGWSCHHRNLLHRHHLE

SEQ ID NO: 662 - protein, 85 aa, Zea mays subsp. mays
  peptide (1)..(85): Ceres Seq. ID no. 13637260
MHRRLHHSPPKHQQQMSKRHRSAWANITTSTSTTSGITTSTATSTDGSAGSSTAKVGRATTGTSCTGTTWNDDQPHYGLYYTPCT

SEQ ID NO: 663 - DNA, 964 bp, Zea mays subsp. mays
  misc_feature (1)..(964): Ceres Seq. ID no. 15226037
aattcccgtccatcagctcgcagtcgcaccagcgaccagagcagcagaccaagcaagcgcgagggagagaagagacgaagaagaaaagccggagctctgccgagcttagtccccggaggcggcgaccggcggcgcgtaaccatggagcgggcggaggaggcgcagcccgccgccgagcggagggcgccctcgacggcgccgtcggcgcgggtgtcgatctgggagtcggtacgcgcgtgcggggtgtgggggaaggagctggacaaggccgagctgcggaggcaggtcgtcatgccacgctacctgcgccgggccgtgacagccgcctccccacgcccgcttacccgactggccgcacaagatgcccacagtggcccccatcgcgcccacccgctccccccatccaccgcgacctcagccgccacgccgacgccatccccgtcctctagcgcgttgtcgccgtcgtcacaccgccaaaggtgcctgccccctgctaccgaggtcgacgaccagcagcggcaagctgccgagctcgacgacacgcacgccatgcttggccatatggacgagtccatcgcctgctacgagaaggggctccagatccagatgtccgcgctcgatgagcgcaatccctgcctccctgagacctgcaggtgattgacaaggtttaggaggaaacttccaaaagccggtcaagtatggagtgcttaacatcactttggcaacttatatttttttacatgtttgctttgtttgttaacaacataatttatgggctgacaatgtgatcatgtattctttctggtagtcttcgtgtcactgcttgcagttgcaggggagggatcatggctttcttttattttccatgtgcaatgtttaatttaggtgatgaactccaaagcttatcccattgttttctagcaagagctaagcaatactggatggagaacatttatctttttac

SEQ ID NO: 664 - protein, 218 aa, Zea mays subsp. mays
  peptide (1)..(218): Ceres Seq. ID no. 15226038
NSRPSARSRTSDQSSRPSKREGEKRRRRKAGALPSLVPGGGDRRRVTMERAEEAQPAAERRAPSTAPSARVSIWESVRACGVWGKELDKAELRRQVVMPRYLRRAVTAASPRPLTRLAAQDAHSGPHRAHPLPPSTATSAATPTPSPSSSALSPSSHRQRCLPPATEVDDQQRQAAELDDTHAMLGHMDESIACYEKGLQIQMSALDERNPCLPETCR

SEQ ID NO: 665 - protein, 171 aa, Zea mays subsp. mays
  peptide (1)..(171): Ceres Seq. ID no. 15226039
MERAEEAQPAAERRAPSTAPSARVSIWESVRACGVWGKELDKAELRRQVVMPRYLRRAVTAASPRPLTRLAAQDAHSGPHRAHPLPPSTATSAATPTPSPSSSALSPSSHRQRCLPPATEVDDQQRQAAELDDTHAMLGHMDESIACYEKGLQIQMSALDERNPCLPETCR

SEQ ID NO: 666 - protein, 148 aa, Zea mays subsp. mays
  peptide (1)..(148): Ceres Seq. ID no. 15226040
FPSISSQSHQRPEQQTKQARGREETKKKSRSSAELSPRRRRPAARNHGAGGGGAARRRAEGALDGAVGAGVDLGVGTRVRGVGEGAGQGRAAEAGRHATLPAPGRDSRLPTPAYPTGRTRCPQWPPSRPPAPPIHRDLSRHADAIPVL

SEQ ID NO: 667 - DNA, 670 bp, Zea mays subsp. mays
  misc_feature (1)..(670): Ceres Seq. ID no. 13598909
gagcttgatacaaacaagttcattccacgtatgacgcgccgatcgagagtatcattctttcgtagtgtgctacaaccttcgtccttcatgtcgatggcctatatagctatacgactagctagttgtcgtagatgcggcactcctcggagtccgggttgtccttgcagtacttctcgagcgggtcgttggcgttggtctccttgaggctgtcgcgggcgtggctggccgtggcgctgagctcctccacctcgtcccacgccgccgcgcactcggcgtcgcccttctggtcgtccgcgcacgtctcctccgcctgcttgatgctctccgacaccttgtcggagatctccggcggcgtggccggcccgctggaccgcacggcgaccaaccgcccgccgccgcggcgcgccgccgcggggaaccagacgacgcgcttggcgcccgccctcctcgggacgacgatcagcacgtcgccgccgcccgccgccgcgaaggtcgtcgtcgtcaccgggacagagaggctcgccaccgtcgacgccgccattattattcctgtcttggctagcttatagcttcctgcgtcacggtcacgatcgaacgaactcgatcttctgcgtgtgtgatcgtcgtcgggtgggtgtggtgtagtgtagtgtagtgcttcgcggttggc

SEQ ID NO: 668 - protein, 145 aa, Zea mays subsp. mays
  peptide (1)..(145): Ceres Seq. ID no. 13598910
MRHSSESGLSLQYFSSGSLALVSLRLSRAWLAVALSSSTSSHAAAHSASPFWSSAHVSSACLMLSDTLSEISGGVAGPLDRTATNRPPPRRAAAGNQTTRLAPALLGTTISTSPPPAAAKVVVVTGTERLATVDAAIIIPVLASL

SEQ ID NO: 669 - protein, 83 aa, Zea mays subsp. mays
  peptide (1)..(83): Ceres Seq. ID no. 13598911
MLSDTLSEISGGVAGPLDRTATNRPPPRRAAAGNQTTRLAPALLGTTISTSPPPAAAKVVVVTGTERLATVDAAIIIPVLASL

SEQ ID NO: 670 - DNA, 2309 bp, Zea mays subsp. mays
  misc_feature (1)..(2309): Ceres Seq. ID no. 15227305
ggtcaaacagtccgagacaggagcagacgtctggctataatggtcgaacggtccggctataatggtcgaacagttcgcaaacggtcagaagcagcaacctcagaccatcggaccacaacgttccaaaacaagtgttaggaaacaaaacactactaagacgtctggacgactcagtagagtcggccctacttttgatcagttgtttgccaaatatatgaagaaggtcgttccacacaaccggccaataaaacaaacaaagtcaaaagggcgatctgtgcgaaagcaaaagccgactaaaccgactcaaacggtagcacaaccaagaccgccttgtcatcctcctccagggatagcgtggtgcttctcggtctatccatcgtcgatgtgttgtcctactcatgcgtggggtggtaagacgatgaatccgtattactggtccaattcatttgcttatttgggctggggggcaccacaagtttttgcctattgaaaggatgatcaggcaaacatggttgaagaggatgcaatctgaaacgacctctgtgcattaaagttccatcaagtatttatattatccgatcgcaagagccgatgacttgcatcaagcagagtccttacttcgggaacaaagtagctcatgaggtcaattgtttctgaagttttcgctggtgctttggttcgccaagctccaccaaaaggcaggggcatatgttgaccaccaaaatgagcggacggttcgacccttgggcccggacagtccgcgtgccccgagattagattaattcaggtgtttatccttatctcgtgcgtggttatccatctaatcatgtgagagttgttggctatctcttaggaataggtccagacctccccctctataaatataaaggggtacagtcgattgagaaccctagaacacattccaatcgaaccaattactttatttacctttcctgccttaggagtagatgtagtgtagttctagttgtagtcttccgcatatccacctccacccctattcaactctacgttgtctagatccgtcctgaggtggcctgccgaccccaggacaaccctatgatctttacccctcctgaggggcaagatctacttcgtctacttcaatcaagatctcttcctcgaattgatctcttaatttctaggcgactctacgtcatctggagacgccccggctgacctgctgacccagagcaccctaaggtatctcccccaggggacgagatctaggtcatacaaggagaagaagacgaccctgcgccatcgcggactgtccggactgcgcgcagtgaaggcgccgcttctaccgccaggttgcggactgtccgacctagagccgcggaccgtaagcacctcccgcggcgagcactgccaggcgacccgtcgcaggccgccgccactgttcacctcgtggagccgaacccaaggtattgctcatcacgaggtcctagggttcgttgctgtttggtcccaaatatgtggtgaccatcatagaggtgttgccccacatttaggataaccactttatttgatcctacatcatctaaaggtgccaagtaccaccaggcggttcattatagtgtttggtgaccaaaaagacaccaacagatacatgagcagaatagtcatattggtgctgcaactatatatagtccgagacattgattttgtccctcaacatttaaaatgggcacgttagtcctaaaaaatttcatttaggttcaattttatcgtacaacaatcaaagtgatcatgaatccttatcctgtgtactttggctcaaattcttattctaactaactgtatttttctactacttatgaaggctgcaagaatagcctgcctctaacttgttctgccacctgccatccgtgaatctggaccgttcgcctcaatcatgcgcgatccaaccgtcctccgccccgtccccgcaccctccccctccccttgcgatacggtagccgtcgtcccagcccgcggccttcgccaaccacccccaccctcgcgcccacccatcgccgcatgggcaccccttgaccccggcgagacaccgccccactcacccataggcggcagcatccacgtggccgatccacctggcgacgcgccctcctccgcccccgacatggtacgagacccagggttgatcctccgcaccgttgaccccaaccgcttcaccctttgtggcgagcagcatctcctcccccagtcaccgacaaaaagcgagtgggtgagcagctcctcctgcaaggcgaatatgtgggcgcagtccaccgccaaatctacgacgt

SEQ ID NO: 671 - protein, 142 aa, Zea mays subsp. mays
  peptide (1)..(142): Ceres Seq. ID no. 15227306
MVEQFANGQKQQPQTIGPQRSKTSVRKQNTTKTSGRLSRVGPTFDQLFAKYMKKVVPHNRPIKQTKSKGRSVRKQKPTKPTQTVAQPRPPCHPPPGIAWCFSVYPSSMCCPTHAWGGKTMNPYYWSNSFAYLGWGAPQVFAY

SEQ ID NO: 672 - protein, 131 aa, Zea mays subsp. mays
  peptide (1)..(131): Ceres Seq. ID no. 15227307
MRDPTVLRPVPAPSPSPCDTVAVVPARGLRQPPPPSRPPIAAWAPLDPGETPPHSPIGGSIHVADPPGDAPSSAPDMVRDPGLILRTVDPNRFTLCGEQHLLPQSPTKSEWVSSSSCKANMWAQSTAKSTT

SEQ ID NO: 673 - protein, 91 aa, Zea mays subsp. mays
  peptide (1)..(91): Ceres Seq. ID no. 15227308
MKKVVPHNRPIKQTKSKGRSVRKQKPTKPTQTVAQPRPPCHPPPGIAWCFSVYPSSMCCPTHAWGGKTMNPYYWSNSFAYLGWGAPQVFAY

SEQ ID NO: 674 - DNA, 2283 bp, Zea mays subsp. mays
  misc_feature (1)..(2283): Ceres Seq. ID no. 12638191
ataagcactcgatgcaaacaggctagaaaaaccactcttggtccttgtggagccaaagcgacttctggagagcctgctgcagctgctcatgaagctggactgtctggagttgaggcgaaggaaccaagaatggaagctgtctgtcttctgccattctggcctttggtttcgcctgcagcacatcactgtggccaatgcagctgcaatcactgccaaagaaagacctatgccatttagtatcctcttaccaagttgtgagcttgtttttggtgaaaataggccatctaagctgtttgcttggttgcttattttcatgacttcaaggccattaaggatggcatcagtattgctggagtcggttgtgcttgggccaacctgcactagaagggtggagttgatgatgctggatgagtccacgataaagtcctggtagtaggctactgcaaggcccattgtcaagcttgagaggtcaaggttggatacacccatcatgccatttatgtagacatcgaagtagaggctattgagtgccttgcttataatatcacagaaatgtaggcggatgaggtacttgaatcctggctctgcttccatttcccaagttatgttgaatcttgcttgcgaggtatttgttgatgctgactgctgtgccgttgagtatatatttgctggagcaatgagcggtgtgactgtcttgtcatcagggtacttgatagttctaggaggaacccaagccacctgtgctgctgcctcaagcttcaaaaaaggtgcatctggtaaccaggtcctgcccagtgtgtcgttgaaggctgtcacaagtgcaccccccatgttcagtctgtagactacctgcaatgcattgttggagatgtcaaactgttctagaggaggcaggccaatggtggtatttgggattagggtgggtggtgccaagacaacttcaatagcattgatgaatgctattgagtccttctttgggatgaaaatgatcttcaaggtgtctccctgtgttacaacaatatactccttaaggacggggttaggaggactggctatgaaggagaagtcatggagaagaaccatattgtcagtgaacacagagaatgttgctgaggtgaggttgtattgtttgtcagggataggcaagaagtagagacggatccaatggcggccaggctgcgagacaaagaagctataagtcgaaacatcagagaaaactcttgcagacaggtaaagtggggataatggtgaagcagcagttggagaattgttagctgtaatcttgatgtccactggggtggacagaaaagataccgactctggatcagagcggaatgtcttgccatcatcaagctgcacagaactggatgccccgcagctaatgagatagttgtcctgaggtacaaacggacccttctgtgatgcaattgcattggtgctggctatgctagtgataccaaggatggagaggatgatcaacatcggtactctcttccactcaagcatgcttctggtcatctatgttgatgttggcatcagaagcaccagtatgtagcaaaactgattggtggtttctcatagggaggaaagtggtctcgggctttgaagagaggaacagggtgcagggatggatgagatctttagttcgcttttggagggaatggattgattactgagatataaggtattggttgagcgcacgtccagatgagatcaggctgcaacttaaatagtatgtcaaacggtctattccgagctcctatacttctgacacgtggacgtcgaaatattatttgaaaagggagcttgcaggacaatagctgcaaagtacaatagacaggctggagtaacttaagcatagctatctttttaacaaaagaagaatagctgtatcatgctggtttattcaagtaggttgagatttggaatctgtgagttcttttctggcgatggtttgttgtaccgtactaatggaggaactaaccaatctaactaccagttggttcttggatgtttacccagctaatggcttaagcatggtaacccaaattgacagtttgaaaagaggttagtttgtcaaacacagttttgagggatgaccattattgtcttagattccagtgcccaattattgctgtaatcaacataactatcttgacacaattatctcggtcaccatgtttgtatagcttttcccttccatggatctggtttgatctcaaaaaaaaaaaaaaaaaaaaaaaaagaaaaaaaaaaaaaaaaaaactcgagggggggcccggt

SEQ ID NO: 675 - protein, 114 aa, Zea mays subsp. mays
  peptide (1)..(114): Ceres Seq. ID no. 12638192
MKLDCLELRRRNQEWKLSVFCHSGLWFRLQHITVANAAAITAKERPMPFSILLPSCELVFGENRPSKLFAWLLIFMTSRPLRMASVLLESVVLGPTCTRRVELMMLDESTIKSW

SEQ ID NO: 676 - protein, 94 aa, Zea mays subsp. mays
  peptide (1)..(94): Ceres Seq. ID no. 12638193
MSNCSRGGRPMVVFGIRVGGAKTTSIALMNAIESFFGMKMIFKVSPCVTTIYSLRTGLGGLAMKEKSWRRTILSVNTENVAEVRLYCLSGIGKK

SEQ ID NO: 677 - protein, 93 aa, Zea mays subsp. mays
  peptide (1)..(93): Ceres Seq. ID no. 12638194
MRYLNPGSASISQVMLNLACEVFVDADCCAVEYIFAGAMSGVTVLSSGYLIVLGGTQATCAAASSFKKGASGNQVLPSVSLKAVTSAPPMFSL

SEQ ID NO: 678 - DNA, 2085 bp, Zea mays subsp. mays; identical to SEQ ID NO: 542
  misc_feature (1)..(2085): Ceres Seq. ID no. 13623233

SEQ ID NO: 679 - protein, 175 aa, Zea mays subsp. mays; identical to SEQ ID NO: 543
  peptide (1)..(175): Ceres Seq. ID no. 15219369

SEQ ID NO: 680 - protein, 106 aa, Zea mays subsp. mays; identical to SEQ ID NO: 544
  peptide (1)..(106): Ceres Seq. ID no. 15219370

SEQ ID NO: 681 - DNA, 1085 bp, Zea mays subsp. mays
  misc_feature (1)..(1085): Ceres Seq. ID no. 12590227
ccccccccctatgagctgtgatcttgcatttttctatagtttcagttaggatgccctgttactgtgatattagtggcaaacaataacatgtgaatacaatctatttaccttgtttcatttttcaattacatgcgatatacctacatacgctattacagatctaaagaacattttgagggtgcataaagcataattgcagcagatacttttgttgaagtagtcatctaatttgtactattctgcaagtactggttccgcttggaacagccggcagccccagcacaataaacagtgctgggcaggttttaaaagcagcaaaaactttagctttattccccagcagcttgtctatctccagcagccttatcacatctcctgtttcaagctctactatgtaaacaatgcagtctacagtgttttacacgactatatacatgacctgctgggcctacgcttacaaacagggccactgttttttgtgaatctctagtcgttggaacttcctcacggttcttcatagctatgtctagtttactactttatggacccaatcaagccaattcgcaagttggtgtaactgtcacaattaactcttttctggaaaacagaacagaaaacttccatttatattttctggtattatttcctttgtattttcttattaacggtgtgttcaaccatgtgttttggcgctcacaaaagccacttgagcttgccgccccatccactgttgctgcggcacaatcgacaggaactgccccaagaaaaccactcagattgaggttgacgactttggggaaaccgaagccagctgaaggaactacctgaatcgaattgcccaggagccaaaattacctagagttcgcttttccttgtattgagtcaaggatctgtggaagcgctttggcaccgcgagttcaaatgaaagggaaaatgaaaaaaaaaacggagaccacctgacgtaaatgagtgcaattgtaataaattgtgtgtagtacatagctgagttggcataaatgtacgctgtggtacgttttcttgacgacttagctacgcttgttaaacgggaatggatatcatcttcg

SEQ ID NO: 682 - protein, 101 aa, Zea mays subsp. mays
  peptide (1)..(101): Ceres Seq. ID no. 12590228
MSSLLLYGPNQANSQVGVTVTINSFLENRTENFHLYFLVLFPLYFLINGVFNHVFWRSQKPLELAAPSTVAAAQSTGTAPRKPLRLRLTTLGKPKPAEGTT

SEQ ID NO: 683 - DNA, 699 bp, Zea mays subsp. mays
  misc_feature (1)..(699): Ceres Seq. ID no. 14305573
  misc_feature: MA Experiment ID: 20000534 Result: Down-regulated in Transcription
  misc_feature: MA Experiment 20000534 PARAMETER Experiment Name: Zm_Hybrid_Pollen_P Parameter: Age (day) Value: 8
  misc_feature: MA Experiment 20000534 PARAMETER Experiment Name: Zm_Hybrid_Pollen_P Parameter: Organism Value: Zea mays
  misc_feature: MA Experiment 20000534 PARAMETER Experiment Name: Zm_Hybrid_Pollen_P Parameter: Plant Line Value: 35A19
  misc_feature: MA Experiment 20000534 PARAMETER Experiment Name: Zm_Hybrid_Pollen_P Parameter: Tissue Value: Pollen vs. Aerial
aaatttatatcagtgaggcaaaatgttgtcaaatttaagatcaagccaggttcagattctggtgcttctgacagcagaataaaaagaatctcgtctttcttgtttcacccatttttcccgcttgcactttcgattcagcagacttatatgcagccaactgttctcaacatccatttcaggagatagaaaaggtataacggttgccctaggtgtatctatgtcattagtgaacttgcagcattgctcgcggcaaaattttggccatatgtactctctagtagataagctgacagatgttacagtaggggataagatccattgtctggcggtgagaatggctagtttgatttctcttccaaaacaaagtacaaaatgcaaatgggctcaatattcatctattgatgtggcttcatgggctcatcagtcatcattgcggcttcacagtgttgatctatgctttcatatgcctagctcggagtgtcagatgtgcttgttattggatttgaggcataaggacacgtatattggatggcatggagttggtatattggatgcttcatgcttgaggcgagggtgatctaagctgcgaatttgttttcgaggatatataggaaatatagcattacaaatagttttgagttgtcatattatgatgaagtaactactatttactgaaactgttatgcaaagataataatc

SEQ ID NO: 684 - protein, 119 aa, Zea mays subsp. mays
  peptide (1)..(119): Ceres Seq. ID no. 14305574
MSLVNLQHCSRQNFGHMYSLVDKLTDVTVGDKIHCLAVRMASLISLPKQSTKCKWAQYSSIDVASWAHQSSLRLHSVDLCFHMPSSECQMCLLLDLRHKDTYIGWHGVGILDASCLRRG

SEQ ID NO: 685 - protein, 103 aa, Zea mays subsp. mays
  peptide (1)..(103): Ceres Seq. ID no. 14305575
MYSLVDKLTDVTVGDKIHCLAVRMASLISLPKQSTKCKWAQYSSIDVASWAHQSSLRLHSVDLCFHMPSSECQMCLLLDLRHKDTYIGWHGVGILDASCLRRG

SEQ ID NO: 686 - protein, 80 aa, Zea mays subsp. mays
  peptide (1)..(80): Ceres Seq. ID no. 14305576
MASLISLPKQSTKCKWAQYSSIDVASWAHQSSLRLHSVDLCFHMPSSECQMCLLLDLRHKDTYIGWHGVGILDASCLRRG

SEQ ID NO: 687 - DNA, 905 bp, Zea mays subsp. mays
  misc_feature (1)..(905): Ceres Seq. ID no. 14306000
ccactccactccactcaccaaacccaacccagagcagacaagcgtccaaggtccaaccaaagcaactgagctgcgagtccgggaagcctgagagacagaggagaagcgcacaggcaccgctcgccggcgagaccgacgatgggcctcctggaacaccccctggaggccgtcgctttccgcctctactccctcccagtaccggaggcctccgcggccacgggcgccgccgccgcctggacctgcctcgcggcggcggtcctggcagccgccgcgggcgtttggcgcctctgctggtccccgtccccacccccgtccgccgccgttgccgccgccgcgaatgcttcgggctcggatcggtctcacgtggcggaggcgtcgccggagacgtcccggcgggcgccggagccggccgcggccgcggcggcgacgcccaaggagcggtacacggcgtactaccgcgacgtcgggtgctgctgctgcggcggaagcgatgacgaggaggacgacgcggaggagcggggagacggcgacgtgttcctttcggacgacgacgggccgacgacggatcctttcgggtgggagtgggaggtggtgaggtcgctgcagcctcctctcagcccggcggcggagacgacggggaggaggtaccggaggagcccgacgacggggctcggcggcagcgtggtgcagctgtgggaccagggcgccgtgcgcggcctgacgcccgcggcgcgcccgcggccgagggcccgggtagtcgtcggcaccgtcgtctcggccttctgaaaacatatccggcgtccaaatgtgcaataaaactgagccttttcgtgggaagaaagaagagataagattattacgcagttgtaaatatgaatctatctatctatggtttcgcattctgt

SEQ ID NO: 688 - protein, 215 aa, Zea mays subsp. mays
  peptide (1)..(215): Ceres Seq. ID no. 14306001
MGLLEHPLEAVAFRLYSLPVPEASAATGAAAAWTCLAAAVLAAAAGVWRLCWSPSPPPSAAVAAAANASGSDRSHVAEASPETSRRAPEPAAAAAATPKERYTAYYRDVGCCCCGGSDDEEDDAEERGDGDVFLSDDDGPTTDPFGWEWEVVRSLQPPLSPAAETTGRRYRRSPTTGLGGSVVQLWDQGAVRGLTPAARPRPRARVVVGTVVSAF

SEQ ID NO: 689 - protein, 163 aa, Zea mays subsp. mays
  peptide (1)..(163): Ceres Seq. ID no. 14306002
TPLHSPNPTQSRQASKVQPKQLSCESGKPERQRRSAQAPLAGETDDGPPGTPPGGRRFPPLLPPSTGGLRGHGRRRRLDLPRGGGPGSRRGRLAPLLVPVPTPVRRRCRRRECFGLGSVSRGGGVAGDVPAGAGAGRGRGGDAQGAVHGVLPRRRVLLLRRKR

SEQ ID NO: 690 - DNA, 654 bp, Zea mays subsp. mays
  misc_feature (1)..(654): Ceres Seq. ID no. 13586839
  misc_feature: MA Experiment ID: 108544 Result: Down-regulated in Transcription
  misc_feature: MA Experiment ID: 20000479 Result: Down-regulated in Transcription
  misc_feature: MA Experiment 20000479 PARAMETER Experiment Name: Zm_Drought_P Parameter: Age (day) Value: 10
  misc_feature: MA Experiment 20000479 PARAMETER Experiment Name: Zm_Drought_P Parameter: Organism Value: Zea mays
  misc_feature: MA Experiment 20000479 PARAMETER Experiment Name: Zm_Drought_P Parameter: Plant Line Value: 35A19
  misc_feature: MA Experiment 20000479 PARAMETER Experiment Name: Zm_Drought_P Parameter: Timepoint (hr) Value: 48
  misc_feature: MA Experiment 20000479 PARAMETER Experiment Name: Zm_Drought_P Parameter: Tissue Value: Aerial
  misc_feature: MA Experiment 20000479 PARAMETER Experiment Name: Zm_Drought_P Parameter: Treatment Value: Drought vs. No Drought
cccctctgcgcacttcgattgcctgagcatttggccccagagaccaactccattccttgtttttctcttccttttccctcgaggatctcgatgtcattagaagaagcatatgctttagtattaccgtctcacatcagtgacgaactcgacgtctacacgtatcattttcaagtccgtttttggattggtgttaaaacctcacatgcaagtatcttgacatccatggcagataaagaacactagtcccggcggtggcgccgccgcggaggcagcgagcaaggagaagcaggccgccgtccggtcgggcgagagtgaccgggactgcgagctcatggggctcatgtggctgctgcagcgcaacgccacgcgctacggagcgacggccacggccgtcatccaggcgctgatggccgtggacgaggcgtccgccgcgggtgtcgcggtggcggcagacgcggggccggccgcggcgtgctcgctgcccgtggacgacatgcccctcccggccgaatacgcgcaggtcggcggggccagcgacgcgcctcgcggcgtctgctgcttcttctgcctgctcgtgctgttctccgttctaagcttccgctccgtgtactcgctgtagcaattttgtggttcaattgaagttcgttatatgct

SEQ ID NO: 691 - protein, 95 aa, Zea mays subsp. mays
  peptide (1)..(95): Ceres Seq. ID no. 13586840
MGLMWLLQRNATRYGATATAVIQALMAVDEASAAGVAVAADAGPAAACSLPVDDMPLPAEYAQVGGASDAPRGVCCFFCLLVLFSVLSFRSVYSL

SEQ ID NO: 692 - protein, 92 aa, Zea mays subsp. mays
  peptide (1)..(92): Ceres Seq. ID no. 13586841
MWLLQRNATRYGATATAVIQALMAVDEASAAGVAVAADAGPAAACSLPVDDMPLPAEYAQVGGASDAPRGVCCFFCLLVLFSVLSFRSVYSL

SEQ ID NO: 693 - protein, 80 aa, Zea mays subsp. mays
  peptide (1)..(80): Ceres Seq. ID no. 13586842
PLCALRLPEHLAPETNSIPCFSLPFPSRISMSLEEAYALVLPSHISDELDVYTYHFQVRFWIGVKTSHASILTSMADKEH

SEQ ID NO: 694 - DNA, 652 bp, Zea mays subsp. mays
  misc_feature (1)..(652): Ceres Seq. ID no. 14306152
  misc_feature: MA Experiment ID: 108527 Result: Up-regulated in Transcription
  misc_feature: MA Experiment 108527 PARAMETER Experiment Name: Zm_5mM_NO_P Parameter: Age (day) Value: 8
  misc_feature: MA Experiment 108527 PARAMETER Experiment Name: Zm_5mM_NO_P Parameter: Organism Value: Zea mays
  misc_feature: MA Experiment 108527 PARAMETER Experiment Name: Zm_5mM_NO_P Parameter: Plant Line Value: 35A19
  misc_feature: MA Experiment 108527 PARAMETER Experiment Name: Zm_5mM_NO_P Parameter: Timepoint (hr) Value: 6
  misc_feature: MA Experiment 108527 PARAMETER Experiment Name: Zm_5mM_NO_P Parameter: Tissue Value: Aerial
  misc_feature: MA Experiment 108527 PARAMETER Experiment Name: Zm_5mM_NO_P Parameter: Treatment Value: 5mM NO vs. No Treatment
  misc_feature: MA Experiment ID: 108556 Result: Up-regulated in Transcription
  misc_feature: MA Experiment 108556 PARAMETER Experiment Name: Zm_Drought_P Parameter: Age (day) Value: 9
  misc_feature: MA Experiment 108556 PARAMETER Experiment Name: Zm_Drought_P Parameter: Organism Value: Zea mays
  misc_feature: MA Experiment 108556 PARAMETER Experiment Name: Zm_Drought_P Parameter: Plant Line Value: 35A19
  misc_feature: MA Experiment 108556 PARAMETER Experiment Name: Zm_Drought_P Parameter: Timepoint (hr) Value: 24
  misc_feature: MA Experiment 108556 PARAMETER Experiment Name: Zm_Drought_P Parameter: Tissue Value: Aerial
  misc_feature: MA Experiment 108556 PARAMETER Experiment Name: Zm_Drought_P Parameter: Treatment Value: Drought vs. No Drought
  misc_feature: MA Experiment ID: 108559 Result: Up-regulated in Transcription
  misc_feature: MA Experiment 108559 PARAMETER Experiment Name: Zm_5mM_NO_P Parameter: Age (day) Value: 8
  misc_feature: MA Experiment 108559 PARAMETER Experiment Name: Zm_5mM_NO_P Parameter: Organism Value: Zea mays
  misc_feature: MA Experiment 108559 PARAMETER Experiment Name: Zm_5mM_NO_P Parameter: Plant Line Value: 35A19
  misc_feature: MA Experiment 108559 PARAMETER Experiment Name: Zm_5mM_NO_P Parameter: Timepoint (hr) Value: 12
  misc_feature: MA Experiment 108559 PARAMETER Experiment Name: Zm_5mM_NO_P Parameter: Tissue Value: Aerial
  misc_feature: MA Experiment 108559 PARAMETER Experiment Name: Zm_5mM_NO_P Parameter: Treatment Value: 5mM NO vs. No Treatment
  misc_feature: MA Experiment ID: 20000479 Result: Up-regulated in Transcription
  misc_feature: MA Experiment 20000479 PARAMETER Experiment Name: Zm_Drought_P Parameter: Age (day) Value: 10
  misc_feature: MA Experiment 20000479 PARAMETER Experiment Name: Zm_Drought_P Parameter: Organism Value: Zea mays
  misc_feature: MA Experiment 20000479 PARAMETER Experiment Name: Zm_Drought_P Parameter: Plant Line Value: 35A19
  misc_feature: MA Experiment 20000479 PARAMETER Experiment Name: Zm_Drought_P Parameter: Timepoint (hr) Value: 48
  misc_feature: MA Experiment 20000479 PARAMETER Experiment Name: Zm_Drought_P Parameter: Tissue Value: Aerial
  misc_feature: MA Experiment 20000479 PARAMETER Experiment Name: Zm_Drought_P Parameter: Treatment Value: Drought vs. No Drought
  misc_feature: MA Experiment ID: 20000480 Result: Up-regulated in Transcription
  misc_feature: MA Experiment 20000480 PARAMETER Experiment Name: Zm_Drought_P Parameter: Age (day) Value: 11
  misc_feature: MA Experiment 20000480 PARAMETER Experiment Name: Zm_Drought_P Parameter: Organism Value: Zea mays
  misc_feature: MA Experiment 20000480 PARAMETER Experiment Name: Zm_Drought_P Parameter: Plant Line Value: 35A19
  misc_feature: MA Experiment 20000480 PARAMETER Experiment Name: Zm_Drought_P Parameter: Timepoint (hr) Value: 72
  misc_feature: MA Experiment 20000480 PARAMETER Experiment Name: Zm_Drought_P Parameter: Tissue Value: Aerial
  misc_feature: MA Experiment 20000480 PARAMETER Experiment Name: Zm_Drought_P Parameter: Treatment Value: Drought vs. No Drought
  misc_feature: MA Experiment ID: 20000630 Result: Up-regulated in Transcription
  misc_feature: MA Experiment 20000630 PARAMETER Experiment Name: Zm_Herbicide-Treatments_P Parameter: Timepoint (hr) Value: 4
  misc_feature: MA Experiment 20000630 PARAMETER Experiment Name: Zm_Herbicide-Treatments_P Parameter: Tissue Value: Aerial
  misc_feature: MA Experiment 20000630 PARAMETER Experiment Name: Zm_Herbicide-Treatments_P Parameter: Treatment Value: Roundup vs. No Treatment
aaaaagaaagggcgtgggtggtctccagaggcgtcttcctcctgttcatcctcggcccgcgccgctgtgtccatggtccatgggccgcctccctcgcgctcccccgcacagtacggtcctctgggaggtcgccttcggtcgtggcccagggtgtcacgcgcgacgagtcggcgcgtggtggagggtcgtcttctgctgcttctggctggattcctgggctattcaacagagaaagagggagcaaaaaatggtggtccaaggaagcaagctaatccgaaagatagcaagtgaagcgtttggccgggcgtttgggtggtgcccgagagacaggcgaatttctgggtgatcaatgctggaatatggattctggagttggagatagcctttcttttggttgatgtcttgaatcagggccttttgttttgcgcctgtctgtcgtgatctggttgtaaataagaaagtcttatgctactagtcgcaggtcgaactttatcttctatcctaggccctctacttatctaggttgatagtgtaaggtgtctagatagggatctgacctagttgctatctgtcggatcgtttgatcacgatggatgtcgttgttctaaactttcgtatttcctaatgaaatagtgggcttcgccccttcgtc

SEQ ID NO: 695 - protein, 114 aa, Zea mays subsp. mays
  peptide (1)..(114): Ceres Seq. ID no. 14306153
KRKGVGGLQRRLPPVHPRPAPLCPWSMGRLPRAPPHSTVLWEVAFGRGPGCHARRVGAWWRVVFCCFWLDSWAIQQRKREQKMVVQGSKLIRKIASEAFGRAFGWCPRDRRISG

SEQ ID NO: 696 - protein, 96 aa, Zea mays subsp. mays
  peptide (1)..(96): Ceres Seq. ID no. 14306154
KKKGRGWSPEASSSCSSSARAAVSMVHGPPPSRSPAQYGPLGGRLRSWPRVSRATSRRVVEGRLLLLLAGFLGYSTEKEGAKNGGPRKQANPKDSK

SEQ ID NO: 697 - protein, 89 aa, Zea mays subsp. mays
  peptide (1)..(89): Ceres Seq. ID no. 14306155
KERAWVVSRGVFLLFILGPRRCVHGPWAASLALPRTVRSSGRSPSVVAQGVTRDESARGGGSSSAASGWIPGLFNRERGSKKWWSKEAS

SEQ ID NO: 698 - DNA, 1154 bp, Zea mays subsp. mays
  misc_feature (1)..(1154): Ceres Seq. ID no. 13599162
cctttcccccctccagttccaaatttatgtaatgaagatgagagttttgctctggcaacaatacacgtcgtacgcgccgtgaagcaagcaatgatgatggctggctggtacctgattcccctgagctcgtcgaagaagcggaggtcgaacacgtcgccgaggcccgcgaagaggacgacgccggcgaggcggtggtgctcgatgtgtccgagcgccacgttgcgctggtggtgccgctccctgcccgcggcggcgtcggcggaggtgaagttgtccttgtaggtcaggtggcggtacatgagccccgtggcgcgcagcagccgcgccgtggccggcgcgtccggggcggcctccaccaccacccacagcagcggcggcgccaccagacgcagcgcgtgcgccgcccgcgtcagcgcggcggcgcgctcgccggtcgccgcgggcgtcgactccgtcgtcgtgacgaccaccaggagcgggcgcggggacgccgggtcgcgcggcaggccgccgccccccgcgtcgtgcgccagcaggctccggttcacggccccggcgccgcccgccggcagcgcccggaccacgtggctgctgcccacccggccccccgccgccgccgccgcggacgtccagtcggacacggacgacggcgcgaagccggtgaagaagcccatcacgaagcagagggaggaatgcagcagcgccttcttccacagctgcgacccctgcttcttgccacgggcaccggcggcgtgatccgtggacgaccccatcacagaagccagcaagcacaacgccgcctgcctagctccaccaccagctcccggaggctggcctcgtgccgcttaatctgcgtcgcgacgtgtcgaagctggctatgtaagctagcttagctagacgaccgcagcagcaagcggcagccaagcggtggtggggactggggaggcaagcaaagtttggtagtggtggtggtttaaaatgggcgggaggtggcgagcaggggagcggagctgcggaggagagccagcgaggggagccggtgtcgggttggtgtcacgctttttttcctttatatatcccagacgcagcagcaaatgtaaatcattaggtggcgtgcgagtttagtgacgcactaatgctaacacttcccgacc

SEQ ID NO: 699 - protein, 152 aa, Zea mays subsp. mays
  peptide (1)..(152): Ceres Seq. ID no. 15222533
MSPVARSSRAVAGASGAASTTTHSSGGATRRSACAARVSAAARSPVAAGVDSVVVTTTRSGRGDAGSRGRPPPPASCASRLRFTAPAPPAGSARTTWLLPTRPPAAAAADVQSDTDDGAKPVKKPITKQREECSSAFFHSCDPCFLPRAPAA

SEQ ID NO: 700 - protein, 93 aa, Zea mays subsp. mays
  peptide (1)..(93): Ceres Seq. ID no. 15222534
PFPPPVPNLCNEDESFALATIHVVRAVKQAMMMAGWYLIPLSSSKKRRSNTSPRPAKRTTPARRWCSMCPSATLRWWCRSLPAAASAEVKLSL

SEQ ID NO: 701 - DNA, 785 bp, Zea mays subsp. mays
  misc_feature (1)..(785): Ceres Seq. ID no. 13498916
  misc_feature: MA Experiment ID: 20000534 Result: Down-regulated in Transcription
  misc_feature: MA Experiment 20000534 PARAMETER Experiment Name: Zm_Hybrid_Pollen_P Parameter: Age (day) Value: 8
  misc_feature: MA Experiment 20000534 PARAMETER Experiment Name: Zm_Hybrid_Pollen_P Parameter: Organism Value: Zea mays
  misc_feature: MA Experiment 20000534 PARAMETER Experiment Name: Zm_Hybrid_Pollen_P Parameter: Plant Line Value: 35A19
  misc_feature: MA Experiment 20000534 PARAMETER Experiment Name: Zm_Hybrid_Pollen_P Parameter: Tissue Value: Pollen vs. Aerial
gcattgctcacagccttacctgatccttgacaattctgctccctcgccgccgccgccgccgtccgcccgtcgtcgctgcgcttcggtacccgcgaagcaaggccccgcctcccgtgtacccgccgccgaagaagggagaggagcagatgaaggcggggaggaagaacctgcggcgggcgtgcgacgagggcgccgccgtcacgctcgccgagggagagagcatcatgcaggtcctcacgctgcgcggctccaacgtcatcgaggtgatggacggcgtgggcgtcaggtccctggccttgttccccgccaagttccagaagagcttctggatcaagaacgggagtttcgtggtcgtggatgccagcgggagggaccaggcgctggaatcggggagcaagatcgcgtgcgttgtctcgcgagtcctcttccacgaacaagttcggggccctgcagaagtctggtaactggccggccattttcaactcagctccgactccgaatgaagcttcagaggcgggagcagaagcacaggctgcccaggttgacgaggaaccagactccgatgaagaagacgacgatcttccaccacttgaggcgaacacgaacaggaataggccgtatgaattgtattctgattcagacagtggttctgacgcttgaaaagtaccaaggccatccatcctgtgcgttttgtctccaaggtatcccgatgtgtgaatggaatgagtggacctggattcttatgtgccatgtcatgtatgttagttagcatgctgtcattctgc

SEQ ID NO: 702 - protein, 255 aa, Zea mays subsp. mays
  peptide (1)..(255): Ceres Seq. ID no. 13498917
HCSQPYLILDNSAPSPPPPPSARRRCASVPAKQGPASRVPAAEEGRGADEGGEEEPAAGVRRGRRRHARRGREHHAGPHAARLQRHRGDGRRGRQVPGLVPRQVPEELLDQEREFRGRGCQREGPGAGIGEQDRVRCLASPLPRTSSGPCRSLVTGRPFSTQLRLRMKLQRREQKHRLPRLTRNQTPMKKTTIFHHLRRTRTGIGRMNCILIQTVVLTLEKYQGHPSCAFCLQGIPMCEWNEWTWILMCHVMYVS

SEQ ID NO: 703 - DNA, 1420 bp, Zea mays subsp. mays
  misc_feature (1)..(1420): Ceres Seq. ID no. 12382051
  misc_feature: MA Experiment ID: 20000488 Result: Up-regulated in Transcription
  misc_feature: MA Experiment 20000488 PARAMETER Experiment Name: Zm_50mM_NH4NO3_L_to_H_P Parameter: Organism Value: Zea mays
  misc_feature: MA Experiment 20000488 PARAMETER Experiment Name: Zm_50mM_NH4NO3_L_to_H_P Parameter: Timepoint (hr) Value: 8
  misc_feature: MA Experiment 20000488 PARAMETER Experiment Name: Zm_50mM_NH4NO3_L_to_H_P Parameter: Tissue Value: Leaves
  misc_feature: MA Experiment 20000488 PARAMETER Experiment Name: Zm_50mM_NH4NO3_L_to_H_P Parameter: Treatment Value: 50mM NH4NO3 vs. 100mM Mannitol
aacaattattctcaacgcctcttgaactttcttgactaggtattccctctctctctcgtcaactgcgctcaccctgcgctccggaacctggtagctgtcgcccgttccgtcggctcttcctcccagcgcactgcgcggccccaagctacagatcttgctcttagcgccctgcgcggccctgagctacaggttcttctccactgtcgcctgttccgtcagctattcctcctagcgcactgcgcggccccgagctacagatcttcctcctagcgccctgcgcggccccgagctacaggctatttgtgttgacgacatcttcagaaccttggtgaagctttgaagaattagtggcctatacaagaccaaggaatcttgtcctttctttgcgacatgagtacgcgcaacagttatcatctacccaccacctatccaaggagattatatgttctacaggtgccaaaggttcatctataactataccagatcgactgtccggaataccgtagattattccggacaggagaagctttttggaaaaacaggccaagcgcggaccgtccgggcccttgcggcggaccgtccgcgacacaaggatgcccttcggacagaaccaatgcaaaaacacaagtttccactacggactgtccggaggaaaagcaaagaccgtccgagcccacgcgcggaccgtccggcctcaggcgcggaccgtccggtcggtaagaaaccgaaaaacccgaaggtaacgggttcggagaaatgaattataggggcctcgcggaccgtccggggtgctcgaccggaccgtccgcgactggctctgtctgacatctgacgccgcattaaatgcaatatagccgttgatatagccgttactgctgaccgttgcattttcagccgttgatctacagggggcggaccgtccgcaccaggagggcggaccgtccgcgctcagcagaaaggcccaacggctaggaagtggttggtggctataaatacaaccccaaccacctccattcacttcatccaagcattccaaccttcaacattcaatacaagagctagcaatccattccaagacacattcaaagcctccatctctccaagtttcataattgagaaaagagatcattagtgattagtagcttgagagagaaagtgatccgtgtgttgtttgtcgctcttgtcgcttggctttttcaatcgtgctttcttgattctttcattgggatcaatctcacttgtaattgatacaagagacaccaaacttgtggtggtccttgtgagaactttgtgttccaagtgattaagaagagaaagctcactcggtcgagggaccgtttgagagagggaagggttgaaagagacccggcctttgtggcctcctcaacggggagtaggtttgcaagaaccgaacctcggt

SEQ ID NO: 704 - protein, 105 aa, Zea mays subsp. mays
  peptide (1)..(105): Ceres Seq. ID no. 12382052
MFYRCQRFIYNYTRSTVRNTVDYSGQEKLFGKTGQARTVRALAADRPRHKDALRTEPMQKHKFPLRTVRRKSKDRPSPRADRPASGADRPVGKKPKNPKVTGSEK

SEQ ID NO: 705 - DNA, 910 bp, Zea mays subsp. mays
  misc_feature (1)..(910): Ceres Seq. ID no. 12355936
  misc_feature: MA Experiment ID: 108504 Result: Down-regulated in Transcription
  misc_feature: MA Experiment 108504 PARAMETER Experiment Name: Zm_Drought_P Parameter: Age (day) Value: 8
  misc_feature: MA Experiment 108504 PARAMETER Experiment Name: Zm_Drought_P Parameter: Organism Value: Zea mays
  misc_feature: MA Experiment 108504 PARAMETER Experiment Name: Zm_Drought_P Parameter: Plant Line Value: 35A19
  misc_feature: MA Experiment 108504 PARAMETER Experiment Name: Zm_Drought_P Parameter: Timepoint (hr) Value: 12
  misc_feature: MA Experiment 108504 PARAMETER Experiment Name: Zm_Drought_P Parameter: Tissue Value: Aerial
  misc_feature: MA Experiment 108504 PARAMETER Experiment Name: Zm_Drought_P Parameter: Treatment Value: Drought vs. No Drought
  misc_feature: MA Experiment ID: 108523 Result: Down-regulated in Transcription
  misc_feature: MA Experiment 108523 PARAMETER Experiment Name: Zm_42deg_Heat_P Parameter: Age (day) Value: 8
  misc_feature: MA Experiment 108523 PARAMETER Experiment Name: Zm_42deg_Heat_P Parameter: Organism Value: Zea mays
  misc_feature: MA Experiment 108523 PARAMETER Experiment Name: Zm_42deg_Heat_P Parameter: Plant Line Value: 35A19
  misc_feature: MA Experiment 108523 PARAMETER Experiment Name: Zm_42deg_Heat_P Parameter: Temperature (deg C) Value: 42 vs. 22
  misc_feature: MA Experiment 108523 PARAMETER Experiment Name: Zm_42deg_Heat_P Parameter: Timepoint (hr) Value: 6
  misc_feature: MA Experiment 108523 PARAMETER Experiment Name: Zm_42deg_Heat_P Parameter: Tissue Value: Aerial
  misc_feature: MA Experiment ID: 108528 Result: Up-regulated in Transcription
  misc_feature: MA Experiment 108528 PARAMETER Experiment Name: Zm_Imbibed_Seeds_P Parameter: Age (day) Value: 5 vs. 2
  misc_feature: MA Experiment 108528 PARAMETER Experiment Name: Zm_Imbibed_Seeds_P Parameter: Organism Value: Zea mays
  misc_feature: MA Experiment 108528 PARAMETER Experiment Name: Zm_Imbibed_Seeds_P Parameter: Plant Line Value: 35A19
  misc_feature: MA Experiment 108528 PARAMETER Experiment Name: Zm_Imbibed_Seeds_P Parameter: Tissue Value: Aerial vs. Embryo
  misc_feature: MA Experiment ID: 108529 Result: Down-regulated in Transcription
  misc_feature: MA Experiment 108529 PARAMETER Experiment Name: Zm_Imbibed_Seeds_P Parameter: Age (day) Value: 5 vs. 2
  misc_feature: MA Experiment 108529 PARAMETER Experiment Name: Zm_Imbibed_Seeds_P Parameter: Organism Value: Zea mays
  misc_feature: MA Experiment 108529 PARAMETER Experiment Name: Zm_Imbibed_Seeds_P Parameter: Plant Line Value: 35A19
  misc_feature: MA Experiment 108529 PARAMETER Experiment Name: Zm_Imbibed_Seeds_P Parameter: Tissue Value: Roots vs. Embryo
  misc_feature: MA Experiment ID: 108530 Result: Up-regulated in Transcription
  misc_feature: MA Experiment 108530 PARAMETER Experiment Name: Zm_Imbibed_Seeds_P Parameter: Age (day) Value: 6 vs. 2
  misc_feature: MA Experiment 108530 PARAMETER Experiment Name: Zm_Imbibed_Seeds_P Parameter: Organism Value: Zea mays
  misc_feature: MA Experiment 108530 PARAMETER Experiment Name: Zm_Imbibed_Seeds_P Parameter: Plant Line Value: 35A19
  misc_feature: MA Experiment 108530 PARAMETER Experiment Name: Zm_Imbibed_Seeds_P Parameter: Tissue Value: Aerial vs. Embryo
  misc_feature: MA Experiment ID: 108536 Result: Down-regulated in Transcription
  misc_feature: MA Experiment 108536 PARAMETER Experiment Name: Zm_Meristem_P Parameter: Age (day) Value: 8
  misc_feature: MA Experiment 108536 PARAMETER Experiment Name: Zm_Meristem_P Parameter: Organism Value: Zea mays
  misc_feature: MA Experiment 108536 PARAMETER Experiment Name: Zm_Meristem_P Parameter: Plant Line Value: 35A19
  misc_feature: MA Experiment 108536 PARAMETER Experiment Name: Zm_Meristem_P Parameter: Tissue Value: Shoot Meristem vs. Above Shoot Meristem
  misc_feature: MA Experiment ID: 108543 Result: Up-regulated in Transcription
  misc_feature: MA Experiment ID: 108544 Result: Down-regulated in Transcription
  misc_feature: MA Experiment ID: 108545 Result: Up-regulated in Transcription
  misc_feature: MA Experiment 108545 PARAMETER Experiment Name: Zm_Imbibed_Seeds_P Parameter: Age (day) Value: 3 vs. 2
  misc_feature: MA Experiment 108545 PARAMETER Experiment Name: Zm_Imbibed_Seeds_P Parameter: Organism Value: Zea mays
  misc_feature: MA Experiment 108545 PARAMETER Experiment Name: Zm_Imbibed_Seeds_P Parameter: Plant Line Value: 35A19
  misc_feature: MA Experiment 108545 PARAMETER Experiment Name: Zm_Imbibed_Seeds_P Parameter: Tissue Value: Aerial vs. Embryo
  misc_feature: MA Experiment ID: 108546 Result: Down-regulated in Transcription
  misc_feature: MA Experiment 108546 PARAMETER Experiment Name: Zm_Imbibed_Seeds_P Parameter: Age (day) Value: 3 vs. 2
  misc_feature: MA Experiment 108546 PARAMETER Experiment Name: Zm_Imbibed_Seeds_P Parameter: Organism Value: Zea mays
  misc_feature: MA Experiment 108546 PARAMETER Experiment Name: Zm_Imbibed_Seeds_P Parameter: Plant Line Value: 35A19
  misc_feature: MA Experiment 108546 PARAMETER Experiment Name: Zm_Imbibed_Seeds_P Parameter: Tissue Value: Roots vs. Embryo
  misc_feature: MA Experiment ID: 108547 Result: Up-regulated in Transcription
  misc_feature: MA Experiment 108547 PARAMETER Experiment Name: Zm_Imbibed_Seeds_P Parameter: Age (day) Value: 4 vs. 2
  misc_feature: MA Experiment 108547 PARAMETER Experiment Name: Zm_Imbibed_Seeds_P Parameter: Organism Value: Zea mays
  misc_feature: MA Experiment 108547 PARAMETER Experiment Name: Zm_Imbibed_Seeds_P Parameter: Plant Line Value: 35A19
  misc_feature: MA Experiment 108547 PARAMETER Experiment Name: Zm_Imbibed_Seeds_P Parameter: Tissue Value: Aerial vs. Embryo
  misc_feature: MA Experiment ID: 108556 Result: Down-regulated in Transcription
  misc_feature: MA Experiment 108556 PARAMETER Experiment Name: Zm_Drought_P Parameter: Age (day) Value: 9
  misc_feature: MA Experiment 108556 PARAMETER Experiment Name: Zm_Drought_P Parameter: Organism Value: Zea mays
  misc_feature: MA Experiment 108556 PARAMETER Experiment Name: Zm_Drought_P Parameter: Plant Line Value: 35A19
  misc_feature: MA Experiment 108556 PARAMETER Experiment Name: Zm_Drought_P Parameter: Timepoint (hr) Value: 24
  misc_feature: MA Experiment 108556 PARAMETER Experiment Name: Zm_Drought_P Parameter: Tissue Value: Aerial
  misc_feature: MA Experiment 108556 PARAMETER Experiment Name: Zm_Drought_P Parameter: Treatment Value: Drought vs. No Drought
  misc_feature: MA Experiment ID: 108597 Result: Down-regulated in Transcription
  misc_feature: MA Experiment 108597 PARAMETER Experiment Name: Zm_100uM_ABA_P Parameter: Age (day) Value: 9
  misc_feature: MA Experiment 108597 PARAMETER Experiment Name: Zm_100uM_ABA_P Parameter: Organism Value: Zea mays
  misc_feature: MA Experiment 108597 PARAMETER Experiment Name: Zm_100uM_ABA_P Parameter: Plant Line Value: 35A19
  misc_feature: MA Experiment 108597 PARAMETER Experiment Name: Zm_100uM_ABA_P Parameter: Timepoint (hr) Value: 24
  misc_feature: MA Experiment 108597 PARAMETER Experiment Name: Zm_100uM_ABA_P Parameter: Tissue Value: Aerial
  misc_feature: MA Experiment 108597 PARAMETER Experiment Name: Zm_100uM_ABA_P Parameter: Treatment Value: 100uM ABA vs. No Treatment
  misc_feature: MA Experiment ID: 20000477 Result: Down-regulated in Transcription
  misc_feature: MA Experiment 20000477 PARAMETER Experiment Name: Zm_5mM_SA_P Parameter: Age (day) Value: 10
  misc_feature: MA Experiment 20000477 PARAMETER Experiment Name: Zm_5mM_SA_P Parameter: Organism Value: Zea mays
  misc_feature: MA Experiment 20000477 PARAMETER Experiment Name: Zm_5mM_SA_P Parameter: Plant Line Value: 35A19
  misc_feature: MA Experiment 20000477 PARAMETER Experiment Name: Zm_5mM_SA_P Parameter: Timepoint (hr) Value: 48
  misc_feature: MA Experiment 20000477 PARAMETER Experiment Name: Zm_5mM_SA_P Parameter: Tissue Value: Aerial
  misc_feature: MA Experiment 20000477 PARAMETER Experiment Name: Zm_5mM_SA_P Parameter: Treatment Value: 5mM SA vs. No Treatment
  misc_feature: MA Experiment ID: 20000478 Result: Down-regulated in Transcription
  misc_feature: MA Experiment 20000478 PARAMETER Experiment Name: Zm_5mM_SA_P Parameter: Age (day) Value: 11
  misc_feature: MA Experiment 20000478 PARAMETER Experiment Name: Zm_5mM_SA_P Parameter: Organism Value: Zea mays
  misc_feature: MA Experiment 20000478 PARAMETER Experiment Name: Zm_5mM_SA_P Parameter: Plant Line Value: 35A19
  misc_feature: MA Experiment 20000478 PARAMETER Experiment Name: Zm_5mM_SA_P Parameter: Timepoint (hr) Value: 72
  misc_feature: MA Experiment 20000478 PARAMETER Experiment Name: Zm_5mM_SA_P Parameter: Tissue Value: Aerial
  misc_feature: MA Experiment 20000478 PARAMETER Experiment Name: Zm_5mM_SA_P Parameter: Treatment Value: 5mM SA vs. No Treatment
  misc_feature: MA Experiment ID: 20000480 Result: Down-regulated in Transcription
  misc_feature: MA Experiment 20000480 PARAMETER Experiment Name: Zm_Drought_P Parameter: Age (day) Value: 11
  misc_feature: MA Experiment 20000480 PARAMETER Experiment Name: Zm_Drought_P Parameter: Organism Value: Zea mays
  misc_feature: MA Experiment 20000480 PARAMETER Experiment Name: Zm_Drought_P Parameter: Plant Line Value: 35A19
  misc_feature: MA Experiment 20000480 PARAMETER Experiment Name: Zm_Drought_P Parameter: Timepoint (hr) Value: 72
  misc_feature: MA Experiment 20000480 PARAMETER Experiment Name: Zm_Drought_P Parameter: Tissue Value: Aerial
  misc_feature: MA Experiment 20000480 PARAMETER Experiment Name: Zm_Drought_P Parameter: Treatment Value: Drought vs. No Drought
  misc_feature: MA Experiment ID: 20000535 Result: Down-regulated in Transcription
  misc_feature: MA Experiment 20000535 PARAMETER Experiment Name: Zm_Hybrid_Seed_Dev_P Parameter: DAP Value: 30 vs. 12
  misc_feature: MA Experiment 20000535 PARAMETER Experiment Name: Zm_Hybrid_Seed_Dev_P Parameter: Organism Value: Zea mays
  misc_feature: MA Experiment 20000535 PARAMETER Experiment Name: Zm_Hybrid_Seed_Dev_P Parameter: Plant Line Value: 35A19
  misc_feature: MA Experiment 20000535 PARAMETER Experiment Name: Zm_Hybrid_Seed_Dev_P Parameter: Tissue Value: Embryo vs. Unfert Floret
  misc_feature: MA Experiment ID: 20000626 Result: Down-regulated in Transcription
  misc_feature: MA Experiment 20000626 PARAMETER Experiment Name: Zm_Herbicide-Treatments_P Parameter: Timepoint (hr) Value: 12
  misc_feature: MA Experiment 20000626 PARAMETER Experiment Name: Zm_Herbicide-Treatments_P Parameter: Tissue Value: Aerial
  misc_feature: MA Experiment 20000626 PARAMETER Experiment Name: Zm_Herbicide-Treatments_P Parameter: Treatment Value: Roundup vs. No Treatment
acgagtcagacggccacacttgtcagcaaagcgccggaaaccaaaccacgcaccgccgcctcggctagctaacacgtacactagcagtgatccccatggcaatgctgccgcgtccaacggcgctcgtcgcagcggtggtggtggcgtcggcgctggtgctcgggatggcgtcggcgcaggggccggccgccgcgcccgcgccgggcccggcgcccgggatcagcgacgagtgcttcaacgcggtgctgaacatgtcggactgcctgacgtacgtgacggcgggcagcaaggcgcggcacccggacacgccctgctgcccggagctggccggggctgctcgagtcccaccccgtctgcctctgccagctgctgggcggcggcgccgagtcctacggcgtcagcgtcgactacaagcgcgcgctcgcgctcccggggatctgccgcctcaccgcgccgcccgttagcgcctgcgcagctttcggattccctatccccgagggattggtgcctactgcggcgcccatggcaggcctctctccatcttctatcggcccagatgtgcctgccaacacgccgacgggctcagccaagtcccccgcgggacgcgtcaccgccgccggaggcctcgtcgccctcgccgcgctacccgtcgccgtcgcggccgggatcatgttctagagcatctaccggtcgtcttagactttgtgatttcttcgtcatcattcttcttacagcacacacatgtttgtgcattatggtactagttcgttaattcacgtacaaacagctagctgttccaggcacgagattcttccggatttgtttccttgtaataattccccttgagcgtgtgtttggtatgtttctacaattctactacggagcactgtatgcatgcagttcaatctcc

SEQ ID NO: 706 - protein, 256 aa, Zea mays subsp. mays
  peptide (1)..(256): Ceres Seq. ID no. 12355937
RVRRPHLSAKRRKPNHAPPPRLANTYTSSDPHGNAAASNGARRSGGGGVGAGARDGVGAGAGRRARAGPGARDQRRVLQRGAEHVGLPDVRDGGQQGAAPGHALLPGAGRGCSSPTPSASASCWAAAPSPTASASTTSARSRSRGSAASPRRPLAPAQLSDSLSPRDWCLLRRPWQASLHLLSAQMCLPTRRRAQPSPPRDASPPPEASSPSPRYPSPSRPGSCSRASTGRLRLCDFFVIILLTAHTCLCIMVLVR

SEQ ID NO: 707 - DNA, 482 bp, Zea mays subsp. mays
  misc_feature (1)..(482): Ceres Seq. ID no. 12345924
  misc_feature: MA Experiment ID: 108530 Result: Up-regulated in Transcription
  misc_feature: MA Experiment 108530 PARAMETER Experiment Name: Zm_Imbibed_Seeds_P Parameter: Age (day) Value: 6 vs. 2
  misc_feature: MA Experiment 108530 PARAMETER Experiment Name: Zm_Imbibed_Seeds_P Parameter: Organism Value: Zea mays
  misc_feature: MA Experiment 108530 PARAMETER Experiment Name: Zm_Imbibed_Seeds_P Parameter: Plant Line Value: 35A19
  misc_feature: MA Experiment 108530 PARAMETER Experiment Name: Zm_Imbibed_Seeds_P Parameter: Tissue Value: Aerial vs. Embryo
tgaagtgggaatggtggatctcatgcggctccagacctaattcaccacaaatcgaccgagcgtggacagaattataggagaccacgaggaatcagcagctcactgacgcacccgagatcaatccagaccaatccgttgctcgaatcaaccgatgtaataatgaataaggcactggaaaacaggatctacgacccctgataccaatttgttaacaacaatagtggggaagagggaaggacatgaagaacgagagcaagagtggtcggcaagacaggagggaggacgataggtatccatctctatatccgtcatttacagtcttctctaaaaaattctatcctctatatctccttcctctccaataacgtcctctaaattacatcctctatactcaaatacctatattagagacattttttttattttttgtacatacgtatttgtcatactctcaaatatattgtacatattttagttttgct

SEQ ID NO: 708 - protein, 41 aa, Zea mays subsp. mays
  peptide (1)..(41): Ceres Seq. ID no. 12345925
MKNESKSGRQDRREDDRYPSLYPSFTVFSKKFYPLYLLPLQ

SEQ ID NO: 709 - DNA, 1399 bp, Zea mays subsp. mays
  misc_feature (1)..(1399): Ceres Seq. ID no. 12368873
  misc_feature: MA Experiment ID: 108536 Result: Up-regulated in Transcription
  misc_feature: MA Experiment 108536 PARAMETER Experiment Name: Zm_Meristem_P Parameter: Age (day) Value: 8
  misc_feature: MA Experiment 108536 PARAMETER Experiment Name: Zm_Meristem_P Parameter: Organism Value: Zea mays
  misc_feature: MA Experiment 108536 PARAMETER Experiment Name: Zm_Meristem_P Parameter: Plant Line Value: 35A19
  misc_feature: MA Experiment 108536 PARAMETER Experiment Name: Zm_Meristem_P Parameter: Tissue Value: Shoot Meristem vs. Above Shoot Meristem
  misc_feature: MA Experiment ID: 108544 Result: Down-regulated in Transcription
  misc_feature: MA Experiment ID: 20000477 Result: Down-regulated in Transcription
  misc_feature: MA Experiment 20000477 PARAMETER Experiment Name: Zm_5mM_SA_P Parameter: Age (day) Value: 10
  misc_feature: MA Experiment 20000477 PARAMETER Experiment Name: Zm_5mM_SA_P Parameter: Organism Value: Zea mays
  misc_feature: MA Experiment 20000477 PARAMETER Experiment Name: Zm_5mM_SA_P Parameter: Plant Line Value: 35A19
  misc_feature: MA Experiment 20000477 PARAMETER Experiment Name: Zm_5mM_SA_P Parameter: Timepoint (hr) Value: 48
  misc_feature: MA Experiment 20000477 PARAMETER Experiment Name: Zm_5mM_SA_P Parameter: Tissue Value: Aerial
  misc_feature: MA Experiment 20000477 PARAMETER Experiment Name: Zm_5mM_SA_P Parameter: Treatment Value: 5mM SA vs. No Treatment
  misc_feature: MA Experiment ID: 20000535 Result: Up-regulated in Transcription
  misc_feature: MA Experiment 20000535 PARAMETER Experiment Name: Zm_Hybrid_Seed_Dev_P Parameter: DAP Value: 30 vs. 12
  misc_feature: MA Experiment 20000535 PARAMETER Experiment Name: Zm_Hybrid_Seed_Dev_P Parameter: Organism Value: Zea mays
  misc_feature: MA Experiment 20000535 PARAMETER Experiment Name: Zm_Hybrid_Seed_Dev_P Parameter: Plant Line Value: 35A19
  misc_feature: MA Experiment 20000535 PARAMETER Experiment Name: Zm_Hybrid_Seed_Dev_P Parameter: Tissue Value: Embryo vs. Unfert Floret
acccatggcactggcatccccctctctccctctccccaccacaccacctccctcctcacaagccatagccgccgcctctttctgtgcttgccctctcgccatcttcgagtacgacgagaaggcggtgatggagctggacgagcaggccttcctggaggagatcctctccctgcggagggacgcctgggactgcaatgccatgggggacttcttcgccccggccgccatggactgcaccttccaggaccgccaccaccaggcgcccaccgtcagcgtcctccccaccttcaccgcctcctacgcccagccgcagccgcagccggcggcggcgcccggcttcgactgcctcagcgaggtctacggcgccgccgcgttcggcgggcccaatgctggtgactacggcggcgagatggggttccttgacgtcgtcgagcccaaggcggcgtcggcggcactggtggacggcgccgcgggcctcggggcctgcaaggtggagcccggcctggcggagagcggcggcgcgttcggcgctggcagctggcgctgcgccgccgccggccctggcgtccaagaagaagagggtcgaggggatgccgtccaagaacctgatggccgagcgccgccgccgcaagcgcctcaacgaccgcctctccatgctacgctccgtcgtgcccaagatcagcaagatggaccggacgtcgatcctgggcgacacgatcgactacatgaaggagctgctggagaggatcaagctgctgcaggaagagatcgggcagcagcaggaggaggcgccaggcatgctcagcgtcttccgggagctcaaccccaacgagatggtggccaggaacacccccaagttcgacgtggagcggaaggagggcggcgacacccgggtggagatctactgcgccgccaagccggggctgctgctgtccacggtgagcacgctggacacgctagggctcgacatccagcagtgcgtcgtcagctgcttcaacgacttcggcatgcacgcctcctgctccgagatgcagagggaaatgatcagcgccgacgcgataaagcaggagctgttcaagaacgctggctatggcggaggctgcttgtagaggggcatgtcatcatggcatgggaggaagaagaagaagaggcagcaataaattaatcttaagcagctgtgggagcagcagtagtagtatcagttcaggtccagtagcggaaaaggcaggcagggcaaagatttgggaggcctttttgcaatccatctcccccatcataacccacttcgatctatccatgttagcagtacgtgtccgtccgtcctatagcatcatgcaggatgcaaaggttgccctgtgctgctgaatctttctcctatatactattctatttaattaac

SEQ ID NO: 710 - protein, 387 aa, Zea mays subsp. mays
  peptide (1)..(387): Ceres Seq. ID no. 12368874
PMALASPSLPLPTTPPPSSQAIAAASFCACPLAIFEYDEKAVMELDEQAFLEEILSLRRDAWDCNAMGDFFAPAAMDCTFQDRHHQAPTVSVLPTFTASYAQPQPQPAAAPGFDCLSEVYGAAAFGGPNAGDYGGEMGFLDVVEPKAASAALVDGAAGLGACKVEPGLAESGGAFGAGSWRCAAAGPGVQEEEGRGDAVQEPDGRAPPPQAPQRPPLHATLRRAQDQQDGPDVDPGRHDRLHEGAAGEDQAAAGRDRAAAGGGARHAQRLPGAQPQRDGGQEHPQVRRGAEGGRRHPGGDLLRRQAGAAAVHGEHAGHARARHPAVRRQLLQRLRHARLLLRDAEGNDQRRRDKAGAVQERWLWRRLLVEGHVIMAWEEEEEEAAIN

SEQ ID NO: 711 - protein, 386 aa, Zea mays subsp. mays
  peptide (1)..(386): Ceres Seq. ID no. 12368875
MALASPSLPLPTTPPPSSQAIAAASFCACPLAIFEYDEKAVMELDEQAFLEEILSLRRDAWDCNAMGDFFAPAAMDCTFQDRHHQAPTVSVLPTFTASYAQPQPQPAAAPGFDCLSEVYGAAAFGGPNAGDYGGEMGFLDVVEPKAASAALVDGAAGLGACKVEPGLAESGGAFGAGSWRCAAAGPGVQEEEGRGDAVQEPDGRAPPPQAPQRPPLHATLRRAQDQQDGPDVDPGRHDRLHEGAAGEDQAAAGRDRAAAGGGARHAQRLPGAQPQRDGGQEHPQVRRGAEGGRRHPGGDLLRRQAGAAAVHGEHAGHARARHPAVRRQLLQRLRHARLLLRDAEGNDQRRRDKAGAVQERWLWRRLLVEGHVIMAWEEEEEEAAIN

SEQ ID NO: 712 - protein, 345 aa, Zea mays subsp. mays
  peptide (1)..(345): Ceres Seq. ID no. 12368876
MELDEQAFLEEILSLRRDAWDCNAMGDFFAPAAMDCTFQDRHHQAPTVSVLPTFTASYAQPQPQPAAAPGFDCLSEVYGAAAFGGPNAGDYGGEMGFLDVVEPKAASAALVDGAAGLGACKVEPGLAESGGAFGAGSWRCAAAGPGVQEEEGRGDAVQEPDGRAPPPQAPQRPPLHATLRRAQDQQDGPDVDPGRHDRLHEGAAGEDQAAAGRDRAAAGGGARHAQRLPGAQPQRDGGQEHPQVRRGAEGGRRHPGGDLLRRQAGAAAVHGEHAGHARARHPAVRRQLLQRLRHARLLLRDAEGNDQRRRDKAGAVQERWLWRRLLVEGHVIMAWEEEEEEAAIN

SEQ ID NO: 713 - DNA, 1243 bp, Zea mays subsp. mays
  misc_feature (1)..(1243): Ceres Seq. ID no. 12341642
  misc_feature: MA Experiment ID: 108535 Result: Down-regulated in Transcription
  misc_feature: MA Experiment 108535 PARAMETER Experiment Name: Zm_Meristem_P Parameter: Age (day) Value: 8
  misc_feature: MA Experiment 108535 PARAMETER Experiment Name: Zm_Meristem_P Parameter: Organism Value: Zea mays
  misc_feature: MA Experiment 108535 PARAMETER Experiment Name: Zm_Meristem_P Parameter: Plant Line Value: 35A19
  misc_feature: MA Experiment 108535 PARAMETER Experiment Name: Zm_Meristem_P Parameter: Tissue Value: Root Meristem vs. Above Root Meristem
  misc_feature: MA Experiment ID: 20000479 Result: Up-regulated in Transcription
  misc_feature: MA Experiment 20000479 PARAMETER Experiment Name: Zm_Drought_P Parameter: Age (day) Value: 10
  misc_feature: MA Experiment 20000479 PARAMETER Experiment Name: Zm_Drought_P Parameter: Organism Value: Zea mays
  misc_feature: MA Experiment 20000479 PARAMETER Experiment Name: Zm_Drought_P Parameter: Plant Line Value: 35A19
  misc_feature: MA Experiment 20000479 PARAMETER Experiment Name: Zm_Drought_P Parameter: Timepoint (hr) Value: 48
  misc_feature: MA Experiment 20000479 PARAMETER Experiment Name: Zm_Drought_P Parameter: Tissue Value: Aerial
  misc_feature: MA Experiment 20000479 PARAMETER Experiment Name: Zm_Drought_P Parameter: Treatment Value: Drought vs. No Drought
  misc_feature: MA Experiment ID: 20000480 Result: Up-regulated in Transcription
  misc_feature: MA Experiment 20000480 PARAMETER Experiment Name: Zm_Drought_P Parameter: Age (day) Value: 11
  misc_feature: MA Experiment 20000480 PARAMETER Experiment Name: Zm_Drought_P Parameter: Organism Value: Zea mays
  misc_feature: MA Experiment 20000480 PARAMETER Experiment Name: Zm_Drought_P Parameter: Plant Line Value: 35A19
  misc_feature: MA Experiment 20000480 PARAMETER Experiment Name: Zm_Drought_P Parameter: Timepoint (hr) Value: 72
  misc_feature: MA Experiment 20000480 PARAMETER Experiment Name: Zm_Drought_P Parameter: Tissue Value: Aerial
  misc_feature: MA Experiment 20000480 PARAMETER Experiment Name: Zm_Drought_P Parameter: Treatment Value: Drought vs. No Drought
ttccgagcgtgtgcttggtcaactgggccaccgcgcacaaaacccattgcagttgtagcagggactctttccccgtgccacggacgacaatgactgccgacgcggcgctcctcgccatcatcgtgccttcctcctcccgctacgcctcgtctccctcggcctcagcctggcgtccgggcgtcacggtactagctccagacgcgtccgccgttcctgtgccgctttggccgtcgcagccgcgctcctcgcagtcatcttcgccctcccgcgtgaccacgtccgggagtgcgccgctccgatcgcttctgtctccagtgccggggatgatgacggcggtttccgcgaggagctgcggttggaggtcgagcagcttaagcagcagctggcgcggcttgaatctctttgggatagtaaatcgaaagctgtggatgataaacttgattctttagaggaggataatggccgtgtaatgagagcaatggcactcgatgtccagtctctgatcaatgagcgggaaaatatcaagattcaggaatcattatgcagctcatattttggtaacagtatcaaggaaatggaaaatgaggttcaaattctaaaagatgggtcaagaaagatgaattctgatatatcatcagtagcaaaggacacgacagaaaaggtcgaagttttgcattcagctatcgagaaggttcaagttatagctgatgaatgggtcaagatgaactatactattaacagaatatggtcattcactaaggagacagagaaaagggtggaaggtctatattcagatttaatgaagggcttcaagcagacgaagagaaaagtgccgttctggagagactgatgatgctgtggacctgatgtttgaccactgtcattgacgacccgcttggaattgacacaccgaagctgctagcaacttaatccgcttccatccagtgtttatattttcgcgtccttagtgcttgtgagacgtcagtgcaaggttgtggttgatgagaccttgtgcgacccgacttgctaactgtttgcatgccgtcatggccccataatgggactatctctatctatagcagcttatctataattatatttaaattacactgtacaaataatacaatacagcccaaaacggtgtaaaacggtgtttttgtgaccatatggtgcaatgctgacattataatgtttgtagactgtaatttgaatatgagtaaagctcgagatagttttatgcgcc

SEQ ID NO: 714 - protein, 148 aa, Zea mays subsp. mays
  peptide (1)..(148): Ceres Seq. ID no. 12341643
PSVCLVNWATAHKTHCSCSRDSFPVPRTTMTADAALLAIIVPSSSRYASSPSASAWRPGVTVLAPDASAVPVPLWPSQPRSSQSSSPSRVTTSGSAPLRSLLSPVPGMMTAVSARSCGWRSSSLSSSWRGLNLFGIVNRKLWMINLIL

SEQ ID NO: 715 - protein, 126 aa, Zea mays subsp. mays
  peptide (1)..(126): Ceres Seq. ID no. 12341644
MRAMALDVQSLINERENIKIQESLCSSYFGNSIKEMENEVQILKDGSRKMNSDISSVAKDTTEKVEVLHSAIEKVQVIADEWVKMNYTINRIWSFTKETEKRVEGLYSDLMKGFKQTKRKVPFWRD

SEQ ID NO: 716 - protein, 123 aa, Zea mays subsp. mays
  peptide (1)..(123): Ceres Seq. ID no. 12341645
MALDVQSLINERENIKIQESLCSSYFGNSIKEMENEVQILKDGSRKMNSDISSVAKDTTEKVEVLHSAIEKVQVIADEWVKMNYTINRIWSFTKETEKRVEGLYSDLMKGFKQTKRKVPFWRD

SEQ ID NO: 717 - DNA, 1156 bp, Zea mays subsp. mays
  misc_feature (1)..(1156): Ceres Seq. ID no. 12368537
  misc_feature: MA Experiment ID: 108504 Result: Up-regulated in Transcription
  misc_feature: MA Experiment 108504 PARAMETER Experiment Name: Zm_Drought_P Parameter: Age (day) Value: 8
  misc_feature: MA Experiment 108504 PARAMETER Experiment Name: Zm_Drought_P Parameter: Organism Value: Zea mays
  misc_feature: MA Experiment 108504 PARAMETER Experiment Name: Zm_Drought_P Parameter: Plant Line Value: 35A19
  misc_feature: MA Experiment 108504 PARAMETER Experiment Name: Zm_Drought_P Parameter: Timepoint (hr) Value: 12
  misc_feature: MA Experiment 108504 PARAMETER Experiment Name: Zm_Drought_P Parameter: Tissue Value: Aerial
  misc_feature: MA Experiment 108504 PARAMETER Experiment Name: Zm_Drought_P Parameter: Treatment Value: Drought vs. No Drought
  misc_feature: MA Experiment ID: 108522 Result: Up-regulated in Transcription
  misc_feature: MA Experiment 108522 PARAMETER Experiment Name: Zm_42deg_Heat_P Parameter: Age (day) Value: 8
  misc_feature: MA Experiment 108522 PARAMETER Experiment Name: Zm_42deg_Heat_P Parameter: Organism Value: Zea mays
  misc_feature: MA Experiment 108522 PARAMETER Experiment Name: Zm_42deg_Heat_P Parameter: Plant Line Value: 35A19
  misc_feature: MA Experiment 108522 PARAMETER Experiment Name: Zm_42deg_Heat_P Parameter: Temperature (deg C) Value: 42 vs. 22
  misc_feature: MA Experiment 108522 PARAMETER Experiment Name: Zm_42deg_Heat_P Parameter: Timepoint (hr) Value: 1
  misc_feature: MA Experiment 108522 PARAMETER Experiment Name: Zm_42deg_Heat_P Parameter: Tissue Value: Aerial
  misc_feature: MA Experiment ID: 108523 Result: Up-regulated in Transcription
  misc_feature: MA Experiment 108523 PARAMETER Experiment Name: Zm_42deg_Heat_P Parameter: Age (day) Value: 8
  misc_feature: MA Experiment 108523 PARAMETER Experiment Name: Zm_42deg_Heat_P Parameter: Organism Value: Zea mays
  misc_feature: MA Experiment 108523 PARAMETER Experiment Name: Zm_42deg_Heat_P Parameter: Plant Line Value: 35A19
  misc_feature: MA Experiment 108523 PARAMETER Experiment Name: Zm_42deg_Heat_P Parameter: Temperature (deg C) Value: 42 vs. 22
  misc_feature: MA Experiment 108523 PARAMETER Experiment Name: Zm_42deg_Heat_P Parameter: Timepoint (hr) Value: 6
  misc_feature: MA Experiment 108523 PARAMETER Experiment Name: Zm_42deg_Heat_P Parameter: Tissue Value: Aerial
  misc_feature: MA Experiment ID: 108527 Result: Up-regulated in Transcription
  misc_feature: MA Experiment 108527 PARAMETER Experiment Name: Zm_5mM_NO_P Parameter: Age (day) Value: 8
  misc_feature: MA Experiment 108527 PARAMETER Experiment Name: Zm_5mM_NO_P Parameter: Organism Value: Zea mays
  misc_feature: MA Experiment 108527 PARAMETER Experiment Name: Zm_5mM_NO_P Parameter: Plant Line Value: 35A19
  misc_feature: MA Experiment 108527 PARAMETER Experiment Name: Zm_5mM_NO_P Parameter: Timepoint (hr) Value: 6
  misc_feature: MA Experiment 108527 PARAMETER Experiment Name: Zm_5mM_NO_P Parameter: Tissue Value: Aerial
  misc_feature: MA Experiment 108527 PARAMETER Experiment Name: Zm_5mM_NO_P Parameter: Treatment Value: 5mM NO vs. No Treatment
  misc_feature: MA Experiment ID: 108528 Result: Down-regulated in Transcription
  misc_feature: MA Experiment 108528 PARAMETER Experiment Name: Zm_Imbibed_Seeds_P Parameter: Age (day) Value: 5 vs. 2
  misc_feature: MA Experiment 108528 PARAMETER Experiment Name: Zm_Imbibed_Seeds_P Parameter: Organism Value: Zea mays
  misc_feature: MA Experiment 108528 PARAMETER Experiment Name: Zm_Imbibed_Seeds_P Parameter: Plant Line Value: 35A19
  misc_feature: MA Experiment 108528 PARAMETER Experiment Name: Zm_Imbibed_Seeds_P Parameter: Tissue Value: Aerial vs. Embryo
  misc_feature: MA Experiment ID: 108530 Result: Down-regulated in Transcription
  misc_feature: MA Experiment 108530 PARAMETER Experiment Name: Zm_Imbibed_Seeds_P Parameter: Age (day) Value: 6 vs. 2
  misc_feature: MA Experiment 108530 PARAMETER Experiment Name: Zm_Imbibed_Seeds_P Parameter: Organism Value: Zea mays
  misc_feature: MA Experiment 108530 PARAMETER Experiment Name: Zm_Imbibed_Seeds_P Parameter: Plant Line Value: 35A19
  misc_feature: MA Experiment 108530 PARAMETER Experiment Name: Zm_Imbibed_Seeds_P Parameter: Tissue Value: Aerial vs. Embryo
  misc_feature: MA Experiment ID: 108535 Result: Up-regulated in Transcription
  misc_feature: MA Experiment 108535 PARAMETER Experiment Name: Zm_Meristem_P Parameter: Age (day) Value: 8
  misc_feature: MA Experiment 108535 PARAMETER Experiment Name: Zm_Meristem_P Parameter: Organism Value: Zea mays
  misc_feature: MA Experiment 108535 PARAMETER Experiment Name: Zm_Meristem_P Parameter: Plant Line Value: 35A19
  misc_feature: MA Experiment 108535 PARAMETER Experiment Name: Zm_Meristem_P Parameter: Tissue Value: Root Meristem vs. Above Root Meristem
  misc_feature: MA Experiment ID: 108536 Result: Up-regulated in Transcription
  misc_feature: MA Experiment 108536 PARAMETER Experiment Name: Zm_Meristem_P Parameter: Age (day) Value: 8
  misc_feature: MA Experiment 108536 PARAMETER Experiment Name: Zm_Meristem_P Parameter: Organism Value: Zea mays
  misc_feature: MA Experiment 108536 PARAMETER Experiment Name: Zm_Meristem_P Parameter: Plant Line Value: 35A19
  misc_feature: MA Experiment 108536 PARAMETER Experiment Name: Zm_Meristem_P Parameter: Tissue Value: Shoot Meristem vs. Above Shoot Meristem
  misc_feature: MA Experiment ID: 108540 Result: Up-regulated in Transcription
  misc_feature: MA Experiment 108540 PARAMETER Experiment Name: Zm_20percent_PEG_P Parameter: Age (day) Value: 8
  misc_feature: MA Experiment 108540 PARAMETER Experiment Name: Zm_20percent_PEG_P Parameter: Organism Value: Zea mays
  misc_feature: MA Experiment 108540 PARAMETER Experiment Name: Zm_20percent_PEG_P Parameter: Plant Line Value: 35A19
  misc_feature: MA Experiment 108540 PARAMETER Experiment Name: Zm_20percent_PEG_P Parameter: Timepoint (hr) Value: 6
  misc_feature: MA Experiment 108540 PARAMETER Experiment Name: Zm_20percent_PEG_P Parameter: Tissue Value: Aerial
  misc_feature: MA Experiment 108540 PARAMETER Experiment Name: Zm_20percent_PEG_P Parameter: Treatment Value: 20percent PEG vs. No Treatment
  misc_feature: MA Experiment ID: 108542 Result: Up-regulated in Transcription
  misc_feature: MA Experiment 108542 PARAMETER Experiment Name: Zm_150mM_NaCl_P Parameter: Age (day) Value: 8
  misc_feature: MA Experiment 108542 PARAMETER Experiment Name: Zm_150mM_NaCl_P Parameter: Organism Value: Zea mays
  misc_feature: MA Experiment 108542 PARAMETER Experiment Name: Zm_150mM_NaCl_P Parameter: Plant Line Value: 35A19
  misc_feature: MA Experiment 108542 PARAMETER Experiment Name: Zm_150mM_NaCl_P Parameter: Timepoint (hr) Value: 6
  misc_feature: MA Experiment 108542 PARAMETER Experiment Name: Zm_150mM_NaCl_P Parameter: Tissue Value: Aerial
  misc_feature: MA Experiment 108542 PARAMETER Experiment Name: Zm_150mM_NaCl_P Parameter: Treatment Value: 150mM NaCl vs. No Treatment
  misc_feature: MA Experiment ID: 108543 Result: Up-regulated in Transcription
  misc_feature: MA Experiment ID: 108544 Result: Down-regulated in Transcription
  misc_feature: MA Experiment ID: 108545 Result: Down-regulated in Transcription
  misc_feature: MA Experiment 108545 PARAMETER Experiment Name: Zm_Imbibed_Seeds_P Parameter: Age (day) Value: 3 vs. 2
  misc_feature: MA Experiment 108545 PARAMETER Experiment Name: Zm_Imbibed_Seeds_P Parameter: Organism Value: Zea mays
  misc_feature: MA Experiment 108545 PARAMETER Experiment Name: Zm_Imbibed_Seeds_P Parameter: Plant Line Value: 35A19
  misc_feature: MA Experiment 108545 PARAMETER Experiment Name: Zm_Imbibed_Seeds_P Parameter: Tissue Value: Aerial vs. Embryo
  misc_feature: MA Experiment ID: 108556 Result: Up-regulated in Transcription
  misc_feature: MA Experiment 108556 PARAMETER Experiment Name: Zm_Drought_P Parameter: Age (day) Value: 9
  misc_feature: MA Experiment 108556 PARAMETER Experiment Name: Zm_Drought_P Parameter: Organism Value: Zea mays
  misc_feature: MA Experiment 108556 PARAMETER Experiment Name: Zm_Drought_P Parameter: Plant Line Value: 35A19
  misc_feature: MA Experiment 108556 PARAMETER Experiment Name: Zm_Drought_P Parameter: Timepoint (hr) Value: 24
  misc_feature: MA Experiment 108556 PARAMETER Experiment Name: Zm_Drought_P Parameter: Tissue Value: Aerial
  misc_feature: MA Experiment 108556 PARAMETER Experiment Name: Zm_Drought_P Parameter: Treatment Value: Drought vs. No Drought
  misc_feature: MA Experiment ID: 20000477 Result: Up-regulated in Transcription
  misc_feature: MA Experiment 20000477 PARAMETER Experiment Name: Zm_5mM_SA_P Parameter: Age (day) Value: 10
  misc_feature: MA Experiment 20000477 PARAMETER Experiment Name: Zm_5mM_SA_P Parameter: Organism Value: Zea mays
  misc_feature: MA Experiment 20000477 PARAMETER Experiment Name: Zm_5mM_SA_P Parameter: Plant Line Value: 35A19
  misc_feature: MA Experiment 20000477 PARAMETER Experiment Name: Zm_5mM_SA_P Parameter: Timepoint (hr) Value: 48
  misc_feature: MA Experiment 20000477 PARAMETER Experiment Name: Zm_5mM_SA_P Parameter: Tissue Value: Aerial
  misc_feature: MA Experiment 20000477 PARAMETER Experiment Name: Zm_5mM_SA_P Parameter: Treatment Value: 5mM SA vs. No Treatment
  misc_feature: MA Experiment ID: 20000478 Result: Up-regulated in Transcription
  misc_feature: MA Experiment 20000478 PARAMETER Experiment Name: Zm_5mM_SA_P Parameter: Age (day) Value: 11
  misc_feature: MA Experiment 20000478 PARAMETER Experiment Name: Zm_5mM_SA_P Parameter: Organism Value: Zea mays
  misc_feature: MA Experiment 20000478 PARAMETER Experiment Name: Zm_5mM_SA_P Parameter: Plant Line Value: 35A19
  misc_feature: MA Experiment 20000478 PARAMETER Experiment Name: Zm_5mM_SA_P Parameter: Timepoint (hr) Value: 72
  misc_feature: MA Experiment 20000478 PARAMETER Experiment Name: Zm_5mM_SA_P Parameter: Tissue Value: Aerial
  misc_feature: MA Experiment 20000478 PARAMETER Experiment Name: Zm_5mM_SA_P Parameter: Treatment Value: 5mM SA vs. No Treatment
  misc_feature: MA Experiment ID: 20000479 Result: Up-regulated in Transcription
  misc_feature: MA Experiment 20000479 PARAMETER Experiment Name: Zm_Drought_P Parameter: Age (day) Value: 10
  misc_feature: MA Experiment 20000479 PARAMETER Experiment Name: Zm_Drought_P Parameter: Organism Value: Zea mays
  misc_feature: MA Experiment 20000479 PARAMETER Experiment Name: Zm_Drought_P Parameter: Plant Line Value: 35A19
  misc_feature: MA Experiment 20000479 PARAMETER Experiment Name: Zm_Drought_P Parameter: Timepoint (hr) Value: 48
  misc_feature: MA Experiment 20000479 PARAMETER Experiment Name: Zm_Drought_P Parameter: Tissue Value: Aerial
  misc_feature: MA Experiment 20000479 PARAMETER Experiment Name: Zm_Drought_P Parameter: Treatment Value: Drought vs. No Drought
  misc_feature: MA Experiment ID: 20000480 Result: Up-regulated in Transcription
  misc_feature: MA Experiment 20000480 PARAMETER Experiment Name: Zm_Drought_P Parameter: Age (day) Value: 11
  misc_feature: MA Experiment 20000480 PARAMETER Experiment Name: Zm_Drought_P Parameter: Organism Value: Zea mays
  misc_feature: MA Experiment 20000480 PARAMETER Experiment Name: Zm_Drought_P Parameter: Plant Line Value: 35A19
  misc_feature: MA Experiment 20000480 PARAMETER Experiment Name: Zm_Drought_P Parameter: Timepoint (hr) Value: 72
  misc_feature: MA Experiment 20000480 PARAMETER Experiment Name: Zm_Drought_P Parameter: Tissue Value: Aerial
  misc_feature: MA Experiment 20000480 PARAMETER Experiment Name: Zm_Drought_P Parameter: Treatment Value: Drought vs. No Drought
  misc_feature: MA Experiment ID: 20000492 Result: Up-regulated in Transcription
  misc_feature: MA Experiment 20000492 PARAMETER Experiment Name: Zm_Hybrid_Seed_Dev_P Parameter: DAP Value: 12
  misc_feature: MA Experiment 20000492 PARAMETER Experiment Name: Zm_Hybrid_Seed_Dev_P Parameter: Organism Value: Zea mays
  misc_feature: MA Experiment 20000492 PARAMETER Experiment Name: Zm_Hybrid_Seed_Dev_P Parameter: Plant Line Value: 35A19
  misc_feature: MA Experiment 20000492 PARAMETER Experiment Name: Zm_Hybrid_Seed_Dev_P Parameter: Tissue Value: Fert Kernel vs. Unfert Floret
atcacgcactctgccagagaccaaactattcgtatcgtgcgtaggtgttgcttgctgttgcaacggaccatccatctagtgcttgcattgctgtcgcactcgctcagctatctccaccgctattggttgttgtttggttacccacgccctgctctctgataccagttgatagcagcagcagctagctataggttgtcagcaggatcgaccagatagatagcgcgcgcggatcggagttaacagcgctgcaggatggtgaagagcacgacgacgatgggggcggcgagctgcggcggcggcgtgctgccgctggcagtcgctgaaccacatcagcatcgtgtgccggtcggtggaggcgtcgctgcgcttctacacggatgtgctcggcttcgtccccatccgccgccccggctctttcgacttcggcggcgcctggctgttcaactacgggatcggcatccacctgctgcagtcggaggaccccggcagcctcccgccggagaagggagagatcaaccccaaggacaaccatatctccttccagtgcgagagcatggtggcggtggagcggcggctgaaggagatcggcatcccgtacgtgcagcgctgcgtggaggagggcggcatcaacgtggaccagatcttcttccacgaccccgacggcttcatgatcgagatctgcaactgcgacaacctccccgtcgtcccgctcgccggcgaccagcagcgcgcgccggccgcttgcaggcgggctccggcggcggtcaataccgtcaagcagcagcagcagggcagcgtggtgcctgcttcttccgctccggtcacgacggcggcggcgcagtgcatgccgtcggcggccacggcggcgcaagccatccgcgtcgccgaggagtcgtcgtcgcacatttcgtgcgcgtgattactagcttgttgacgacgacgccagcgcaaggattcggcgcggacggtgacgaagcaggcacgatggatcgacgagcgccgagtcacggccacaagaggcgtctctgtacatgcgcgtgcgtgcgtgcgtgggtgtaggtgctgtatgtgcagtgcactcaaactgcctagcttttttttagtaaagaataaacccatggtacggtgggagtgaagagactagtgcgtccactcc

SEQ ID NO: 718 - protein, 268 aa, Zea mays subsp. mays
  peptide (1)..(268): Ceres Seq. ID no. 12368538
MVKSTTTMGAASCGGGVLPLAVAEPHQHRVPVGGGVAALLHGCARLRPHPPPRLFRLRRRLAVQLRDRHPPAAVGGPRQPPAGEGRDQPQGQPYLLPVREHGGGGAAAEGDRHPVRAALRGGGRHQRGPDLLPRPRRLHDRDLQLRQPPRRPARRRPAARAGRLQAGSGGGQYRQAAAAGQRGACFFRSGHDGGGAVHAVGGHGGASHPRRRGVVVAHFVRVITSLLTTTPAQGFGADGDEAGTMDRRAPSHGHKRRLCTCACVRAWV

SEQ ID NO: 719 - protein, 261 aa, Zea mays subsp. mays
  peptide (1)..(261): Ceres Seq. ID no. 12368539
MGAASCGGGVLPLAVAEPHQHRVPVGGGVAALLHGCARLRPHPPPRLFRLRRRLAVQLRDRHPPAAVGGPRQPPAGEGRDQPQGQPYLLPVREHGGGGAAAEGDRHPVRAALRGGGRHQRGPDLLPRPRRLHDRDLQLRQPPRRPARRRPAARAGRLQAGSGGGQYRQAAAAGQRGACFFRSGHDGGGAVHAVGGHGGASHPRRRGVVVAHFVRVITSLLTTTPAQGFGADGDEAGTMDRRAPSHGHKRRLCTCACVRAWV

SEQ ID NO: 720 - DNA, 702 bp, Zea mays subsp. mays
  misc_feature (1)..(702): Ceres Seq. ID no. 13492969
  misc_feature: MA Experiment ID: 108515 Result: Down-regulated in Transcription
  misc_feature: MA Experiment 108515 PARAMETER Experiment Name: Zm_2mM_SA_P Parameter: Age (day) Value: 8
  misc_feature: MA Experiment 108515 PARAMETER Experiment Name: Zm_2mM_SA_P Parameter: Organism Value: Zea mays
  misc_feature: MA Experiment 108515 PARAMETER Experiment Name: Zm_2mM_SA_P Parameter: Plant Line Value: 35A19
  misc_feature: MA Experiment 108515 PARAMETER Experiment Name: Zm_2mM_SA_P Parameter: Timepoint (hr) Value: 12
  misc_feature: MA Experiment 108515 PARAMETER Experiment Name: Zm_2mM_SA_P Parameter: Tissue Value: Aerial
  misc_feature: MA Experiment 108515 PARAMETER Experiment Name: Zm_2mM_SA_P Parameter: Treatment Value: 2mM SA vs. No Treatment
  misc_feature: MA Experiment ID: 108523 Result: Down-regulated in Transcription
  misc_feature: MA Experiment 108523 PARAMETER Experiment Name: Zm_42deg_Heat_P Parameter: Age (day) Value: 8
  misc_feature: MA Experiment 108523 PARAMETER Experiment Name: Zm_42deg_Heat_P Parameter: Organism Value: Zea mays
  misc_feature: MA Experiment 108523 PARAMETER Experiment Name: Zm_42deg_Heat_P Parameter: Plant Line Value: 35A19
  misc_feature: MA Experiment 108523 PARAMETER Experiment Name: Zm_42deg_Heat_P Parameter: Temperature (deg C) Value: 42 vs. 22
  misc_feature: MA Experiment 108523 PARAMETER Experiment Name: Zm_42deg_Heat_P Parameter: Timepoint (hr) Value: 6
  misc_feature: MA Experiment 108523 PARAMETER Experiment Name: Zm_42deg_Heat_P Parameter: Tissue Value: Aerial
  misc_feature: MA Experiment ID: 108535 Result: Up-regulated in Transcription
  misc_feature: MA Experiment 108535 PARAMETER Experiment Name: Zm_Meristem_P Parameter: Age (day) Value: 8
  misc_feature: MA Experiment 108535 PARAMETER Experiment Name: Zm_Meristem_P Parameter: Organism Value: Zea mays
  misc_feature: MA Experiment 108535 PARAMETER Experiment Name: Zm_Meristem_P Parameter: Plant Line Value: 35A19
  misc_feature: MA Experiment 108535 PARAMETER Experiment Name: Zm_Meristem_P Parameter: Tissue Value: Root Meristem vs. Above Root Meristem
  misc_feature: MA Experiment ID: 108543 Result: Up-regulated in Transcription
  misc_feature: MA Experiment ID: 108544 Result: Down-regulated in Transcription
  misc_feature: MA Experiment ID: 108556 Result: Down-regulated in Transcription
  misc_feature: MA Experiment 108556 PARAMETER Experiment Name: Zm_Drought_P Parameter: Age (day) Value: 9
  misc_feature: MA Experiment 108556 PARAMETER Experiment Name: Zm_Drought_P Parameter: Organism Value: Zea mays
  misc_feature: MA Experiment 108556 PARAMETER Experiment Name: Zm_Drought_P Parameter: Plant Line Value: 35A19
  misc_feature: MA Experiment 108556 PARAMETER Experiment Name: Zm_Drought_P Parameter: Timepoint (hr) Value: 24
  misc_feature: MA Experiment 108556 PARAMETER Experiment Name: Zm_Drought_P Parameter: Tissue Value: Aerial
  misc_feature: MA Experiment 108556 PARAMETER Experiment Name: Zm_Drought_P Parameter: Treatment Value: Drought vs. No Drought
  misc_feature: MA Experiment ID: 108597 Result: Down-regulated in Transcription
  misc_feature: MA Experiment 108597 PARAMETER Experiment Name: Zm_100uM_ABA_P Parameter: Age (day) Value: 9
  misc_feature: MA Experiment 108597 PARAMETER Experiment Name: Zm_100uM_ABA_P Parameter: Organism Value: Zea mays
  misc_feature: MA Experiment 108597 PARAMETER Experiment Name: Zm_100uM_ABA_P Parameter: Plant Line Value: 35A19
  misc_feature: MA Experiment 108597 PARAMETER Experiment Name: Zm_100uM_ABA_P Parameter: Timepoint (hr) Value: 24
  misc_feature: MA Experiment 108597 PARAMETER Experiment Name: Zm_100uM_ABA_P Parameter: Tissue Value: Aerial
  misc_feature: MA Experiment 108597 PARAMETER Experiment Name: Zm_100uM_ABA_P Parameter: Treatment Value: 100uM ABA vs. No Treatment
  misc_feature: MA Experiment ID: 20000477 Result: Down-regulated in Transcription
  misc_feature: MA Experiment 20000477 PARAMETER Experiment Name: Zm_5mM_SA_P Parameter: Age (day) Value: 10
  misc_feature: MA Experiment 20000477 PARAMETER Experiment Name: Zm_5mM_SA_P Parameter: Organism Value: Zea mays
  misc_feature: MA Experiment 20000477 PARAMETER Experiment Name: Zm_5mM_SA_P Parameter: Plant Line Value: 35A19
  misc_feature: MA Experiment 20000477 PARAMETER Experiment Name: Zm_5mM_SA_P Parameter: Timepoint (hr) Value: 48
  misc_feature: MA Experiment 20000477 PARAMETER Experiment Name: Zm_5mM_SA_P Parameter: Tissue Value: Aerial
  misc_feature: MA Experiment 20000477 PARAMETER Experiment Name: Zm_5mM_SA_P Parameter: Treatment Value: 5mM SA vs. No Treatment
  misc_feature: MA Experiment ID: 20000478 Result: Down-regulated in Transcription
  misc_feature: MA Experiment 20000478 PARAMETER Experiment Name: Zm_5mM_SA_P Parameter: Age (day) Value: 11
  misc_feature: MA Experiment 20000478 PARAMETER Experiment Name: Zm_5mM_SA_P Parameter: Organism Value: Zea mays
  misc_feature: MA Experiment 20000478 PARAMETER Experiment Name: Zm_5mM_SA_P Parameter: Plant Line Value: 35A19
  misc_feature: MA Experiment 20000478 PARAMETER Experiment Name: Zm_5mM_SA_P Parameter: Timepoint (hr) Value: 72
  misc_feature: MA Experiment 20000478 PARAMETER Experiment Name: Zm_5mM_SA_P Parameter: Tissue Value: Aerial
  misc_feature: MA Experiment 20000478 PARAMETER Experiment Name: Zm_5mM_SA_P Parameter: Treatment Value: 5mM SA vs. No Treatment
  misc_feature: MA Experiment ID: 20000480 Result: Down-regulated in Transcription
  misc_feature: MA Experiment 20000480 PARAMETER Experiment Name: Zm_Drought_P Parameter: Age (day) Value: 11
  misc_feature: MA Experiment 20000480 PARAMETER Experiment Name: Zm_Drought_P Parameter: Organism Value: Zea mays
  misc_feature: MA Experiment 20000480 PARAMETER Experiment Name: Zm_Drought_P Parameter: Plant Line Value: 35A19
  misc_feature: MA Experiment 20000480 PARAMETER Experiment Name: Zm_Drought_P Parameter: Timepoint (hr) Value: 72
  misc_feature: MA Experiment 20000480 PARAMETER Experiment Name: Zm_Drought_P Parameter: Tissue Value: Aerial
  misc_feature: MA Experiment 20000480 PARAMETER Experiment Name: Zm_Drought_P Parameter: Treatment Value: Drought vs. No Drought
  misc_feature: MA Experiment ID: 20000487 Result: Down-regulated in Transcription
  misc_feature: MA Experiment 20000487 PARAMETER Experiment Name: Zm_50mM_NH4NO3_L_to_H_P Parameter: Organism Value: Zea mays
  misc_feature: MA Experiment 20000487 PARAMETER Experiment Name: Zm_50mM_NH4NO3_L_to_H_P Parameter: Timepoint (hr) Value: 4
  misc_feature: MA Experiment 20000487 PARAMETER Experiment Name: Zm_50mM_NH4NO3_L_to_H_P Parameter: Tissue Value: Leaves
  misc_feature: MA Experiment 20000487 PARAMETER Experiment Name: Zm_50mM_NH4NO3_L_to_H_P Parameter: Treatment Value: 50mM NH4NO3 vs. 100mM Mannitol
  misc_feature: MA Experiment ID: 20000626 Result: Down-regulated in Transcription
  misc_feature: MA Experiment 20000626 PARAMETER Experiment Name: Zm_Herbicide-Treatments_P Parameter: Timepoint (hr) Value: 12
  misc_feature: MA Experiment 20000626 PARAMETER Experiment Name: Zm_Herbicide-Treatments_P Parameter: Tissue Value: Aerial
  misc_feature: MA Experiment 20000626 PARAMETER Experiment Name: Zm_Herbicide-Treatments_P Parameter: Treatment Value: Roundup vs. No Treatment
  misc_feature: MA Experiment ID: 20000629 Result: Down-regulated in Transcription
  misc_feature: MA Experiment 20000629 PARAMETER Experiment Name: Zm_Herbicide-Treatments_P Parameter: Timepoint (hr) Value: 12
  misc_feature: MA Experiment 20000629 PARAMETER Experiment Name: Zm_Herbicide-Treatments_P Parameter: Tissue Value: Aerial
  misc_feature: MA Experiment 20000629 PARAMETER Experiment Name: Zm_Herbicide-Treatments_P Parameter: Treatment Value: Trimec vs. No Treatment
  misc_feature: MA Experiment ID: 20000633 Result: Down-regulated in Transcription
  misc_feature: MA Experiment 20000633 PARAMETER Experiment Name: Zm_Herbicide-Treatments_P Parameter: Timepoint (hr) Value: 4
  misc_feature: MA Experiment 20000633 PARAMETER Experiment Name: Zm_Herbicide-Treatments_P Parameter: Tissue Value: Aerial
  misc_feature: MA Experiment 20000633 PARAMETER Experiment Name: Zm_Herbicide-Treatments_P Parameter: Treatment Value: Trimec vs. No Treatment
ctaatcgaaaataatcaaaaaaaagcgccaccaatctcgccttccgaggaaacccaccagcccaccacagacccgagcggaagaagccatgtccgggcgcggcaagggtggcaaggggctcggcaagggcggcgcgaagcgtcaccggaaggttctgcgcgacaacatccagggcatcaccaagccggcgatccggcggctgggcgaggaggggcggcgtcaagcgcatctcggggctcatctacgaggagacccgcggcgtgctcaagatcttcctcgagaacgtcatccgcgacgccgtcacctacactgagcacgcccgccgcaagaccgtcactgccatggacgtcgtctacgcgctcaagcgccagggccgcaccctctacggcttcggcggctaggctgatggactcctcgcgatgttctccccttctgcagatgcgacgttttctggccgtgcccacaagtcttgcggtcaagaaagtttcaggaactcttgttagttcatctctggctgtggtaggtttatctgaatcgtgagactagtaggtttatctgaatcgcgaggccaggtttacctgaatcatgaagcagtgatgaaattatgtgtgcatcggatgttggaaatcgagcttgtaatgcaatttgttactcttgatgcaaatgaatggtctggtcgttacttctgtagttacgattttg

SEQ ID NO: 721 - protein, 179 aa, Zea mays subsp. mays
  peptide (1)..(179): Ceres Seq. ID no. 13492970
LIENNQKKAPPISPSEETHQPTTDPSGRSHVRARQGWQGARQGRREASPEGSARQHPGHHQAGDPAAGRGGAASSASRGSSTRRPAACSRSSSRTSSATPSPTLSTPAARPSLPWTSSTRSSARAAPSTASAARLMDSSRCSPLLQMRRFLAVPTSLAVKKVSGTLVSSSLAVVGLSES

SEQ ID NO: 722 - DNA, 802 bp, Zea mays subsp. mays
  misc_feature (1)..(802): Ceres Seq. ID no. 12404484
  misc_feature: MA Experiment ID: 108515 Result: Down-regulated in Transcription
  misc_feature: MA Experiment 108515 PARAMETER Experiment Name: Zm_2mM_SA_P Parameter: Age (day) Value: 8
  misc_feature: MA Experiment 108515 PARAMETER Experiment Name: Zm_2mM_SA_P Parameter: Organism Value: Zea mays
  misc_feature: MA Experiment 108515 PARAMETER Experiment Name: Zm_2mM_SA_P Parameter: Plant Line Value: 35A19
  misc_feature: MA Experiment 108515 PARAMETER Experiment Name: Zm_2mM_SA_P Parameter: Timepoint (hr) Value: 12
  misc_feature: MA Experiment 108515 PARAMETER Experiment Name: Zm_2mM_SA_P Parameter: Tissue Value: Aerial
  misc_feature: MA Experiment 108515 PARAMETER Experiment Name: Zm_2mM_SA_P Parameter: Treatment Value: 2mM SA vs. No Treatment
  misc_feature: MA Experiment ID: 108527 Result: Down-regulated in Transcription
  misc_feature: MA Experiment 108527 PARAMETER Experiment Name: Zm_5mM_NO_P Parameter: Age (day) Value: 8
  misc_feature: MA Experiment 108527 PARAMETER Experiment Name: Zm_5mM_NO_P Parameter: Organism Value: Zea mays
  misc_feature: MA Experiment 108527 PARAMETER Experiment Name: Zm_5mM_NO_P Parameter: Plant Line Value: 35A19
  misc_feature: MA Experiment 108527 PARAMETER Experiment Name: Zm_5mM_NO_P Parameter: Timepoint (hr) Value: 6
  misc_feature: MA Experiment 108527 PARAMETER Experiment Name: Zm_5mM_NO_P Parameter: Tissue Value: Aerial
  misc_feature: MA Experiment 108527 PARAMETER Experiment Name: Zm_5mM_NO_P Parameter: Treatment Value: 5mM NO vs. No Treatment
  misc_feature: MA Experiment ID: 108528 Result: Up-regulated in Transcription
  misc_feature: MA Experiment 108528 PARAMETER Experiment Name: Zm_Imbibed_Seeds_P Parameter: Age (day) Value: 5 vs. 2
  misc_feature: MA Experiment 108528 PARAMETER Experiment Name: Zm_Imbibed_Seeds_P Parameter: Organism Value: Zea mays
  misc_feature: MA Experiment 108528 PARAMETER Experiment Name: Zm_Imbibed_Seeds_P Parameter: Plant Line Value: 35A19
  misc_feature: MA Experiment 108528 PARAMETER Experiment Name: Zm_Imbibed_Seeds_P Parameter: Tissue Value: Aerial vs. Embryo
  misc_feature: MA Experiment ID: 108530 Result: Up-regulated in Transcription
  misc_feature: MA Experiment 108530 PARAMETER Experiment Name: Zm_Imbibed_Seeds_P Parameter: Age (day) Value: 6 vs. 2
  misc_feature: MA Experiment 108530 PARAMETER Experiment Name: Zm_Imbibed_Seeds_P Parameter: Organism Value: Zea mays
  misc_feature: MA Experiment 108530 PARAMETER Experiment Name: Zm_Imbibed_Seeds_P Parameter: Plant Line Value: 35A19
  misc_feature: MA Experiment 108530 PARAMETER Experiment Name: Zm_Imbibed_Seeds_P Parameter: Tissue Value: Aerial vs. Embryo
  misc_feature: MA Experiment ID: 108535 Result: Down-regulated in Transcription
  misc_feature: MA Experiment 108535 PARAMETER Experiment Name: Zm_Meristem_P Parameter: Age (day) Value: 8
  misc_feature: MA Experiment 108535 PARAMETER Experiment Name: Zm_Meristem_P Parameter: Organism Value: Zea mays
  misc_feature: MA Experiment 108535 PARAMETER Experiment Name: Zm_Meristem_P Parameter: Plant Line Value: 35A19
  misc_feature: MA Experiment 108535 PARAMETER Experiment Name: Zm_Meristem_P Parameter: Tissue Value: Root Meristem vs. Above Root Meristem
  misc_feature: MA Experiment ID: 108536 Result: Down-regulated in Transcription
  misc_feature: MA Experiment 108536 PARAMETER Experiment Name: Zm_Meristem_P Parameter: Age (day) Value: 8
  misc_feature: MA Experiment 108536 PARAMETER Experiment Name: Zm_Meristem_P Parameter: Organism Value: Zea mays
  misc_feature: MA Experiment 108536 PARAMETER Experiment Name: Zm_Meristem_P Parameter: Plant Line Value: 35A19
  misc_feature: MA Experiment 108536 PARAMETER Experiment Name: Zm_Meristem_P Parameter: Tissue Value: Shoot Meristem vs. Above Shoot Meristem
  misc_feature: MA Experiment ID: 108545 Result: Up-regulated in Transcription
  misc_feature: MA Experiment 108545 PARAMETER Experiment Name: Zm_Imbibed_Seeds_P Parameter: Age (day) Value: 3 vs. 2
  misc_feature: MA Experiment 108545 PARAMETER Experiment Name: Zm_Imbibed_Seeds_P Parameter: Organism Value: Zea mays
  misc_feature: MA Experiment 108545 PARAMETER Experiment Name: Zm_Imbibed_Seeds_P Parameter: Plant Line Value: 35A19
  misc_feature: MA Experiment 108545 PARAMETER Experiment Name: Zm_Imbibed_Seeds_P Parameter: Tissue Value: Aerial vs. Embryo
  misc_feature: MA Experiment ID: 108547 Result: Up-regulated in Transcription
  misc_feature: MA Experiment 108547 PARAMETER Experiment Name: Zm_Imbibed_Seeds_P Parameter: Age (day) Value: 4 vs. 2
  misc_feature: MA Experiment 108547 PARAMETER Experiment Name: Zm_Imbibed_Seeds_P Parameter: Organism Value: Zea mays
  misc_feature: MA Experiment 108547 PARAMETER Experiment Name: Zm_Imbibed_Seeds_P Parameter: Plant Line Value: 35A19
  misc_feature: MA Experiment 108547 PARAMETER Experiment Name: Zm_Imbibed_Seeds_P Parameter: Tissue Value: Aerial vs. Embryo
  misc_feature: MA Experiment ID: 108556 Result: Down-regulated in Transcription
  misc_feature: MA Experiment 108556 PARAMETER Experiment Name: Zm_Drought_P Parameter: Age (day) Value: 9
  misc_feature: MA Experiment 108556 PARAMETER Experiment Name: Zm_Drought_P Parameter: Organism Value: Zea mays
  misc_feature: MA Experiment 108556 PARAMETER Experiment Name: Zm_Drought_P Parameter: Plant Line Value: 35A19
  misc_feature: MA Experiment 108556 PARAMETER Experiment Name: Zm_Drought_P Parameter: Timepoint (hr) Value: 24
  misc_feature: MA Experiment 108556 PARAMETER Experiment Name: Zm_Drought_P Parameter: Tissue Value: Aerial
  misc_feature: MA Experiment 108556 PARAMETER Experiment Name: Zm_Drought_P Parameter: Treatment Value: Drought vs. No Drought
  misc_feature: MA Experiment ID: 108559 Result: Down-regulated in Transcription
  misc_feature: MA Experiment 108559 PARAMETER Experiment Name: Zm_5mM_NO_P Parameter: Age (day) Value: 8
  misc_feature: MA Experiment 108559 PARAMETER Experiment Name: Zm_5mM_NO_P Parameter: Organism Value: Zea mays
  misc_feature: MA Experiment 108559 PARAMETER Experiment Name: Zm_5mM_NO_P Parameter: Plant Line Value: 35A19
  misc_feature: MA Experiment 108559 PARAMETER Experiment Name: Zm_5mM_NO_P Parameter: Timepoint (hr) Value: 12
  misc_feature: MA Experiment 108559 PARAMETER Experiment Name: Zm_5mM_NO_P Parameter: Tissue Value: Aerial
  misc_feature: MA Experiment 108559 PARAMETER Experiment Name: Zm_5mM_NO_P Parameter: Treatment Value: 5mM NO vs. No Treatment
  misc_feature: MA Experiment ID: 108597 Result: Down-regulated in Transcription
  misc_feature: MA Experiment 108597 PARAMETER Experiment Name: Zm_100uM_ABA_P Parameter: Age (day) Value: 9
  misc_feature: MA Experiment 108597 PARAMETER Experiment Name: Zm_100uM_ABA_P Parameter: Organism Value: Zea mays
  misc_feature: MA Experiment 108597 PARAMETER Experiment Name: Zm_100uM_ABA_P Parameter: Plant Line Value: 35A19
  misc_feature: MA Experiment 108597 PARAMETER Experiment Name: Zm_100uM_ABA_P Parameter: Timepoint (hr) Value: 24
  misc_feature: MA Experiment 108597 PARAMETER Experiment Name: Zm_100uM_ABA_P Parameter: Tissue Value: Aerial
  misc_feature: MA Experiment 108597 PARAMETER Experiment Name: Zm_100uM_ABA_P Parameter: Treatment Value: 100uM ABA vs. No Treatment
  misc_feature: MA Experiment ID: 108687 Result: Down-regulated in Transcription
  misc_feature: MA Experiment 108687 PARAMETER Experiment Name: Zm_Embryos-Flowers__P Parameter: Tissue Value: Embryo vs. Aerial+
  misc_feature: MA Experiment ID: 108688 Result: Down-regulated in Transcription
  misc_feature: MA Experiment 108688 PARAMETER Experiment Name: Zm_Embryos-Flowers__P Parameter: Tissue Value: Immature Flowers vs. Aerial+
  misc_feature: MA Experiment ID: 20000477 Result: Down-regulated in Transcription
  misc_feature: MA Experiment 20000477 PARAMETER Experiment Name: Zm_5mM_SA_P Parameter: Age (day) Value: 10
  misc_feature: MA Experiment 20000477 PARAMETER Experiment Name: Zm_5mM_SA_P Parameter: Organism Value: Zea mays
  misc_feature: MA Experiment 20000477 PARAMETER Experiment Name: Zm_5mM_SA_P Parameter: Plant Line Value: 35A19
  misc_feature: MA Experiment 20000477 PARAMETER Experiment Name: Zm_5mM_SA_P Parameter: Timepoint (hr) Value: 48
  misc_feature: MA Experiment 20000477 PARAMETER Experiment Name: Zm_5mM_SA_P Parameter: Tissue Value: Aerial
  misc_feature: MA Experiment 20000477 PARAMETER Experiment Name: Zm_5mM_SA_P Parameter: Treatment Value: 5mM SA vs. No Treatment
  misc_feature: MA Experiment ID: 20000478 Result: Down-regulated in Transcription
  misc_feature: MA Experiment 20000478 PARAMETER Experiment Name: Zm_5mM_SA_P Parameter: Age (day) Value: 11
  misc_feature: MA Experiment 20000478 PARAMETER Experiment Name: Zm_5mM_SA_P Parameter: Organism Value: Zea mays
  misc_feature: MA Experiment 20000478 PARAMETER Experiment Name: Zm_5mM_SA_P Parameter: Plant Line Value: 35A19
  misc_feature: MA Experiment 20000478 PARAMETER Experiment Name: Zm_5mM_SA_P Parameter: Timepoint (hr) Value: 72
  misc_feature: MA Experiment 20000478 PARAMETER Experiment Name: Zm_5mM_SA_P Parameter: Tissue Value: Aerial
  misc_feature: MA Experiment 20000478 PARAMETER Experiment Name: Zm_5mM_SA_P Parameter: Treatment Value: 5mM SA vs. No Treatment
  misc_feature: MA Experiment ID: 20000479 Result: Down-regulated in Transcription
  misc_feature: MA Experiment 20000479 PARAMETER Experiment Name: Zm_Drought_P Parameter: Age (day) Value: 10
  misc_feature: MA Experiment 20000479 PARAMETER Experiment Name: Zm_Drought_P Parameter: Organism Value: Zea mays
  misc_feature: MA Experiment 20000479 PARAMETER Experiment Name: Zm_Drought_P Parameter: Plant Line Value: 35A19
  misc_feature: MA Experiment 20000479 PARAMETER Experiment Name: Zm_Drought_P Parameter: Timepoint (hr) Value: 48
  misc_feature: MA Experiment 20000479 PARAMETER Experiment Name: Zm_Drought_P Parameter: Tissue Value: Aerial
  misc_feature: MA Experiment 20000479 PARAMETER Experiment Name: Zm_Drought_P Parameter: Treatment Value: Drought vs. No Drought
  misc_feature: MA Experiment ID: 20000480 Result: Down-regulated in Transcription
  misc_feature: MA Experiment 20000480 PARAMETER Experiment Name: Zm_Drought_P Parameter: Age (day) Value: 11
  misc_feature: MA Experiment 20000480 PARAMETER Experiment Name: Zm_Drought_P Parameter: Organism Value: Zea mays
  misc_feature: MA Experiment 20000480 PARAMETER Experiment Name: Zm_Drought_P Parameter: Plant Line Value: 35A19
  misc_feature: MA Experiment 20000480 PARAMETER Experiment Name: Zm_Drought_P Parameter: Timepoint (hr) Value: 72
  misc_feature: MA Experiment 20000480 PARAMETER Experiment Name: Zm_Drought_P Parameter: Tissue Value: Aerial
  misc_feature: MA Experiment 20000480 PARAMETER Experiment Name: Zm_Drought_P Parameter: Treatment Value: Drought vs. No Drought
  misc_feature: MA Experiment ID: 20000492 Result: Up-regulated in Transcription
  misc_feature: MA Experiment 20000492 PARAMETER Experiment Name: Zm_Hybrid_Seed_Dev_P Parameter: DAP Value: 12
  misc_feature: MA Experiment 20000492 PARAMETER Experiment Name: Zm_Hybrid_Seed_Dev_P Parameter: Organism Value: Zea mays
  misc_feature: MA Experiment 20000492 PARAMETER Experiment Name: Zm_Hybrid_Seed_Dev_P Parameter: Plant Line Value: 35A19
  misc_feature: MA Experiment 20000492 PARAMETER Experiment Name: Zm_Hybrid_Seed_Dev_P Parameter: Tissue Value: Fert Kernel vs. Unfert Floret
  misc_feature: MA Experiment ID: 20000534 Result: Down-regulated in Transcription
  misc_feature: MA Experiment 20000534 PARAMETER Experiment Name: Zm_Hybrid_Pollen_P Parameter: Age (day) Value: 8
  misc_feature: MA Experiment 20000534 PARAMETER Experiment Name: Zm_Hybrid_Pollen_P Parameter: Organism Value: Zea mays
  misc_feature: MA Experiment 20000534 PARAMETER Experiment Name: Zm_Hybrid_Pollen_P Parameter: Plant Line Value: 35A19
  misc_feature: MA Experiment 20000534 PARAMETER Experiment Name: Zm_Hybrid_Pollen_P Parameter: Tissue Value: Pollen vs. Aerial
  misc_feature: MA Experiment ID: 20000535 Result: Up-regulated in Transcription
  misc_feature: MA Experiment 20000535 PARAMETER Experiment Name: Zm_Hybrid_Seed_Dev_P Parameter: DAP Value: 30 vs. 12
  misc_feature: MA Experiment 20000535 PARAMETER Experiment Name: Zm_Hybrid_Seed_Dev_P Parameter: Organism Value: Zea mays
  misc_feature: MA Experiment 20000535 PARAMETER Experiment Name: Zm_Hybrid_Seed_Dev_P Parameter: Plant Line Value: 35A19
  misc_feature: MA Experiment 20000535 PARAMETER Experiment Name: Zm_Hybrid_Seed_Dev_P Parameter: Tissue Value: Embryo vs. Unfert Floret
  misc_feature: MA Experiment ID: 20000626 Result: Down-regulated in Transcription
  misc_feature: MA Experiment 20000626 PARAMETER Experiment Name: Zm_Herbicide-Treatments_P Parameter: Timepoint (hr) Value: 12
  misc_feature: MA Experiment 20000626 PARAMETER Experiment Name: Zm_Herbicide-Treatments_P Parameter: Tissue Value: Aerial
  misc_feature: MA Experiment 20000626 PARAMETER Experiment Name: Zm_Herbicide-Treatments_P Parameter: Treatment Value: Roundup vs. No Treatment
aacggcagtcgtcacaccacgaaagcagcagcaaagtcatcagcaacccacgatcggtcgatcgatcgggtacctgctagcgaattcgatcgatcgggtacctgctgctagcgatagcagcagcagccagcagatcccgtcgtcgccggcacgatggccagcccgtcgtcgtcgtcgtcgtcagctctggtctcctcgtggtggttctagccgcggcggtggcgtgctccgcgacgcgccccgtccccgcgcggcagcgggcggcggcggcggaggaggaggtgagacggccggacacgctgcacgagggcacggtgctgatcccggggatggggcgctacgagatcggcagccactacatcccggacatcggcgggctggaccacagcgtccccgccgccacccacgggcagtacatccccggcgccgacgacacctgggtgcccaaccccggcttcgaggtccccaaccccttccgccccggcgcggccactccatgaacacgtacgagtacgaccccccaacgccggagaactcgatcgatcatatcgtctcgcgccgcgctgaataacgctacactagccgtgcttgtgcttgtgcttggctgctgaatgcaagcatgtcctttgttgtgtggtttaatttgtcccacgtacgtctgtgcagtgtttttgcagtttgtgctccagtgaagaagtgtgcacgcgcgatgcgtagaaagcgcatcagaactttgcatggcccggttggtagcagctgcttgtttctcggtcactactgttacaaataaaatttgctggac

SEQ ID NO: 723 - protein, 189 aa, Zea mays subsp. mays
  peptide (1)..(189): Ceres Seq. ID no. 12404485
TAVVTPRKQQQSHQQPTIGRSIGYLLANSIDRVPAASDSSSSQQIPSSPARWPARRRRRRQLWSPRGGSSRGGGVLRDAPRPRAAAGGGGGGGGETAGHAARGHGADPGDGALRDRQPLHPGHRRAGPQRPRRHPRAVHPRRRRHLGAQPRLRGPQPLPPRRGHSMNTYEYDPPTPENSIDHIVSRRAE

SEQ ID NO: 724 - DNA, 670 bp, Zea mays subsp. mays
  misc_feature (1)..(670): Ceres Seq. ID no. 13565500
  misc_feature: MA Experiment ID: 108528 Result: Up-regulated in Transcription
  misc_feature: MA Experiment 108528 PARAMETER Experiment Name: Zm_Imbibed_Seeds_P Parameter: Age (day) Value: 5 vs. 2
  misc_feature: MA Experiment 108528 PARAMETER Experiment Name: Zm_Imbibed_Seeds_P Parameter: Organism Value: Zea mays
  misc_feature: MA Experiment 108528 PARAMETER Experiment Name: Zm_Imbibed_Seeds_P Parameter: Plant Line Value: 35A19
  misc_feature: MA Experiment 108528 PARAMETER Experiment Name: Zm_Imbibed_Seeds_P Parameter: Tissue Value: Aerial vs. Embryo
  misc_feature: MA Experiment ID: 108536 Result: Down-regulated in Transcription
  misc_feature: MA Experiment 108536 PARAMETER Experiment Name: Zm_Meristem_P Parameter: Age (day) Value: 8
  misc_feature: MA Experiment 108536 PARAMETER Experiment Name: Zm_Meristem_P Parameter: Organism Value: Zea mays
  misc_feature: MA Experiment 108536 PARAMETER Experiment Name: Zm_Meristem_P Parameter: Plant Line Value: 35A19
  misc_feature: MA Experiment 108536 PARAMETER Experiment Name: Zm_Meristem_P Parameter: Tissue Value: Shoot Meristem vs. Above Shoot Meristem
  misc_feature: MA Experiment ID: 108545 Result: Up-regulated in Transcription
  misc_feature: MA Experiment 108545 PARAMETER Experiment Name: Zm_Imbibed_Seeds_P Parameter: Age (day) Value: 3 vs. 2
  misc_feature: MA Experiment 108545 PARAMETER Experiment Name: Zm_Imbibed_Seeds_P Parameter: Organism Value: Zea mays
  misc_feature: MA Experiment 108545 PARAMETER Experiment Name: Zm_Imbibed_Seeds_P Parameter: Plant Line Value: 35A19
  misc_feature: MA Experiment 108545 PARAMETER Experiment Name: Zm_Imbibed_Seeds_P Parameter: Tissue Value: Aerial vs. Embryo
  misc_feature: MA Experiment ID: 108547 Result: Up-regulated in Transcription
  misc_feature: MA Experiment 108547 PARAMETER Experiment Name: Zm_Imbibed_Seeds_P Parameter: Age (day) Value: 4 vs. 2
  misc_feature: MA Experiment 108547 PARAMETER Experiment Name: Zm_Imbibed_Seeds_P Parameter: Organism Value: Zea mays
  misc_feature: MA Experiment 108547 PARAMETER Experiment Name: Zm_Imbibed_Seeds_P Parameter: Plant Line Value: 35A19
  misc_feature: MA Experiment 108547 PARAMETER Experiment Name: Zm_Imbibed_Seeds_P Parameter: Tissue Value: Aerial vs. Embryo
  misc_feature: MA Experiment ID: 108556 Result: Down-regulated in Transcription
  misc_feature: MA Experiment 108556 PARAMETER Experiment Name: Zm_Drought_P Parameter: Age (day) Value: 9
  misc_feature: MA Experiment 108556 PARAMETER Experiment Name: Zm_Drought_P Parameter: Organism Value: Zea mays
  misc_feature: MA Experiment 108556 PARAMETER Experiment Name: Zm_Drought_P Parameter: Plant Line Value: 35A19
  misc_feature: MA Experiment 108556 PARAMETER Experiment Name: Zm_Drought_P Parameter: Timepoint (hr) Value: 24
  misc_feature: MA Experiment 108556 PARAMETER Experiment Name: Zm_Drought_P Parameter: Tissue Value: Aerial
  misc_feature: MA Experiment 108556 PARAMETER Experiment Name: Zm_Drought_P Parameter: Treatment Value: Drought vs. No Drought
  misc_feature: MA Experiment ID: 108597 Result: Down-regulated in Transcription
  misc_feature: MA Experiment 108597 PARAMETER Experiment Name: Zm_100uM_ABA_P Parameter: Age (day) Value: 9
  misc_feature: MA Experiment 108597 PARAMETER Experiment Name: Zm_100uM_ABA_P Parameter: Organism Value: Zea mays
  misc_feature: MA Experiment 108597 PARAMETER Experiment Name: Zm_100uM_ABA_P Parameter: Plant Line Value: 35A19
  misc_feature: MA Experiment 108597 PARAMETER Experiment Name: Zm_100uM_ABA_P Parameter: Timepoint (hr) Value: 24
  misc_feature: MA Experiment 108597 PARAMETER Experiment Name: Zm_100uM_ABA_P Parameter: Tissue Value: Aerial
  misc_feature: MA Experiment 108597 PARAMETER Experiment Name: Zm_100uM_ABA_P Parameter: Treatment Value: 100uM ABA vs. No Treatment
  misc_feature: MA Experiment ID: 20000477 Result: Down-regulated in Transcription
  misc_feature: MA Experiment 20000477 PARAMETER Experiment Name: Zm_5mM_SA_P Parameter: Age (day) Value: 10
  misc_feature: MA Experiment 20000477 PARAMETER Experiment Name: Zm_5mM_SA_P Parameter: Organism Value: Zea mays
  misc_feature: MA Experiment 20000477 PARAMETER Experiment Name: Zm_5mM_SA_P Parameter: Plant Line Value: 35A19
  misc_feature: MA Experiment 20000477 PARAMETER Experiment Name: Zm_5mM_SA_P Parameter: Timepoint (hr) Value: 48
  misc_feature: MA Experiment 20000477 PARAMETER Experiment Name: Zm_5mM_SA_P Parameter: Tissue Value: Aerial
  misc_feature: MA Experiment 20000477 PARAMETER Experiment Name: Zm_5mM_SA_P Parameter: Treatment Value: 5mM SA vs. No Treatment
  misc_feature: MA Experiment ID: 20000480 Result: Down-regulated in Transcription
  misc_feature: MA Experiment 20000480 PARAMETER Experiment Name: Zm_Drought_P Parameter: Age (day) Value: 11
  misc_feature: MA Experiment 20000480 PARAMETER Experiment Name: Zm_Drought_P Parameter: Organism Value: Zea mays
  misc_feature: MA Experiment 20000480 PARAMETER Experiment Name: Zm_Drought_P Parameter: Plant Line Value: 35A19
  misc_feature: MA Experiment 20000480 PARAMETER Experiment Name: Zm_Drought_P Parameter: Timepoint (hr) Value: 72
  misc_feature: MA Experiment 20000480 PARAMETER Experiment Name: Zm_Drought_P Parameter: Tissue Value: Aerial
  misc_feature: MA Experiment 20000480 PARAMETER Experiment Name: Zm_Drought_P Parameter: Treatment Value: Drought vs. No Drought
  misc_feature: MA Experiment ID: 20000534 Result: Up-regulated in Transcription
  misc_feature: MA Experiment 20000534 PARAMETER Experiment Name: Zm_Hybrid_Pollen_P Parameter: Age (day) Value: 8
  misc_feature: MA Experiment 20000534 PARAMETER Experiment Name: Zm_Hybrid_Pollen_P Parameter: Organism Value: Zea mays
  misc_feature: MA Experiment 20000534 PARAMETER Experiment Name: Zm_Hybrid_Pollen_P Parameter: Plant Line Value: 35A19
  misc_feature: MA Experiment 20000534 PARAMETER Experiment Name: Zm_Hybrid_Pollen_P Parameter: Tissue Value: Pollen vs. Aerial
ccaacgccgctcctgccatcaccttcttcgatcgatcgccttcgtcgtccccccacatccttcttgattgttatttctccaactcccaggccggcaggtcggaggacatgagcaaccagccaaccatggcggcggcccccgtgcgcgcttgggtgctggtgctggcgctggcgctggcgtgcgggctgctccagctccggccgtccgacgccgcggcgccagcccagccggttgcggtggcggcaacgatggtgtcgtcgggcgccgcgaagcccaagtgcgtgcccggcgccaagaacgacaaggcgtgccgcgtcggtgccgtgcacgacccggagaaccaggaggaggagggctccagcgtcaccctcaaggcgcccgccgccgcgcccgacgacagcgacggcagcgactacaacgaccccgacgagcccaacgacaaccagctcatcgtcgtcggccactgaagctgccgcgcgccgacccatggatcatgcatggagattcgactgggtggatggagtggaccggccggttaacggatctctcggtgctaattcgtgatcttgaccggtggaagcagatggggtttgcatgtttgtttcattcttgcattgattgttcgttgttaactagtgtatgatgaatcggtcgttaacgcttattaatc

SEQ ID NO: 725 - protein, 154 aa, Zea mays subsp. mays
  peptide (1)..(154): Ceres Seq. ID no. 13565501
NAAPAITFFDRSPSSSPHILLDCYFSNSQAGRSEDMSNQPTMAAAPVRAWVLVLALALACGLLQLRPSDAAAPAQPVAVAATMVSSGAAKPKCVPGAKNDKACRVGAVHDPENQEEEGSSVTLKAPAAAPDDSDGSDYNDPDEPNDNQLIVVGH

SEQ ID NO: 726 - protein, 119 aa, Zea mays subsp. mays
  peptide (1)..(119): Ceres Seq. ID no. 13565502
MSNQPTMAAAPVRAWVLVLALALACGLLQLRPSDAAAPAQPVAVAATMVSSGAAKPKCVPGAKNDKACRVGAVHDPENQEEEGSSVTLKAPAAAPDDSDGSDYNDPDEPNDNQLIVVGH

SEQ ID NO: 727 - protein, 113 aa, Zea mays subsp. mays
  peptide (1)..(113): Ceres Seq. ID no. 13565503
MAAAPVRAWVLVLALALACGLLQLRPSDAAAPAQPVAVAATMVSSGAAKPKCVPGAKNDKACRVGAVHDPENQEEEGSSVTLKAPAAAPDDSDGSDYNDPDEPNDNQLIVVGH

SEQ ID NO: 728 - DNA, 1032 bp, Zea mays subsp. mays
  misc_feature (1)..(1032): Ceres Seq. ID no. 12409749
  misc_feature: MA Experiment ID: 108527 Result: Up-regulated in Transcription
  misc_feature: MA Experiment 108527 PARAMETER Experiment Name: Zm_5mM_NO_P Parameter: Age (day) Value: 8
  misc_feature: MA Experiment 108527 PARAMETER Experiment Name: Zm_5mM_NO_P Parameter: Organism Value: Zea mays
  misc_feature: MA Experiment 108527 PARAMETER Experiment Name: Zm_5mM_NO_P Parameter: Plant Line Value: 35A19
  misc_feature: MA Experiment 108527 PARAMETER Experiment Name: Zm_5mM_NO_P Parameter: Timepoint (hr) Value: 6
  misc_feature: MA Experiment 108527 PARAMETER Experiment Name: Zm_5mM_NO_P Parameter: Tissue Value: Aerial
  misc_feature: MA Experiment 108527 PARAMETER Experiment Name: Zm_5mM_NO_P Parameter: Treatment Value: 5mM NO vs. No Treatment
  misc_feature: MA Experiment ID: 108528 Result: Down-regulated in Transcription
  misc_feature: MA Experiment 108528 PARAMETER Experiment Name: Zm_Imbibed_Seeds_P Parameter: Age (day) Value: 5 vs. 2
  misc_feature: MA Experiment 108528 PARAMETER Experiment Name: Zm_Imbibed_Seeds_P Parameter: Organism Value: Zea mays
  misc_feature: MA Experiment 108528 PARAMETER Experiment Name: Zm_Imbibed_Seeds_P Parameter: Plant Line Value: 35A19
  misc_feature: MA Experiment 108528 PARAMETER Experiment Name: Zm_Imbibed_Seeds_P Parameter: Tissue Value: Aerial vs. Embryo
  misc_feature: MA Experiment ID: 108530 Result: Down-regulated in Transcription
  misc_feature: MA Experiment 108530 PARAMETER Experiment Name: Zm_Imbibed_Seeds_P Parameter: Age (day) Value: 6 vs. 2
  misc_feature: MA Experiment 108530 PARAMETER Experiment Name: Zm_Imbibed_Seeds_P Parameter: Organism Value: Zea mays
  misc_feature: MA Experiment 108530 PARAMETER Experiment Name: Zm_Imbibed_Seeds_P Parameter: Plant Line Value: 35A19
  misc_feature: MA Experiment 108530 PARAMETER Experiment Name: Zm_Imbibed_Seeds_P Parameter: Tissue Value: Aerial vs. Embryo
  misc_feature: MA Experiment ID: 108543 Result: Up-regulated in Transcription
  misc_feature: MA Experiment ID: 108544 Result: Up-regulated in Transcription
  misc_feature: MA Experiment ID: 20000477 Result: Up-regulated in Transcription
  misc_feature: MA Experiment 20000477 PARAMETER Experiment Name: Zm_5mM_SA_P Parameter: Age (day) Value: 10
  misc_feature: MA Experiment 20000477 PARAMETER Experiment Name: Zm_5mM_SA_P Parameter: Organism Value: Zea mays
  misc_feature: MA Experiment 20000477 PARAMETER Experiment Name: Zm_5mM_SA_P Parameter: Plant Line Value: 35A19
  misc_feature: MA Experiment 20000477 PARAMETER Experiment Name: Zm_5mM_SA_P Parameter: Timepoint (hr) Value: 48
  misc_feature: MA Experiment 20000477 PARAMETER Experiment Name: Zm_5mM_SA_P Parameter: Tissue Value: Aerial
  misc_feature: MA Experiment 20000477 PARAMETER Experiment Name: Zm_5mM_SA_P Parameter: Treatment Value: 5mM SA vs. No Treatment
  misc_feature: MA Experiment ID: 20000488 Result: Up-regulated in Transcription
  misc_feature: MA Experiment 20000488 PARAMETER Experiment Name: Zm_50mM_NH4NO3_L_to_H_P Parameter: Organism Value: Zea mays
  misc_feature: MA Experiment 20000488 PARAMETER Experiment Name: Zm_50mM_NH4NO3_L_to_H_P Parameter: Timepoint (hr) Value: 8
  misc_feature: MA Experiment 20000488 PARAMETER Experiment Name: Zm_50mM_NH4NO3_L_to_H_P Parameter: Tissue Value: Leaves
  misc_feature: MA Experiment 20000488 PARAMETER Experiment Name: Zm_50mM_NH4NO3_L_to_H_P Parameter: Treatment Value: 50mM NH4NO3 vs. 100mM Mannitol
  misc_feature: MA Experiment ID: 20000535 Result: Down-regulated in Transcription
  misc_feature: MA Experiment 20000535 PARAMETER Experiment Name: Zm_Hybrid_Seed_Dev_P Parameter: DAP Value: 30 vs. 12
  misc_feature: MA Experiment 20000535 PARAMETER Experiment Name: Zm_Hybrid_Seed_Dev_P Parameter: Organism Value: Zea mays
  misc_feature: MA Experiment 20000535 PARAMETER Experiment Name: Zm_Hybrid_Seed_Dev_P Parameter: Plant Line Value: 35A19
  misc_feature: MA Experiment 20000535 PARAMETER Experiment Name: Zm_Hybrid_Seed_Dev_P Parameter: Tissue Value: Embryo vs. Unfert Floret
  misc_feature: MA Experiment ID: 20000626 Result: Up-regulated in Transcription
  misc_feature: MA Experiment 20000626 PARAMETER Experiment Name: Zm_Herbicide-Treatments_P Parameter: Timepoint (hr) Value: 12
  misc_feature: MA Experiment 20000626 PARAMETER Experiment Name: Zm_Herbicide-Treatments_P Parameter: Tissue Value: Aerial
  misc_feature: MA Experiment 20000626 PARAMETER Experiment Name: Zm_Herbicide-Treatments_P Parameter: Treatment Value: Roundup vs. No Treatment
  misc_feature: MA Experiment ID: 20001606 Result: Up-regulated in Transcription
  misc_feature: MA Experiment 20001606 PARAMETER Experiment Name: Zm_50ppm_KNO3_L-to-H_P Parameter: Age (day) Value: 19
  misc_feature: MA Experiment 20001606 PARAMETER Experiment Name: Zm_50ppm_KNO3_L-to-H_P Parameter: Organism Value: Zea mays
  misc_feature: MA Experiment 20001606 PARAMETER Experiment Name: Zm_50ppm_KNO3_L-to-H_P Parameter: Plant Line Value: 35A19
  misc_feature: MA Experiment 20001606 PARAMETER Experiment Name: Zm_50ppm_KNO3_L-to-H_P Parameter: Timepoint (hr) Value: 8
  misc_feature: MA Experiment 20001606 PARAMETER Experiment Name: Zm_50ppm_KNO3_L-to-H_P Parameter: Tissue Value: Shoots
  misc_feature: MA Experiment 20001606 PARAMETER Experiment Name: Zm_50ppm_KNO3_L-to-H_P Parameter: Treatment Value: 50ppm KNO3 vs. 50ppm KCl
aatgtcaaaagaacccgcagcagggaagactgagagtctgggagatagagagaggagagggagggtttcctcaaagagaacccgaacccaaacccaaaccgaagcagagcacactagcgttccctcaccagggcgtccatcccagcagccatggcgatggcgtacaagatggcgacggaggggatgaacgtgaaggaggagtgccagcgctggttcatggagatgaagtggaagaaggtgcaccgcttcgtggtgtacaagatcgacgagcggtcgcgcgccgtgctggtggacaaggtgggcggccccggggaagggtacgaggagctcgtggccgcgctgcccggcgacgactgccgctacgccgtcttcgacttcgacttcgtcaccgtcgacaactgccagaagagcaagatcttcttcatcgcctggtcaccggcggcgtcgaggatcagggccaagatcctgtacgcgacatcgaagcaaggcctgcggcggctgctggacggggtccactacgaggtgcaggccaccgacccctccgagatgggcttcgacgtcatcagaggccgcgcgcaatgaggcccccgctgcgctctgctcctatttacgtacttacctgtgcgtgggcgtgttctcctactactcactgctcagtagtcagtagtcatctgcgttcgtgtgtgtgtgtgtgtgatcggccggatgctaattggcgttggtgtgctcccgtagcgatcgatgctgccaatctgacgaggcttcgcgtgtgtttgctttgctattttcggttctcgggagagatggtgcaggcgtggtgtgttgatgttgatgggtggagtagaagctcaggggagtggcagcggactaatgaaacgtccacctctgcgacgtagaattccactgaaaaaaaaatgctccagtgtaccataagctgcttcagatttgatcgtgttttctctcccatggtggcgtttctacctacatttttcttagaaaacacatttctagttactcgttcagttctgaatt

SEQ ID NO: 729 - protein, 297 aa, Zea mays subsp. mays
  peptide (1)..(297): Ceres Seq. ID no. 12409750
CQKNPQQGRLRVWEIERGEGGFPQREPEPKPKPKQSTLAFPHQGVHPSSHGDGVQDGDGGDEREGGVPALVHGDEVEEGAPLRGVQDRRAVARRAGGQGGRPRGRVRGARGRAARRRLPLRRLRLRLRHRRQLPEEQDLLHRLVTGGVEDQGQDPVRDIEARPAAAAGRGPLRGAGHRPLRDGLRRHQRPRAMRPPLRSAPIYVLTCAWACSPTTHCSVVSSHLRSCVCVCDRPDANWRWCAPVAIDAANLTRLRVCLLCYFRFSGEMVQAWCVDVDGWSRSSGEWQRTNETSTSAT

SEQ ID NO: 730 - DNA, 461 bp, Zea mays subsp. mays
  misc_feature (1)..(461): Ceres Seq. ID no. 1361708
  misc_feature: MA Experiment ID: 108529 Result: Down-regulated in Transcription
  misc_feature: MA Experiment 108529 PARAMETER Experiment Name: Zm_Imbibed_Seeds_P Parameter: Age (day) Value: 5 vs. 2
  misc_feature: MA Experiment 108529 PARAMETER Experiment Name: Zm_Imbibed_Seeds_P Parameter: Organism Value: Zea mays
  misc_feature: MA Experiment 108529 PARAMETER Experiment Name: Zm_Imbibed_Seeds_P Parameter: Plant Line Value: 35A19
  misc_feature: MA Experiment 108529 PARAMETER Experiment Name: Zm_Imbibed_Seeds_P Parameter: Tissue Value: Roots vs. Embryo
  misc_feature: MA Experiment ID: 108535 Result: Up-regulated in Transcription
  misc_feature: MA Experiment 108535 PARAMETER Experiment Name: Zm_Meristem_P Parameter: Age (day) Value: 8
  misc_feature: MA Experiment 108535 PARAMETER Experiment Name: Zm_Meristem_P Parameter: Organism Value: Zea mays
  misc_feature: MA Experiment 108535 PARAMETER Experiment Name: Zm_Meristem_P Parameter: Plant Line Value: 35A19
  misc_feature: MA Experiment 108535 PARAMETER Experiment Name: Zm_Meristem_P Parameter: Tissue Value: Root Meristem vs. Above Root Meristem
  misc_feature: MA Experiment ID: 108543 Result: Up-regulated in Transcription
  misc_feature: MA Experiment ID: 108546 Result: Down-regulated in Transcription
  misc_feature: MA Experiment 108546 PARAMETER Experiment Name: Zm_Imbibed_Seeds_P Parameter: Age (day) Value: 3 vs. 2
  misc_feature: MA Experiment 108546 PARAMETER Experiment Name: Zm_Imbibed_Seeds_P Parameter: Organism Value: Zea mays
  misc_feature: MA Experiment 108546 PARAMETER Experiment Name: Zm_Imbibed_Seeds_P Parameter: Plant Line Value: 35A19
  misc_feature: MA Experiment 108546 PARAMETER Experiment Name: Zm_Imbibed_Seeds_P Parameter: Tissue Value: Roots vs. Embryo
  misc_feature: MA Experiment ID: 108597 Result: Up-regulated in Transcription
  misc_feature: MA Experiment 108597 PARAMETER Experiment Name: Zm_100uM_ABA_P Parameter: Age (day) Value: 9
  misc_feature: MA Experiment 108597 PARAMETER Experiment Name: Zm_100uM_ABA_P Parameter: Organism Value: Zea mays
  misc_feature: MA Experiment 108597 PARAMETER Experiment Name: Zm_100uM_ABA_P Parameter: Plant Line Value: 35A19
  misc_feature: MA Experiment 108597 PARAMETER Experiment Name: Zm_100uM_ABA_P Parameter: Timepoint (hr) Value: 24
  misc_feature: MA Experiment 108597 PARAMETER Experiment Name: Zm_100uM_ABA_P Parameter: Tissue Value: Aerial
  misc_feature: MA Experiment 108597 PARAMETER Experiment Name: Zm_100uM_ABA_P Parameter: Treatment Value: 100uM ABA vs. No Treatment
  misc_feature: MA Experiment ID: 108687 Result: Down-regulated in Transcription
  misc_feature: MA Experiment 108687 PARAMETER Experiment Name: Zm_Embryos-Flowers__P Parameter: Tissue Value: Embryo vs. Aerial+
  misc_feature: MA Experiment ID: 20000488 Result: Down-regulated in Transcription
  misc_feature: MA Experiment 20000488 PARAMETER Experiment Name: Zm_50mM_NH4NO3_L_to_H_P Parameter: Organism Value: Zea mays
  misc_feature: MA Experiment 20000488 PARAMETER Experiment Name: Zm_50mM_NH4NO3_L_to_H_P Parameter: Timepoint (hr) Value: 8
  misc_feature: MA Experiment 20000488 PARAMETER Experiment Name: Zm_50mM_NH4NO3_L_to_H_P Parameter: Tissue Value: Leaves
  misc_feature: MA Experiment 20000488 PARAMETER Experiment Name: Zm_50mM_NH4NO3_L_to_H_P Parameter: Treatment Value: 50mM NH4NO3 vs. 100mM Mannitol
  misc_feature: MA Experiment ID: 20000626 Result: Down-regulated in Transcription
  misc_feature: MA Experiment 20000626 PARAMETER Experiment Name: Zm_Herbicide-Treatments_P Parameter: Timepoint (hr) Value: 12
  misc_feature: MA Experiment 20000626 PARAMETER Experiment Name: Zm_Herbicide-Treatments_P Parameter: Tissue Value: Aerial
  misc_feature: MA Experiment 20000626 PARAMETER Experiment Name: Zm_Herbicide-Treatments_P Parameter: Treatment Value: Roundup vs. No Treatment
  misc_feature: Pfam Name: Pkinase Pfam Description: Protein kinase domain
attctatcttgatatacatgtgctagaagaggtgtttaatatatttacatttttcatatcttgtgcagatattccggggactagcttatattcatactgtaccaggaatttgtcaccgagatattaagcctcagaatatcttggtggatcctctttcccaccaagtcaaggtttgtgacttcgggagtgctaaaatcttgattaaaggtgaagctaatatatcatatatatgctcacgctattatcgtgctcctgagctcatatttggtgcaactgaatacacaacatctattgatatattcagctggatgtgttcttgctgagcttcttcttagtcaaccattatttcctggggaaagtgctgtggaccagctggttgagattatcaaggttttgggcacccaacacgagaggaaattcgttgtatgaatcccaactatacagaattcaagtttcctcag

SEQ ID NO: 731 - protein, 41 aa, Zea mays subsp. mays
  peptide (1)..(41): Ceres Seq. ID no. 1361709
  misc_feature: Pfam Name: Pkinase Pfam Description: Protein kinase domain
FYLDIHVLEEVFNIFTFFISCADIPGTSLYSYCTRNLSPRY

SEQ ID NO: 732 - DNA, 1431 bp, Zea mays subsp. mays
  misc_feature (1)..(1431): Ceres Seq. ID no. 12408933
  misc_feature: MA Experiment ID: 108528 Result: Up-regulated in Transcription
  misc_feature: MA Experiment 108528 PARAMETER Experiment Name: Zm_Imbibed_Seeds_P Parameter: Age (day) Value: 5 vs. 2
  misc_feature: MA Experiment 108528 PARAMETER Experiment Name: Zm_Imbibed_Seeds_P Parameter: Organism Value: Zea mays
  misc_feature: MA Experiment 108528 PARAMETER Experiment Name: Zm_Imbibed_Seeds_P Parameter: Plant Line Value: 35A19
  misc_feature: MA Experiment 108528 PARAMETER Experiment Name: Zm_Imbibed_Seeds_P Parameter: Tissue Value: Aerial vs. Embryo
  misc_feature: MA Experiment ID: 108530 Result: Up-regulated in Transcription
  misc_feature: MA Experiment 108530 PARAMETER Experiment Name: Zm_Imbibed_Seeds_P Parameter: Age (day) Value: 6 vs. 2
  misc_feature: MA Experiment 108530 PARAMETER Experiment Name: Zm_Imbibed_Seeds_P Parameter: Organism Value: Zea mays
  misc_feature: MA Experiment 108530 PARAMETER Experiment Name: Zm_Imbibed_Seeds_P Parameter: Plant Line Value: 35A19
  misc_feature: MA Experiment 108530 PARAMETER Experiment Name: Zm_Imbibed_Seeds_P Parameter: Tissue Value: Aerial vs. Embryo
  misc_feature: MA Experiment ID: 108536 Result: Down-regulated in Transcription
  misc_feature: MA Experiment 108536 PARAMETER Experiment Name: Zm_Meristem_P Parameter: Age (day) Value: 8
  misc_feature: MA Experiment 108536 PARAMETER Experiment Name: Zm_Meristem_P Parameter: Organism Value: Zea mays
  misc_feature: MA Experiment 108536 PARAMETER Experiment Name: Zm_Meristem_P Parameter: Plant Line Value: 35A19
  misc_feature: MA Experiment 108536 PARAMETER Experiment Name: Zm_Meristem_P Parameter: Tissue Value: Shoot Meristem vs. Above Shoot Meristem
  misc_feature: MA Experiment ID: 108545 Result: Up-regulated in Transcription
  misc_feature: MA Experiment 108545 PARAMETER Experiment Name: Zm_Imbibed_Seeds_P Parameter: Age (day) Value: 3 vs. 2
  misc_feature: MA Experiment 108545 PARAMETER Experiment Name: Zm_Imbibed_Seeds_P Parameter: Organism Value: Zea mays
  misc_feature: MA Experiment 108545 PARAMETER Experiment Name: Zm_Imbibed_Seeds_P Parameter: Plant Line Value: 35A19
  misc_feature: MA Experiment 108545 PARAMETER Experiment Name: Zm_Imbibed_Seeds_P Parameter: Tissue Value: Aerial vs. Embryo
  misc_feature: MA Experiment ID: 108547 Result: Up-regulated in Transcription
  misc_feature: MA Experiment 108547 PARAMETER Experiment Name: Zm_Imbibed_Seeds_P Parameter: Age (day) Value: 4 vs. 2
  misc_feature: MA Experiment 108547 PARAMETER Experiment Name: Zm_Imbibed_Seeds_P Parameter: Organism Value: Zea mays
  misc_feature: MA Experiment 108547 PARAMETER Experiment Name: Zm_Imbibed_Seeds_P Parameter: Plant Line Value: 35A19
  misc_feature: MA Experiment 108547 PARAMETER Experiment Name: Zm_Imbibed_Seeds_P Parameter: Tissue Value: Aerial vs. Embryo
  misc_feature: MA Experiment ID: 108687 Result: Down-regulated in Transcription
  misc_feature: MA Experiment 108687 PARAMETER Experiment Name: Zm_Embryos-Flowers__P Parameter: Tissue Value: Embryo vs. Aerial+
  misc_feature: MA Experiment ID: 108688 Result: Down-regulated in Transcription
  misc_feature: MA Experiment 108688 PARAMETER Experiment Name: Zm_Embryos-Flowers__P Parameter: Tissue Value: Immature Flowers vs. Aerial+
  misc_feature: MA Experiment ID: 20000492 Result: Down-regulated in Transcription
  misc_feature: MA Experiment 20000492 PARAMETER Experiment Name: Zm_Hybrid_Seed_Dev_P Parameter: DAP Value: 12
  misc_feature: MA Experiment 20000492 PARAMETER Experiment Name: Zm_Hybrid_Seed_Dev_P Parameter: Organism Value: Zea mays
  misc_feature: MA Experiment 20000492 PARAMETER Experiment Name: Zm_Hybrid_Seed_Dev_P Parameter: Plant Line Value: 35A19
  misc_feature: MA Experiment 20000492 PARAMETER Experiment Name: Zm_Hybrid_Seed_Dev_P Parameter: Tissue Value: Fert Kernel vs. Unfert Floret
  misc_feature: MA Experiment ID: 20000535 Result: Down-regulated in Transcription
  misc_feature: MA Experiment 20000535 PARAMETER Experiment Name: Zm_Hybrid_Seed_Dev_P Parameter: DAP Value: 30 vs. 12
  misc_feature: MA Experiment 20000535 PARAMETER Experiment Name: Zm_Hybrid_Seed_Dev_P Parameter: Organism Value: Zea mays
  misc_feature: MA Experiment 20000535 PARAMETER Experiment Name: Zm_Hybrid_Seed_Dev_P Parameter: Plant Line Value: 35A19
  misc_feature: MA Experiment 20000535 PARAMETER Experiment Name: Zm_Hybrid_Seed_Dev_P Parameter: Tissue Value: Embryo vs. Unfert Floret
ctctacggaacacacaccgtgtcgttctagcgttctcatcctccatccgcttgctcctgctccctcgagtcaaagcagtggatatggtggcgcgagcagcgagctagggaggctaggtagcagactagtgtcgctattaatcgtaccacgccgccgccgggaaattgcccttctccgccactgccactgaagctatactgtcgcagagagagcgcccaccacccgcggaccagacatctgcgatgaccactctggcgacggacacggcggtcgtggacacgggaggaggacaaggcgttcgaagaacgcggtggcggccgccgcggcgccgccggccgacgggccgcctgatgatggctggttcacggcgctggtggcgagcgtgccggcgcggacgncggaggaggtgcggctgcactacgaggcgctggtggaggacgtggccgctatcgaggccggccgcatcccgctcccgcgctacgctggggaggagtcgtccgccgcgacgccctagggctccggtgccgccggcccctccacgcccaaggacggaggaggagggagcgggcaccgacgcgaagaacggaagggcggcgtcggcgctgacgcggggaagagttgctctaaggccgagcaggagcggcgcaagggcgtgccgtggacggaagaggagcacaggttgttcttgttgggtctggacaagttcggcaagggcgactggcggagcatctcgcgcaacttcgtcatctcgcggacgccgacgcaggtggcgagccacgcgcagaaatacttcatccgcctcaactcgatgaaccgggaccggcgccgctccagcatccacgacatcaccagcgtgaccgccggcgaggtggccgcggccggcgcgcccatcacgggcgtncggcccgaccgcggcgggggcaaatgccgatggggccgggcggcatgaagcaccaccacccggttccgccgatgggcatgtacggcatgcgcccatgggccacccggtcgctgggcacatggtggcgccggcggccgtcggcacgccggtcatgttcccgccgggccatcactcgccctatgtcctgccggtgggatacccggcgccaccgaccaagatgcaccagtgatcgtctacgaccggcatttgcgcatctgcacaactgcattcctttgctcgttctttcttgatttcgttgatgatcttgtgtagccaaagctatctatatccatcctttcctcatctcccgggtctttgatttttgacgtaacatatagatgacttgagcgagtgcagggcaggcaggcgaataatgagtatcgctacttacaggaaggctcaaggaatgtgtaattagtagcagccttcctgggtgcaaatattcatcatttgtgcaactggggactgacagaatcccatttcccggatgc

SEQ ID NO: 733 - protein, 189 aa, Zea mays subsp. mays
  peptide (1)..(189): Ceres Seq. ID no. 12408934
  misc_feature (52)..(52): Xaa is any aa, unknown or other
MTTLATDTAVVDTGGGQGVRRTRWRPPRRRRPTGRLMMAGSRRWWRACRRGXRRRCGCTTRRWWRTWPLSRPAASRSRATLGRSRPPRRPRAPVPPAPPRPRTEEEGAGTDAKNGRAASALTRGRVALRPSRSGARACRGRKRSTGCSCWVWTSSARATGGASRATSSSRGRRRRWRATRRNTSSASTR

SEQ ID NO: 734 - protein, 153 aa, Zea mays subsp. mays
  peptide (1)..(153): Ceres Seq. ID no. 12408935
  misc_feature (16)..(16): Xaa is any aa, unknown or other
MMAGSRRWWRACRRGXRRRCGCTTRRWWRTWPLSRPAASRSRATLGRSRPPRRPRAPVPPAPPRPRTEEEGAGTDAKNGRAASALTRGRVALRPSRSGARACRGRKRSTGCSCWVWTSSARATGGASRATSSSRGRRRRWRATRRNTSSASTR

SEQ ID NO: 735 - protein, 152 aa, Zea mays subsp. mays
  peptide (1)..(152): Ceres Seq. ID no. 12408936
  misc_feature (15)..(15): Xaa is any aa, unknown or other
MAGSRRWWRACRRGXRRRCGCTTRRWWRTWPLSRPAASRSRATLGRSRPPRRPRAPVPPAPPRPRTEEEGAGTDAKNGRAASALTRGRVALRPSRSGARACRGRKRSTGCSCWVWTSSARATGGASRATSSSRGRRRRWRATRRNTSSASTR

SEQ ID NO: 736 - DNA, 1065 bp, Zea mays subsp. mays
  misc_feature (1)..(1065): Ceres Seq. ID no. 12402437
  misc_feature: MA Experiment ID: 20000478 Result: Up-regulated in Transcription
  misc_feature: MA Experiment 20000478 PARAMETER Experiment Name: Zm_5mM_SA_P Parameter: Age (day) Value: 11
  misc_feature: MA Experiment 20000478 PARAMETER Experiment Name: Zm_5mM_SA_P Parameter: Organism Value: Zea mays
  misc_feature: MA Experiment 20000478 PARAMETER Experiment Name: Zm_5mM_SA_P Parameter: Plant Line Value: 35A19
  misc_feature: MA Experiment 20000478 PARAMETER Experiment Name: Zm_5mM_SA_P Parameter: Timepoint (hr) Value: 72
  misc_feature: MA Experiment 20000478 PARAMETER Experiment Name: Zm_5mM_SA_P Parameter: Tissue Value: Aerial
  misc_feature: MA Experiment 20000478 PARAMETER Experiment Name: Zm_5mM_SA_P Parameter: Treatment Value: 5mM SA vs. No Treatment
agcagctagcatacctgcgcgacggttttccccctcgccttggctatcgcggcgagcacctcggagtccagcacggcgctgccctgcccgtcccagttctgccctcccagcggcgagtaggccgcgacgtggatgcccctgtcggcgcagtacgccctgagcgtccgctgctgccacgccgggttcagctccacctggttcaccgcgggcgggaccgtggcgacggccatgaccccgtcgaggtgcctggtggtgaagttgctcacgccgatcgccttggcgaggcccagccgctggcactcctccatggcgcgccacacgcccgcgaggtccagcggcacggcgttctccttcctggtcgggagctcgggcggccccggtttcaggcacaccggccagtggatcagcggcgatagggacggactagcggcttacttgagtgtttcccggagggacggcagcacgaggtccgggtggttctgcgagcaccacagcttggacgtcacgaacagatcctcccgggaccgcagggtcccgcgccggagcgcctcggccacggcgtcgcccagcggcttctcggtgccgtacatggaggccgtgtcgaagtggcggaaccccacctcgatggcggagagcacgccgtccttgacggcctcgtgcaccagagggaacgacgccgtgcccatgccgaccatcggcatcgccgtcctcgcgttgcccgaccgcagggccacctcgggcaccaccgccgtcgtccccgcggatgccatgttcatagggtcagatgtggtgcgctgccgctgcagtacaacgtctagactagatgcgagagactgcttgagcggtgatgagcccatgccggtcgatttatgcactagtattgcaaacggccaaacgtggtggtggactctggactggtggacaggcgatgtggactcgatcgcagtattctagagtttttggcgtcacgagttaggctatctacagcggaccagaggttacctctatttcttctcatcattttttgcatcactcatcaatattgtgtcccctactttttcatct

SEQ ID NO: 737 - protein, 273 aa, Zea mays subsp. mays
  peptide (1)..(273): Ceres Seq. ID no. 12402438
MPLSAQYALSVRCCHAGFSSTWFTAGGTVATAMTPSRCLVVKLLTPIALARPSRWHSSMARHTPARSSGTAFSFLVGSSGGPGFRHTGQWISGDRDGLAAYLSVSRRDGSTRSGWFCEHHSLDVTNRSSRDRRVPRRSASATASPSGFSVPYMEAVSKWRNPTSMAESTPSLTASCTRGNDAVPMPTIGIAVLALPDRRATSGTTAVVPADAMFIGSDVVRCRCSTTSRLDARDCLSGDEPMPVDLCTSIANGQTWWWTLDWWTGDVDSIAVF

SEQ ID NO: 738 - protein, 241 aa, Zea mays subsp. mays
  peptide (1)..(241): Ceres Seq. ID no. 12402439
MTPSRCLVVKLLTPIALARPSRWHSSMARHTPARSSGTAFSFLVGSSGGPGFRHTGQWISGDRDGLAAYLSVSRRDGSTRSGWFCEHHSLDVTNRSSRDRRVPRRSASATASPSGFSVPYMEAVSKWRNPTSMAESTPSLTASCTRGNDAVPMPTIGIAVLALPDRRATSGTTAVVPADAMFIGSDVVRCRCSTTSRLDARDCLSGDEPMPVDLCTSIANGQTWWWTLDWWTGDVDSIAVF

SEQ ID NO: 739 - protein, 215 aa, Zea mays subsp. mays
  peptide (1)..(215): Ceres Seq. ID no. 12402440
MARHTPARSSGTAFSFLVGSSGGPGFRHTGQWISGDRDGLAAYLSVSRRDGSTRSGWFCEHHSLDVTNRSSRDRRVPRRSASATASPSGFSVPYMEAVSKWRNPTSMAESTPSLTASCTRGNDAVPMPTIGIAVLALPDRRATSGTTAVVPADAMFIGSDVVRCRCSTTSRLDARDCLSGDEPMPVDLCTSIANGQTWWWTLDWWTGDVDSIAVF

SEQ ID NO: 740 - DNA, 803 bp, Zea mays subsp. mays
  misc_feature (1)..(803): Ceres Seq. ID no. 12372455
  misc_feature: MA Experiment ID: 108543 Result: Down-regulated in Transcription
accaacctcacctactgttctgggttgaaatcttgcggaaagtctgccaaaacaaaaaacaaaagtccttgcaggtggtttggcaggctaaacttgacgtttgcgttggcaggaagccgtggctgctgtaatctaatctgctgctgcaatctccgacccgtctcccagacttgactgtacctgaaaccactattgaaacaatcggtgagagcgagagagaaaattaaagagaaacccgacaaaaaccaaccaaccaagcagctctccgttccatatagccgctgcatcagatccattcaagaactagagccaagccaccaacaataaattcctctggccggcctgcctcatcagctcggttcaaaaaaaacaaaaaaaaaagaagtcgcagcggcagtagtaaactgcagtgacatacggagcactactgtactgtactgtagtaacatactactactgctgctgctcacagcaagaacaaggatacgataaaaaagaaccaaggcaaaaagctaaggtcctgtttgggaacaaagtttttgaaaaccacagtttttgaaatactatactatactttagttataacaataccgtagtttataataccgcagttttgaaaactgaggtccagagctaagtttagaatgccttaaaacaactatagtatttgcaatacttcagttttgaaaacagagattttacctagcttgccaaacaccattatgtatataatactgcagtatttgagaatactgcagtattcttccaaaactgcagaaaaactttgttcccaaacaccccct

SEQ ID NO: 741 - protein, 57 aa, Zea mays subsp. mays
  peptide (1)..(57): Ceres Seq. ID no. 12372456
TNLTYCSGLKSCGKSAKTKNKSPCRWFGRLNLTFALAGSRGCCNLICCCNLRPVSQT

SEQ ID NO: 742 - protein, 42 aa, Zea mays subsp. mays
  peptide (1)..(42): Ceres Seq. ID no. 12372457
QPHLLFWVEILRKVCQNKKQKSLQVVWQAKLDVCVGRKPWLL

SEQ ID NO: 743 - DNA, 926 bp, Zea mays subsp. mays
  misc_feature (1)..(926): Ceres Seq. ID no. 12404246
  misc_feature: MA Experiment ID: 108503 Result: Up-regulated in Transcription
  misc_feature: MA Experiment 108503 PARAMETER Experiment Name: Zm_Drought_P Parameter: Age (day) Value: 8
  misc_feature: MA Experiment 108503 PARAMETER Experiment Name: Zm_Drought_P Parameter: Organism Value: Zea mays
  misc_feature: MA Experiment 108503 PARAMETER Experiment Name: Zm_Drought_P Parameter: Plant Line Value: 35A19
  misc_feature: MA Experiment 108503 PARAMETER Experiment Name: Zm_Drought_P Parameter: Timepoint (hr) Value: 6
  misc_feature: MA Experiment 108503 PARAMETER Experiment Name: Zm_Drought_P Parameter: Tissue Value: Aerial
  misc_feature: MA Experiment 108503 PARAMETER Experiment Name: Zm_Drought_P Parameter: Treatment Value: Drought vs. No Drought
  misc_feature: MA Experiment ID: 108504 Result: Up-regulated in Transcription
  misc_feature: MA Experiment 108504 PARAMETER Experiment Name: Zm_Drought_P Parameter: Age (day) Value: 8
  misc_feature: MA Experiment 108504 PARAMETER Experiment Name: Zm_Drought_P Parameter: Organism Value: Zea mays
  misc_feature: MA Experiment 108504 PARAMETER Experiment Name: Zm_Drought_P Parameter: Plant Line Value: 35A19
  misc_feature: MA Experiment 108504 PARAMETER Experiment Name: Zm_Drought_P Parameter: Timepoint (hr) Value: 12
  misc_feature: MA Experiment 108504 PARAMETER Experiment Name: Zm_Drought_P Parameter: Tissue Value: Aerial
  misc_feature: MA Experiment 108504 PARAMETER Experiment Name: Zm_Drought_P Parameter: Treatment Value: Drought vs. No Drought
  misc_feature: MA Experiment ID: 108513 Result: Up-regulated in Transcription
  misc_feature: MA Experiment 108513 PARAMETER Experiment Name: Zm_100uM_ABA_P Parameter: Age (day) Value: 8
  misc_feature: MA Experiment 108513 PARAMETER Experiment Name: Zm_100uM_ABA_P Parameter: Organism Value: Zea mays
  misc_feature: MA Experiment 108513 PARAMETER Experiment Name: Zm_100uM_ABA_P Parameter: Plant Line Value: 35A19
  misc_feature: MA Experiment 108513 PARAMETER Experiment Name: Zm_100uM_ABA_P Parameter: Timepoint (hr) Value: 6
  misc_feature: MA Experiment 108513 PARAMETER Experiment Name: Zm_100uM_ABA_P Parameter: Tissue Value: Aerial
  misc_feature: MA Experiment 108513 PARAMETER Experiment Name: Zm_100uM_ABA_P Parameter: Treatment Value: 100uM ABA vs. No Treatment
  misc_feature: MA Experiment ID: 108522 Result: Up-regulated in Transcription
  misc_feature: MA Experiment 108522 PARAMETER Experiment Name: Zm_42deg_Heat_P Parameter: Age (day) Value: 8
  misc_feature: MA Experiment 108522 PARAMETER Experiment Name: Zm_42deg_Heat_P Parameter: Organism Value: Zea mays
  misc_feature: MA Experiment 108522 PARAMETER Experiment Name: Zm_42deg_Heat_P Parameter: Plant Line Value: 35A19
  misc_feature: MA Experiment 108522 PARAMETER Experiment Name: Zm_42deg_Heat_P Parameter: Temperature (deg C) Value: 42 vs. 22
  misc_feature: MA Experiment 108522 PARAMETER Experiment Name: Zm_42deg_Heat_P Parameter: Timepoint (hr) Value: 1
  misc_feature: MA Experiment 108522 PARAMETER Experiment Name: Zm_42deg_Heat_P Parameter: Tissue Value: Aerial
  misc_feature: MA Experiment ID: 108523 Result: Up-regulated in Transcription
  misc_feature: MA Experiment 108523 PARAMETER Experiment Name: Zm_42deg_Heat_P Parameter: Age (day) Value: 8
  misc_feature: MA Experiment 108523 PARAMETER Experiment Name: Zm_42deg_Heat_P Parameter: Organism Value: Zea mays
  misc_feature: MA Experiment 108523 PARAMETER Experiment Name: Zm_42deg_Heat_P Parameter: Plant Line Value: 35A19
  misc_feature: MA Experiment 108523 PARAMETER Experiment Name: Zm_42deg_Heat_P Parameter: Temperature (deg C) Value: 42 vs. 22
  misc_feature: MA Experiment 108523 PARAMETER Experiment Name: Zm_42deg_Heat_P Parameter: Timepoint (hr) Value: 6
  misc_feature: MA Experiment 108523 PARAMETER Experiment Name: Zm_42deg_Heat_P Parameter: Tissue Value: Aerial
  misc_feature: MA Experiment ID: 108527 Result: Up-regulated in Transcription
  misc_feature: MA Experiment 108527 PARAMETER Experiment Name: Zm_5mM_NO_P Parameter: Age (day) Value: 8
  misc_feature: MA Experiment 108527 PARAMETER Experiment Name: Zm_5mM_NO_P Parameter: Organism Value: Zea mays
  misc_feature: MA Experiment 108527 PARAMETER Experiment Name: Zm_5mM_NO_P Parameter: Plant Line Value: 35A19
  misc_feature: MA Experiment 108527 PARAMETER Experiment Name: Zm_5mM_NO_P Parameter: Timepoint (hr) Value: 6
  misc_feature: MA Experiment 108527 PARAMETER Experiment Name: Zm_5mM_NO_P Parameter: Tissue Value: Aerial
  misc_feature: MA Experiment 108527 PARAMETER Experiment Name: Zm_5mM_NO_P Parameter: Treatment Value: 5mM NO vs. No Treatment
  misc_feature: MA Experiment ID: 108529 Result: Up-regulated in Transcription
  misc_feature: MA Experiment 108529 PARAMETER Experiment Name: Zm_Imbibed_Seeds_P Parameter: Age (day) Value: 5 vs. 2
  misc_feature: MA Experiment 108529 PARAMETER Experiment Name: Zm_Imbibed_Seeds_P Parameter: Organism Value: Zea mays
  misc_feature: MA Experiment 108529 PARAMETER Experiment Name: Zm_Imbibed_Seeds_P Parameter: Plant Line Value: 35A19
  misc_feature: MA Experiment 108529 PARAMETER Experiment Name: Zm_Imbibed_Seeds_P Parameter: Tissue Value: Roots vs. Embryo
  misc_feature: MA Experiment ID: 108536 Result: Up-regulated in Transcription
  misc_feature: MA Experiment 108536 PARAMETER Experiment Name: Zm_Meristem_P Parameter: Age (day) Value: 8
  misc_feature: MA Experiment 108536 PARAMETER Experiment Name: Zm_Meristem_P Parameter: Organism Value: Zea mays
  misc_feature: MA Experiment 108536 PARAMETER Experiment Name: Zm_Meristem_P Parameter: Plant Line Value: 35A19
  misc_feature: MA Experiment 108536 PARAMETER Experiment Name: Zm_Meristem_P Parameter: Tissue Value: Shoot Meristem vs. Above Shoot Meristem
  misc_feature: MA Experiment ID: 108539 Result: Up-regulated in Transcription
  misc_feature: MA Experiment 108539 PARAMETER Experiment Name: Zm_20percent_PEG_P Parameter: Age (day) Value: 8
  misc_feature: MA Experiment 108539 PARAMETER Experiment Name: Zm_20percent_PEG_P Parameter: Organism Value: Zea mays
  misc_feature: MA Experiment 108539 PARAMETER Experiment Name: Zm_20percent_PEG_P Parameter: Plant Line Value: 35A19
  misc_feature: MA Experiment 108539 PARAMETER Experiment Name: Zm_20percent_PEG_P Parameter: Timepoint (hr) Value: 1
  misc_feature: MA Experiment 108539 PARAMETER Experiment Name: Zm_20percent_PEG_P Parameter: Tissue Value: Aerial
  misc_feature: MA Experiment 108539 PARAMETER Experiment Name: Zm_20percent_PEG_P Parameter: Treatment Value: 20percent PEG vs. No Treatment
  misc_feature: MA Experiment ID: 108540 Result: Up-regulated in Transcription
  misc_feature: MA Experiment 108540 PARAMETER Experiment Name: Zm_20percent_PEG_P Parameter: Age (day) Value: 8
  misc_feature: MA Experiment 108540 PARAMETER Experiment Name: Zm_20percent_PEG_P Parameter: Organism Value: Zea mays
  misc_feature: MA Experiment 108540 PARAMETER Experiment Name: Zm_20percent_PEG_P Parameter: Plant Line Value: 35A19
  misc_feature: MA Experiment 108540 PARAMETER Experiment Name: Zm_20percent_PEG_P Parameter: Timepoint (hr) Value: 6
  misc_feature: MA Experiment 108540 PARAMETER Experiment Name: Zm_20percent_PEG_P Parameter: Tissue Value: Aerial
  misc_feature: MA Experiment 108540 PARAMETER Experiment Name: Zm_20percent_PEG_P Parameter: Treatment Value: 20percent PEG vs. No Treatment
  misc_feature: MA Experiment ID: 108556 Result: Up-regulated in Transcription
  misc_feature: MA Experiment 108556 PARAMETER Experiment Name: Zm_Drought_P Parameter: Age (day) Value: 9
  misc_feature: MA Experiment 108556 PARAMETER Experiment Name: Zm_Drought_P Parameter: Organism Value: Zea mays
  misc_feature: MA Experiment 108556 PARAMETER Experiment Name: Zm_Drought_P Parameter: Plant Line Value: 35A19
  misc_feature: MA Experiment 108556 PARAMETER Experiment Name: Zm_Drought_P Parameter: Timepoint (hr) Value: 24
  misc_feature: MA Experiment 108556 PARAMETER Experiment Name: Zm_Drought_P Parameter: Tissue Value: Aerial
  misc_feature: MA Experiment 108556 PARAMETER Experiment Name: Zm_Drought_P Parameter: Treatment Value: Drought vs. No Drought
  misc_feature: MA Experiment ID: 108597 Result: Up-regulated in Transcription
  misc_feature: MA Experiment 108597 PARAMETER Experiment Name: Zm_100uM_ABA_P Parameter: Age (day) Value: 9
  misc_feature: MA Experiment 108597 PARAMETER Experiment Name: Zm_100uM_ABA_P Parameter: Organism Value: Zea mays
  misc_feature: MA Experiment 108597 PARAMETER Experiment Name: Zm_100uM_ABA_P Parameter: Plant Line Value: 35A19
  misc_feature: MA Experiment 108597 PARAMETER Experiment Name: Zm_100uM_ABA_P Parameter: Timepoint (hr) Value: 24
  misc_feature: MA Experiment 108597 PARAMETER Experiment Name: Zm_100uM_ABA_P Parameter: Tissue Value: Aerial
  misc_feature: MA Experiment 108597 PARAMETER Experiment Name: Zm_100uM_ABA_P Parameter: Treatment Value: 100uM ABA vs. No Treatment
  misc_feature: MA Experiment ID: 108687 Result: Up-regulated in Transcription
  misc_feature: MA Experiment 108687 PARAMETER Experiment Name: Zm_Embryos-Flowers__P Parameter: Tissue Value: Embryo vs. Aerial+
  misc_feature: MA Experiment ID: 20000477 Result: Up-regulated in Transcription
  misc_feature: MA Experiment 20000477 PARAMETER Experiment Name: Zm_5mM_SA_P Parameter: Age (day) Value: 10
  misc_feature: MA Experiment 20000477 PARAMETER Experiment Name: Zm_5mM_SA_P Parameter: Organism Value: Zea mays
  misc_feature: MA Experiment 20000477 PARAMETER Experiment Name: Zm_5mM_SA_P Parameter: Plant Line Value: 35A19
  misc_feature: MA Experiment 20000477 PARAMETER Experiment Name: Zm_5mM_SA_P Parameter: Timepoint (hr) Value: 48
  misc_feature: MA Experiment 20000477 PARAMETER Experiment Name: Zm_5mM_SA_P Parameter: Tissue Value: Aerial
  misc_feature: MA Experiment 20000477 PARAMETER Experiment Name: Zm_5mM_SA_P Parameter: Treatment Value: 5mM SA vs. No Treatment
  misc_feature: MA Experiment ID: 20000478 Result: Up-regulated in Transcription
  misc_feature: MA Experiment 20000478 PARAMETER Experiment Name: Zm_5mM_SA_P Parameter: Age (day) Value: 11
  misc_feature: MA Experiment 20000478 PARAMETER Experiment Name: Zm_5mM_SA_P Parameter: Organism Value: Zea mays
  misc_feature: MA Experiment 20000478 PARAMETER Experiment Name: Zm_5mM_SA_P Parameter: Plant Line Value: 35A19
  misc_feature: MA Experiment 20000478 PARAMETER Experiment Name: Zm_5mM_SA_P Parameter: Timepoint (hr) Value: 72
  misc_feature: MA Experiment 20000478 PARAMETER Experiment Name: Zm_5mM_SA_P Parameter: Tissue Value: Aerial
  misc_feature: MA Experiment 20000478 PARAMETER Experiment Name: Zm_5mM_SA_P Parameter: Treatment Value: 5mM SA vs. No Treatment
  misc_feature: MA Experiment ID: 20000479 Result: Up-regulated in Transcription
  misc_feature: MA Experiment 20000479 PARAMETER Experiment Name: Zm_Drought_P Parameter: Age (day) Value: 10
  misc_feature: MA Experiment 20000479 PARAMETER Experiment Name: Zm_Drought_P Parameter: Organism Value: Zea mays
  misc_feature: MA Experiment 20000479 PARAMETER Experiment Name: Zm_Drought_P Parameter: Plant Line Value: 35A19
  misc_feature: MA Experiment 20000479 PARAMETER Experiment Name: Zm_Drought_P Parameter: Timepoint (hr) Value: 48
  misc_feature: MA Experiment 20000479 PARAMETER Experiment Name: Zm_Drought_P Parameter: Tissue Value: Aerial
  misc_feature: MA Experiment 20000479 PARAMETER Experiment Name: Zm_Drought_P Parameter: Treatment Value: Drought vs. No Drought
  misc_feature: MA Experiment ID: 20000480 Result: Up-regulated in Transcription
  misc_feature: MA Experiment 20000480 PARAMETER Experiment Name: Zm_Drought_P Parameter: Age (day) Value: 11
  misc_feature: MA Experiment 20000480 PARAMETER Experiment Name: Zm_Drought_P Parameter: Organism Value: Zea mays
  misc_feature: MA Experiment 20000480 PARAMETER Experiment Name: Zm_Drought_P Parameter: Plant Line Value: 35A19
  misc_feature: MA Experiment 20000480 PARAMETER Experiment Name: Zm_Drought_P Parameter: Timepoint (hr) Value: 72
  misc_feature: MA Experiment 20000480 PARAMETER Experiment Name: Zm_Drought_P Parameter: Tissue Value: Aerial
  misc_feature: MA Experiment 20000480 PARAMETER Experiment Name: Zm_Drought_P Parameter: Treatment Value: Drought vs. No Drought
  misc_feature: MA Experiment ID: 20000487 Result: Down-regulated in Transcription
  misc_feature: MA Experiment 20000487 PARAMETER Experiment Name: Zm_50mM_NH4NO3_L_to_H_P Parameter: Organism Value: Zea mays
  misc_feature: MA Experiment 20000487 PARAMETER Experiment Name: Zm_50mM_NH4NO3_L_to_H_P Parameter: Timepoint (hr) Value: 4
  misc_feature: MA Experiment 20000487 PARAMETER Experiment Name: Zm_50mM_NH4NO3_L_to_H_P Parameter: Tissue Value: Leaves
  misc_feature: MA Experiment 20000487 PARAMETER Experiment Name: Zm_50mM_NH4NO3_L_to_H_P Parameter: Treatment Value: 50mM NH4NO3 vs. 100mM Mannitol
  misc_feature: MA Experiment ID: 20000535 Result: Down-regulated in Transcription
  misc_feature: MA Experiment 20000535 PARAMETER Experiment Name: Zm_Hybrid_Seed_Dev_P Parameter: DAP Value: 30 vs. 12
  misc_feature: MA Experiment 20000535 PARAMETER Experiment Name: Zm_Hybrid_Seed_Dev_P Parameter: Organism Value: Zea mays
  misc_feature: MA Experiment 20000535 PARAMETER Experiment Name: Zm_Hybrid_Seed_Dev_P Parameter: Plant Line Value: 35A19
  misc_feature: MA Experiment 20000535 PARAMETER Experiment Name: Zm_Hybrid_Seed_Dev_P Parameter: Tissue Value: Embryo vs. Unfert Floret
  misc_feature: MA Experiment ID: 20001608 Result: Down-regulated in Transcription
  misc_feature: MA Experiment 20001608 PARAMETER Experiment Name: Zm_50ppm_KNO3_L-to-H_P Parameter: Age (day) Value: 21
  misc_feature: MA Experiment 20001608 PARAMETER Experiment Name: Zm_50ppm_KNO3_L-to-H_P Parameter: Organism Value: Zea mays
  misc_feature: MA Experiment 20001608 PARAMETER Experiment Name: Zm_50ppm_KNO3_L-to-H_P Parameter: Plant Line Value: 35A19
  misc_feature: MA Experiment 20001608 PARAMETER Experiment Name: Zm_50ppm_KNO3_L-to-H_P Parameter: Timepoint (hr) Value: 48
  misc_feature: MA Experiment 20001608 PARAMETER Experiment Name: Zm_50ppm_KNO3_L-to-H_P Parameter: Tissue Value: Shoots
  misc_feature: MA Experiment 20001608 PARAMETER Experiment Name: Zm_50ppm_KNO3_L-to-H_P Parameter: Treatment Value: 50ppm KNO3 vs. 50ppm KCl
gccacgattgcagagccagagcgagacgcgactgcttttctgcttcatccacattggtagctagctagcttacacgttcacgcatcgctttccgggccgtctccggtggtttagctcagcagagcggggaaggaagaagatgacctccgtgagcgcgaggcccgttggcgtggggtactgcttcggcggggcgaggtgccagccacggtcgcgggtgcgggtttcggccgcggcctcggcagtggccgcgcccgcgcccgcgatggcggcgacgatgtacgagctgctcgccgtcgagnanangncggggcccnncnagatcaaggnggcgtaccggcgcgccgcgcgncggtggcacccgnacgcgtgccccggcggcagccgaccgcttcatggcggcgcgggaggcctacnaggtgctgtccgaccccgagcgcaggcgcggctacgacatccagctccgctgcggcgcccacttcggcgacgccgggtaccgcgcggcacgccgcgccgggttcgccgactgggaggcgcagctgaccgggctgcagtggcgcgcggcggggcggcgcgggcgcgccggcggggagacttggggcagcaggatgcgccaggcggccgcgcagccgtccttgtagcggcgtcgccggtggctggcctttgatagttcatacttcgtagtactagtgtactaccctaccttcccctttcctcttcgacaatcgaatggcccgagaagctttaattgcgctgttctgcagcgttttctcttgccaacacgtcatcctcgtcgcactgttcggagtgcagacgagcttgaagtctagaagcagtngacattttccccccctttgnagtgtagtactgtcaacttttagttcccantcggttacatncggttcgnancctatctcagnattnttttg

SEQ ID NO: 744 - protein, 174 aa, Zea mays subsp. mays
  peptide (1)..(174): Ceres Seq. ID no. 12404247
  misc_feature (54)..(54): Xaa is any aa, unknown or other
  misc_feature (55)..(55): Xaa is any aa, unknown or other
  misc_feature (56)..(56): Xaa is any aa, unknown or other
  misc_feature (59)..(59): Xaa is any aa, unknown or other
  misc_feature (60)..(60): Xaa is any aa, unknown or other
  misc_feature (63)..(63): Xaa is any aa, unknown or other
  misc_feature (70)..(70): Xaa is any aa, unknown or other
  misc_feature (75)..(75): Xaa is any aa, unknown or other
  misc_feature (92)..(92): Xaa is any aa, unknown or other
MTSVSARPVGVGYCFGGARCQPRSRVRVSAAASAVAAPAPAMAATMYELLAVEXXXGPXXIKXAYRRAAXRWHPXACPGGSRPLHGGAGGLXGAVRPRAQARLRHPAPLRRPLRRRRVPRGTPRRVRRLGGAADRAAVARGGAARARRRGDLGQQDAPGGRAAVLVAASPVAGL

SEQ ID NO: 745 - protein, 133 aa, Zea mays subsp. mays
  peptide (1)..(133): Ceres Seq. ID no. 12404248
  misc_feature (13)..(13): Xaa is any aa, unknown or other
  misc_feature (14)..(14): Xaa is any aa, unknown or other
  misc_feature (15)..(15): Xaa is any aa, unknown or other
  misc_feature (18)..(18): Xaa is any aa, unknown or other
  misc_feature (19)..(19): Xaa is any aa, unknown or other
  misc_feature (22)..(22): Xaa is any aa, unknown or other
  misc_feature (29)..(29): Xaa is any aa, unknown or other
  misc_feature (34)..(34): Xaa is any aa, unknown or other
  misc_feature (51)..(51): Xaa is any aa, unknown or other
MAATMYELLAVEXXXGPXXIKXAYRRAAXRWHPXACPGGSRPLHGGAGGLXGAVRPRAQARLRHPAPLRRPLRRRRVPRGTPRRVRRLGGAADRAAVARGGAARARRRGDLGQQDAPGGRAAVLVAASPVAGL

SEQ ID NO: 746 - protein, 129 aa, Zea mays subsp. mays
  peptide (1)..(129): Ceres Seq. ID no. 12404249
  misc_feature (9)..(9): Xaa is any aa, unknown or other
  misc_feature (10)..(10): Xaa is any aa, unknown or other
  misc_feature (11)..(11): Xaa is any aa, unknown or other
  misc_feature (14)..(14): Xaa is any aa, unknown or other
  misc_feature (15)..(15): Xaa is any aa, unknown or other
  misc_feature (18)..(18): Xaa is any aa, unknown or other
  misc_feature (25)..(25): Xaa is any aa, unknown or other
  misc_feature (30)..(30): Xaa is any aa, unknown or other
  misc_feature (47)..(47): Xaa is any aa, unknown or other
MYELLAVEXXXGPXXIKXAYRRAAXRWHPXACPGGSRPLHGGAGGLXGAVRPRAQARLRHPAPLRRPLRRRRVPRGTPRRVRRLGGAADRAAVARGGAARARRRGDLGQQDAPGGRAAVLVAASPVAGL

SEQ ID NO: 747 - DNA, 561 bp, Zea mays subsp. mays
  misc_feature (1)..(561): Ceres Seq. ID no. 12344923
  misc_feature: MA Experiment ID: 108530 Result: Up-regulated in Transcription
  misc_feature: MA Experiment 108530 PARAMETER Experiment Name: Zm_Imbibed_Seeds_P Parameter: Age (day) Value: 6 vs. 2
  misc_feature: MA Experiment 108530 PARAMETER Experiment Name: Zm_Imbibed_Seeds_P Parameter: Organism Value: Zea mays
  misc_feature: MA Experiment 108530 PARAMETER Experiment Name: Zm_Imbibed_Seeds_P Parameter: Plant Line Value: 35A19
  misc_feature: MA Experiment 108530 PARAMETER Experiment Name: Zm_Imbibed_Seeds_P Parameter: Tissue Value: Aerial vs. Embryo
  misc_feature: MA Experiment ID: 108545 Result: Up-regulated in Transcription
  misc_feature: MA Experiment 108545 PARAMETER Experiment Name: Zm_Imbibed_Seeds_P Parameter: Age (day) Value: 3 vs. 2
  misc_feature: MA Experiment 108545 PARAMETER Experiment Name: Zm_Imbibed_Seeds_P Parameter: Organism Value: Zea mays
  misc_feature: MA Experiment 108545 PARAMETER Experiment Name: Zm_Imbibed_Seeds_P Parameter: Plant Line Value: 35A19
  misc_feature: MA Experiment 108545 PARAMETER Experiment Name: Zm_Imbibed_Seeds_P Parameter: Tissue Value: Aerial vs. Embryo
  misc_feature: MA Experiment ID: 108547 Result: Up-regulated in Transcription
  misc_feature: MA Experiment 108547 PARAMETER Experiment Name: Zm_Imbibed_Seeds_P Parameter: Age (day) Value: 4 vs. 2
  misc_feature: MA Experiment 108547 PARAMETER Experiment Name: Zm_Imbibed_Seeds_P Parameter: Organism Value: Zea mays
  misc_feature: MA Experiment 108547 PARAMETER Experiment Name: Zm_Imbibed_Seeds_P Parameter: Plant Line Value: 35A19
  misc_feature: MA Experiment 108547 PARAMETER Experiment Name: Zm_Imbibed_Seeds_P Parameter: Tissue Value: Aerial vs. Embryo
aatagatccaggaaactgtgtgaaagctaagcttgatcccatgagtatgaaacaggccataaaaacctaggtattattatgcgcttgttaatactcgaacataattctttttgcgtgttcaaaaggatccaatatgttgtttgcatacatgttttagggagagagacccagtcaatgagaatcaaacaggtgacggaagggtaaatattacttaccaaaggatcaaacggattgccaactgtttccacaactcctacacccaaatatcttagcgtttcaactaactgcttgtatatgccttgatagcttgtgctgaccatttgctccttctcagtccctggggtgttctctaaattcgttttctcaaaactatcaaccagaggtaacaggctctggacaacttccacccgtatatttgatgtaaacttggcaccgtccttttcagcctgtttccggaaattctccagatcggcatttaagcgaataaatttttccttcccagaagttatttcagttgtaatactttcaagttgataagctactctactgttcactttttcc

SEQ ID NO: 748 - protein, 41 aa, Zea mays subsp. mays
  peptide (1)..(41): Ceres Seq. ID no. 12344924
MRLLILEHNSFCVFKRIQYVVCIHVLGRETQSMRIKQVTEG

SEQ ID NO: 749 - DNA, 986 bp, Zea mays subsp. mays
  misc_feature (1)..(986): Ceres Seq. ID no. 13498119
  misc_feature: MA Experiment ID: 108504 Result: Up-regulated in Transcription
  misc_feature: MA Experiment 108504 PARAMETER Experiment Name: Zm_Drought_P Parameter: Age (day) Value: 8
  misc_feature: MA Experiment 108504 PARAMETER Experiment Name: Zm_Drought_P Parameter: Organism Value: Zea mays
  misc_feature: MA Experiment 108504 PARAMETER Experiment Name: Zm_Drought_P Parameter: Plant Line Value: 35A19
  misc_feature: MA Experiment 108504 PARAMETER Experiment Name: Zm_Drought_P Parameter: Timepoint (hr) Value: 12
  misc_feature: MA Experiment 108504 PARAMETER Experiment Name: Zm_Drought_P Parameter: Tissue Value: Aerial
  misc_feature: MA Experiment 108504 PARAMETER Experiment Name: Zm_Drought_P Parameter: Treatment Value: Drought vs. No Drought
  misc_feature: MA Experiment ID: 108533 Result: Up-regulated in Transcription
  misc_feature: MA Experiment 108533 PARAMETER Experiment Name: Zm_4deg_Cold_P Parameter: Age (hr) Value: 8
  misc_feature: MA Experiment 108533 PARAMETER Experiment Name: Zm_4deg_Cold_P Parameter: Organism Value: Zea mays
  misc_feature: MA Experiment 108533 PARAMETER Experiment Name: Zm_4deg_Cold_P Parameter: Plant Line Value: 35A19
  misc_feature: MA Experiment 108533 PARAMETER Experiment Name: Zm_4deg_Cold_P Parameter: Temperature (deg C) Value: 4 vs. 22
  misc_feature: MA Experiment 108533 PARAMETER Experiment Name: Zm_4deg_Cold_P Parameter: Timepoint (hr) Value: 1
  misc_feature: MA Experiment 108533 PARAMETER Experiment Name: Zm_4deg_Cold_P Parameter: Tissue Value: Aerial
  misc_feature: MA Experiment ID: 108534 Result: Up-regulated in Transcription
  misc_feature: MA Experiment 108534 PARAMETER Experiment Name: Zm_4deg_Cold_P Parameter: Age (hr) Value: 8
  misc_feature: MA Experiment 108534 PARAMETER Experiment Name: Zm_4deg_Cold_P Parameter: Organism Value: Zea mays
  misc_feature: MA Experiment 108534 PARAMETER Experiment Name: Zm_4deg_Cold_P Parameter: Plant Line Value: 35A19
  misc_feature: MA Experiment 108534 PARAMETER Experiment Name: Zm_4deg_Cold_P Parameter: Temperature (deg C) Value: 4 vs. 22
  misc_feature: MA Experiment 108534 PARAMETER Experiment Name: Zm_4deg_Cold_P Parameter: Timepoint (hr) Value: 6
  misc_feature: MA Experiment 108534 PARAMETER Experiment Name: Zm_4deg_Cold_P Parameter: Tissue Value: Aerial
  misc_feature: MA Experiment ID: 108536 Result: Up-regulated in Transcription
  misc_feature: MA Experiment 108536 PARAMETER Experiment Name: Zm_Meristem_P Parameter: Age (day) Value: 8
  misc_feature: MA Experiment 108536 PARAMETER Experiment Name: Zm_Meristem_P Parameter: Organism Value: Zea mays
  misc_feature: MA Experiment 108536 PARAMETER Experiment Name: Zm_Meristem_P Parameter: Plant Line Value: 35A19
  misc_feature: MA Experiment 108536 PARAMETER Experiment Name: Zm_Meristem_P Parameter: Tissue Value: Shoot Meristem vs. Above Shoot Meristem
  misc_feature: MA Experiment ID: 108545 Result: Down-regulated in Transcription
  misc_feature: MA Experiment 108545 PARAMETER Experiment Name: Zm_Imbibed_Seeds_P Parameter: Age (day) Value: 3 vs. 2
  misc_feature: MA Experiment 108545 PARAMETER Experiment Name: Zm_Imbibed_Seeds_P Parameter: Organism Value: Zea mays
  misc_feature: MA Experiment 108545 PARAMETER Experiment Name: Zm_Imbibed_Seeds_P Parameter: Plant Line Value: 35A19
  misc_feature: MA Experiment 108545 PARAMETER Experiment Name: Zm_Imbibed_Seeds_P Parameter: Tissue Value: Aerial vs. Embryo
  misc_feature: MA Experiment ID: 108597 Result: Up-regulated in Transcription
  misc_feature: MA Experiment 108597 PARAMETER Experiment Name: Zm_100uM_ABA_P Parameter: Age (day) Value: 9
  misc_feature: MA Experiment 108597 PARAMETER Experiment Name: Zm_100uM_ABA_P Parameter: Organism Value: Zea mays
  misc_feature: MA Experiment 108597 PARAMETER Experiment Name: Zm_100uM_ABA_P Parameter: Plant Line Value: 35A19
  misc_feature: MA Experiment 108597 PARAMETER Experiment Name: Zm_100uM_ABA_P Parameter: Timepoint (hr) Value: 24
  misc_feature: MA Experiment 108597 PARAMETER Experiment Name: Zm_100uM_ABA_P Parameter: Tissue Value: Aerial
  misc_feature: MA Experiment 108597 PARAMETER Experiment Name: Zm_100uM_ABA_P Parameter: Treatment Value: 100uM ABA vs. No Treatment
  misc_feature: MA Experiment ID: 108687 Result: Up-regulated in Transcription
  misc_feature: MA Experiment 108687 PARAMETER Experiment Name: Zm_Embryos-Flowers__P Parameter: Tissue Value: Embryo vs. Aerial+
  misc_feature: MA Experiment ID: 20000479 Result: Up-regulated in Transcription
  misc_feature: MA Experiment 20000479 PARAMETER Experiment Name: Zm_Drought_P Parameter: Age (day) Value: 10
  misc_feature: MA Experiment 20000479 PARAMETER Experiment Name: Zm_Drought_P Parameter: Organism Value: Zea mays
  misc_feature: MA Experiment 20000479 PARAMETER Experiment Name: Zm_Drought_P Parameter: Plant Line Value: 35A19
  misc_feature: MA Experiment 20000479 PARAMETER Experiment Name: Zm_Drought_P Parameter: Timepoint (hr) Value: 48
  misc_feature: MA Experiment 20000479 PARAMETER Experiment Name: Zm_Drought_P Parameter: Tissue Value: Aerial
  misc_feature: MA Experiment 20000479 PARAMETER Experiment Name: Zm_Drought_P Parameter: Treatment Value: Drought vs. No Drought
  misc_feature: MA Experiment ID: 20000492 Result: Down-regulated in Transcription
  misc_feature: MA Experiment 20000492 PARAMETER Experiment Name: Zm_Hybrid_Seed_Dev_P Parameter: DAP Value: 12
  misc_feature: MA Experiment 20000492 PARAMETER Experiment Name: Zm_Hybrid_Seed_Dev_P Parameter: Organism Value: Zea mays
  misc_feature: MA Experiment 20000492 PARAMETER Experiment Name: Zm_Hybrid_Seed_Dev_P Parameter: Plant Line Value: 35A19
  misc_feature: MA Experiment 20000492 PARAMETER Experiment Name: Zm_Hybrid_Seed_Dev_P Parameter: Tissue Value: Fert Kernel vs. Unfert Floret
tcgaaaaagcagacgcagagcatcccacggttgtcactcactcggcccagcgctcacgagtcacgagtacccacaactgacgatcgtccatgttcggcggcgacgatggcgctagggcgctgcggcgagccggcagtttcccacgggcaccgcccccgccggcgacggcgatgcacatcctctccaggagcgagtcaatcaagaagaagagcggagccgccaagcggtcgaagcgggcacgcgtgcgcgcggggctcgccgccgcgctgcangagctcaggctcgccggccggaagcacggggccagaagccggggagccggggcgttgtcagaagctgtcagcgccggctccggagccggagccgccgcggggccgcgggctagcgatgacgtccaaggaggaggctgctgcgccgctgctcccctgcacgtgtccgacgttgccgaggcgcaggcgagcagaggagcagcagccaccgctggtcgtcgtcgcgtgaacgcagcaggcggctggacgacgccgctgctgcttgtagcggtgctagccctggcgtgcgtggtggcgctcggcaggacgccggccgtttgcctgctgcacctgtgcggcatggctgtgccgcggcccttgtgcggttcggcctcgacggacgggcgccaccggagcagcgagccctntgctgcagtgcggtgcagcgtcagatgcctgtggctgtgagcttaacattggacatgtacgagcaggtgattagcatcagacgtgttgtttgtcactcatggtctcaattctcatggaccgtccggttctaccggcttggcatgaatgttgcaggcctcgtaatttagctagagagcgtctgtgttgtatgtttaaagttagtggcaggtgtttatatatattcagttgtgtgtttactatttaatgcgtggagtgaaaataatagtacctgtaccagtctgtgtatggttattactccctctttccttt

SEQ ID NO: 750 - protein, 208 aa, Zea mays subsp. mays
  peptide (1)..(208): Ceres Seq. ID no. 13498120
  misc_feature (61)..(61): Xaa is any aa, unknown or other
  misc_feature (196)..(196): Xaa is any aa, unknown or other
MFGGDDGARALRRAGSFPRAPPPPATAMHILSRSESIKKKSGAAKRSKRARVRAGLAAALXELRLAGRKHGARSRGAGALSEAVSAGSGAGAAAGPRASDDVQGGGCCAAAPLHVSDVAEAQASRGAAATAGRRRVNAAGGWTTPLLLVAVLALACVVALGRTPAVCLLHLCGMAVPRPLCGSASTDGRHRSSEPXAAVRCSVRCLWL

SEQ ID NO: 751 - protein, 181 aa, Zea mays subsp. mays
  peptide (1)..(181): Ceres Seq. ID no. 13498121
  misc_feature (34)..(34): Xaa is any aa, unknown or other
  misc_feature (169)..(169): Xaa is any aa, unknown or other
MHILSRSESIKKKSGAAKRSKRARVRAGLAAALXELRLAGRKHGARSRGAGALSEAVSAGSGAGAAAGPRASDDVQGGGCCAAAPLHVSDVAEAQASRGAAATAGRRRVNAAGGWTTPLLLVAVLALACVVALGRTPAVCLLHLCGMAVPRPLCGSASTDGRHRSSEPXAAVRCSVRCLWL

SEQ ID NO: 752 - protein, 165 aa, Zea mays subsp. mays
  peptide (1)..(165): Ceres Seq. ID no. 13498122
  misc_feature (91)..(91): Xaa is any aa, unknown or other
SKKQTQSIPRLSLTRPSAHESRVPTTDDRPCSAATMALGRCGEPAVSHGHRPRRRRRCTSSPGASQSRRRAEPPSGRSGHACARGSPPRCXSSGSPAGSTGPEAGEPGRCQKLSAPAPEPEPPRGRGLAMTSKEEAAAPLLPCTCPTLPRRRRAEEQQPPLVVVA

SEQ ID NO: 753 - DNA, 1025 bp, Zea mays subsp. mays
  misc_feature (1)..(1025): Ceres Seq. ID no. 12346286
  misc_feature: MA Experiment ID: 108559 Result: Down-regulated in Transcription
  misc_feature: MA Experiment 108559 PARAMETER Experiment Name: Zm_5mM_NO_P Parameter: Age (day) Value: 8
  misc_feature: MA Experiment 108559 PARAMETER Experiment Name: Zm_5mM_NO_P Parameter: Organism Value: Zea mays
  misc_feature: MA Experiment 108559 PARAMETER Experiment Name: Zm_5mM_NO_P Parameter: Plant Line Value: 35A19
  misc_feature: MA Experiment 108559 PARAMETER Experiment Name: Zm_5mM_NO_P Parameter: Timepoint (hr) Value: 12
  misc_feature: MA Experiment 108559 PARAMETER Experiment Name: Zm_5mM_NO_P Parameter: Tissue Value: Aerial
  misc_feature: MA Experiment 108559 PARAMETER Experiment Name: Zm_5mM_NO_P Parameter: Treatment Value: 5mM NO vs. No Treatment
atcactctgcaatattcgggttctctactatgtgtaatctcatatcaagattaatgagtatcgtgatcgtataattttgaatcctatcaacccatatggcaaggcaaagaaaatgacagtggacatcattctagattttacaaaatcaaaggagcaaccagacatggctgtcatgatctaagatacttcaacgtgattggatcgaacccaaacatatgactaggagaagctccaaggccactttgtcaagggtctctgcaatgcacctactggtgcatgatttactggaggttgtgcgcatgaatgtgccacacattggtatgggggttggagttgaagcaggtgattttcaccaacattggtttgcgaactggagttgaagcaggttattcatttgatgaaagtgggagagcagtccaaggcaaatttgccatgttggagcagtcacaggagccaaggggctgcagtcacaggtcctgctagccaggatggagcaatcataggacctcctagcagtccaaggaaaatttgcgaggtggagtagttgcaacttttgaaacccacgtgataacatgctcaagcgttcgtatgataaaaaagatggcacataatcaaaagaagatctcatgttctgcgtttgtgaacctgtttgtattttttgaacttgttttgtgaacctctatttgtaaacctgtaaaatctgaggttgtgaatagatttgggtaacttcatacaagtggtggaggcctggtggtaatcctggatgcatataaagcgaggcatgcaatatccatagcactcgtttgacagaaggcaacaccatcaaccttgtcctccacctttaaactagcatgagcaccatccttcttcacatttatattcatgtcccctatacgttcctcaaatacgtttgaaccatgtgtaccactatgtgaaccaactgagttcgtagactgatcaatgagtcaccttattgtggacgcagctctaaaaaatgttgtatctacaaatagattgtgtaaacg

SEQ ID NO: 754 - protein, 59 aa, Zea mays subsp. mays
  peptide (1)..(59): Ceres Seq. ID no. 12346287
MCHTLVWGLELKQVIFTNIGLRTGVEAGYSFDESGRAVQGKFAMLEQSQEPRGCSHRSC

SEQ ID NO: 755 - protein, 54 aa, Zea mays subsp. mays
  peptide (1)..(54): Ceres Seq. ID no. 12346288
MTRRSSKATLSRVSAMHLLVHDLLEVVRMNVPHIGMGVGVEAGDFHQHWFANWS

SEQ ID NO: 756 - protein, 48 aa, Zea mays subsp. mays
  peptide (1)..(48): Ceres Seq. ID no. 12346289
MKVGEQSKANLPCWSSHRSQGAAVTGPASQDGAIIGPPSSPRKICEVE

SEQ ID NO: 757 - DNA, 815 bp, Zea mays subsp. mays
  misc_feature (1)..(815): Ceres Seq. ID no. 12423754
  misc_feature: MA Experiment ID: 20000479 Result: Up-regulated in Transcription
  misc_feature: MA Experiment 20000479 PARAMETER Experiment Name: Zm_Drought_P Parameter: Age (day) Value: 10
  misc_feature: MA Experiment 20000479 PARAMETER Experiment Name: Zm_Drought_P Parameter: Organism Value: Zea mays
  misc_feature: MA Experiment 20000479 PARAMETER Experiment Name: Zm_Drought_P Parameter: Plant Line Value: 35A19
  misc_feature: MA Experiment 20000479 PARAMETER Experiment Name: Zm_Drought_P Parameter: Timepoint (hr) Value: 48
  misc_feature: MA Experiment 20000479 PARAMETER Experiment Name: Zm_Drought_P Parameter: Tissue Value: Aerial
  misc_feature: MA Experiment 20000479 PARAMETER Experiment Name: Zm_Drought_P Parameter: Treatment Value: Drought vs. No Drought
atcgccaaaccaaaacccacacgcatccagaggcaaagctggacaagaaaagcgccaggctgacagagagtccgttcctattctgcctggcgccatgatcatcgagaccctgaaagcgcgcatcctgcgcgtgctgaagccgccgacccgcccgccgccggcggcgcgggcgtggtgctgtacacgacgacgctgcgcggcgtgcggcgcacgttcgaggactgcaacggcgtgcgcgcgctgctggagagcctgggcgcgccgttccaggagcgcgacgtgtccatggaccgcggcctgcgcgaccagctgtgggccgcggccggggagaaggcggtgccgccgcgcctgttcgtgcgcgggcgcgacctcggcggcgcgggccaggtgctcgcgctccacgagcagggccgcctcgccccgctgctgccgtgcggagaggccggggcgagaagcaggtgcggcgcgtgcgccggggtcgggttcgtggtgtgcggcgcctgcgacggcagccggaaggcggggggagacggcggcgggcgctgccgcggcgggtgcaacgagaacggcctcgtcatgtgcccgctctgtctgtccatttagcggccgcgcagggcagggcagtggaaaccaccttcttcgtcgtctcgttctccgcttctgatcagtcgttattagaatttatgaagtgctccccttctcctcgcaggcggaagctgtgtccactccactgctgctggcctgggtcgatccatgtgtgtttcgagtgcttggttttgccatgtgtgtgatgtatatatatgctgctagtttgc

SEQ ID NO: 758 - protein, 220 aa, Zea mays subsp. mays
  peptide (1)..(220): Ceres Seq. ID no. 12423755
SPNQNPHASRGKAGQEKRQADRESVPILPGAMIIETLKARILRVLKPPTRPPPAARAWCCTRRRCAACGARSRTATACARCWRAWARRSRSATCPWTAACATSCGPRPGRRRCRRACSCAGATSAARARCSRSTSRAASPRCCRAERPGREAGAARAPGSGSWCAAPATAAGRRGETAAGAAAAGATRTASSCARSVCPFSGRAGQGSGNHLLRRLVLRF

SEQ ID NO: 759 - protein, 189 aa, Zea mays subsp. mays
  peptide (1)..(189): Ceres Seq. ID no. 12423756
MIIETLKARILRVLKPPTRPPPAARAWCCTRRRCAACGARSRTATACARCWRAWARRSRSATCPWTAACATSCGPRPGRRRCRRACSCAGATSAARARCSRSTSRAASPRCCRAERPGREAGAARAPGSGSWCAAPATAAGRRGETAAGAAAAGATRTASSCARSVCPFSGRAGQGSGNHLLRRLVLRF

SEQ ID NO: 760 - DNA, 689 bp, Zea mays subsp. mays
  misc_feature (1)..(689): Ceres Seq. ID no. 12354093
  misc_feature: MA Experiment ID: 108528 Result: Down-regulated in Transcription
  misc_feature: MA Experiment 108528 PARAMETER Experiment Name: Zm_Imbibed_Seeds_P Parameter: Age (day) Value: 5 vs. 2
  misc_feature: MA Experiment 108528 PARAMETER Experiment Name: Zm_Imbibed_Seeds_P Parameter: Organism Value: Zea mays
  misc_feature: MA Experiment 108528 PARAMETER Experiment Name: Zm_Imbibed_Seeds_P Parameter: Plant Line Value: 35A19
  misc_feature: MA Experiment 108528 PARAMETER Experiment Name: Zm_Imbibed_Seeds_P Parameter: Tissue Value: Aerial vs. Embryo
  misc_feature: MA Experiment ID: 108529 Result: Down-regulated in Transcription
  misc_feature: MA Experiment 108529 PARAMETER Experiment Name: Zm_Imbibed_Seeds_P Parameter: Age (day) Value: 5 vs. 2
  misc_feature: MA Experiment 108529 PARAMETER Experiment Name: Zm_Imbibed_Seeds_P Parameter: Organism Value: Zea mays
  misc_feature: MA Experiment 108529 PARAMETER Experiment Name: Zm_Imbibed_Seeds_P Parameter: Plant Line Value: 35A19
  misc_feature: MA Experiment 108529 PARAMETER Experiment Name: Zm_Imbibed_Seeds_P Parameter: Tissue Value: Roots vs. Embryo
  misc_feature: MA Experiment ID: 108543 Result: Up-regulated in Transcription
  misc_feature: MA Experiment ID: 108546 Result: Down-regulated in Transcription
  misc_feature: MA Experiment 108546 PARAMETER Experiment Name: Zm_Imbibed_Seeds_P Parameter: Age (day) Value: 3 vs. 2
  misc_feature: MA Experiment 108546 PARAMETER Experiment Name: Zm_Imbibed_Seeds_P Parameter: Organism Value: Zea mays
  misc_feature: MA Experiment 108546 PARAMETER Experiment Name: Zm_Imbibed_Seeds_P Parameter: Plant Line Value: 35A19
  misc_feature: MA Experiment 108546 PARAMETER Experiment Name: Zm_Imbibed_Seeds_P Parameter: Tissue Value: Roots vs. Embryo
  misc_feature: MA Experiment ID: 108689 Result: Up-regulated in Transcription
  misc_feature: MA Experiment 108689 PARAMETER Experiment Name: Zm_Drought_Roots_P Parameter: Age (day) Value: 9
  misc_feature: MA Experiment 108689 PARAMETER Experiment Name: Zm_Drought_Roots_P Parameter: Organism Value: Zea mays
  misc_feature: MA Experiment 108689 PARAMETER Experiment Name: Zm_Drought_Roots_P Parameter: Plant Line Value: 35A19
  misc_feature: MA Experiment 108689 PARAMETER Experiment Name: Zm_Drought_Roots_P Parameter: Timepoint (hr) Value: 24
  misc_feature: MA Experiment 108689 PARAMETER Experiment Name: Zm_Drought_Roots_P Parameter: Tissue Value: Roots
  misc_feature: MA Experiment 108689 PARAMETER Experiment Name: Zm_Drought_Roots_P Parameter: Treatment Value: Drought vs. No Drought
acggctcaccggagtgtctccctcccctgcttgcagttcctgtccatgaagatcgccgcttccaacccggtggtgagcttcgacatcgtcgaggacctcttcggccggcagctgaagcagtcacgacgcagcccggcggcagccctgcccgcgatggctctgccgaccggccagctggagccttcctgccttcagatgagccacatgccgcagatgcatccatctgcagcggcaaactccaccggctttgggctggacatggtcgtcaacaacccgtacgcgcccgccggcgcgagctgccctgtccctgtgtcggctgccgcgtcggtatcggtggcggccggaccgtcgacgaccgagccgtgcctcaacgtgaatggcactgctgcctgggacattggctcccggaatttgttcggcggatttgttgcacagtttcagtcagtagaaagtgagtagctgcttcctgaagaccaagccagcagtcacttggcctcatgtgaaatgaaaaaaaaacacagtagtggttagatcagggcaaaataaacccctacggcccaacctgaacatgtttaaagttcagagtcataatggccgtacatgccatcacggaattcccaaactggcggacgatccaataactctaccaaaagatgagcacatcaaacaaaatttgactatgttcatgc

SEQ ID NO: 761 - protein, 152 aa, Zea mays subsp. mays
  peptide (1)..(152): Ceres Seq. ID no. 12354094
TAHRSVSLPCLQFLSMKIAASNPVVSFDIVEDLFGRQLKQSRRSPAAALPAMALPTGQLEPSCLQMSHMPQMHPSAAANSTGFGLDMVVNNPYAPAGASCPVPVSAAASVSVAAGPSTTEPCLNVNGTAAWDIGSRNLFGGFVAQFQSVESE

SEQ ID NO: 762 - protein, 150 aa, Zea mays subsp. mays
  peptide (1)..(150): Ceres Seq. ID no. 12354095
GSPECLPPLLAVPVHEDRRFQPGGELRHRRGPLRPAAEAVTTQPGGSPARDGSADRPAGAFLPSDEPHAADASICSGKLHRLWAGHGRQQPVRARRRELPCPCVGCRVGIGGGRTVDDRAVPQREWHCCLGHWLPEFVRRICCTVSVSRK

SEQ ID NO: 763 - protein, 137 aa, Zea mays subsp. mays
  peptide (1)..(137): Ceres Seq. ID no. 12354096
MKIAASNPVVSFDIVEDLFGRQLKQSRRSPAAALPAMALPTGQLEPSCLQMSHMPQMHPSAAANSTGFGLDMVVNNPYAPAGASCPVPVSAAASVSVAAGPSTTEPCLNVNGTAAWDIGSRNLFGGFVAQFQSVESE

SEQ ID NO: 764 - DNA, 1203 bp, Zea mays subsp. mays
  misc_feature (1)..(1203): Ceres Seq. ID no. 12406274
  misc_feature: MA Experiment ID: 20000534 Result: Up-regulated in Transcription
  misc_feature: MA Experiment 20000534 PARAMETER Experiment Name: Zm_Hybrid_Pollen_P Parameter: Age (day) Value: 8
  misc_feature: MA Experiment 20000534 PARAMETER Experiment Name: Zm_Hybrid_Pollen_P Parameter: Organism Value: Zea mays
  misc_feature: MA Experiment 20000534 PARAMETER Experiment Name: Zm_Hybrid_Pollen_P Parameter: Plant Line Value: 35A19
  misc_feature: MA Experiment 20000534 PARAMETER Experiment Name: Zm_Hybrid_Pollen_P Parameter: Tissue Value: Pollen vs. Aerial
gcacgagaccattacctagaacatcctaatcgaaaaacagtaccgtctctgtcgaagaacacgtagtacaccgtatacggctgagcggttgtgtataaccatcgtcggatcactcactctctgacccttgggaacaggcacctgtagatcctggacatgaaggacctcttggccttccccttcccgtgtcgccgcgcgcgtggcggcgctgcgtggtcgggcgacgacagcagcttcggcggctgcacgggcggcgcgggggcggtcctggcctcctcccggtggcgcttcaccttctcgaactgcaccgtgaatccctgcgccgccatcgcggcgttctgctcgtcccacacgccgaacctcggcacggccgacggcttgttggggcgcggcggcagcgggggctgctggtggcgcggcggcgacggcgacggcgaggcggacgccggcctcggcgcaccgtggtggtattgggcgccgtggccgtggctgccgccttgtggctgcggcgggaagcttcggtcgctggtactgttgctggtgtacctgggctggtacggcctgggcggcgagaacttgctgccgcggctactggcctccgacgccgcgttgcttgctgctgctcccggtgcggcggtggtgcccgtggccggggtgcggatgctggtgctggtacgtccgatggtggggctgaggcgctggcgcgtgggcgtgggcgtgcgagcttggcggccgggagggcggcacgttcctggcgctgagattctcgtagtgctcgtaggggtcgaagtcgtagccagcagccggcgcgtggccgtgcgagctcggcgggcgggagggcacgttcctgctgctgaggttgtcgtagtgctcataggggtcgaagtcgccgtagccgtagccggcgccgggcgccggcgccctggcagcggcgggctggccgtgcgagctcggcgggcgtgacggcggctttctgctgatgctctcgtagtgctcgtacgggtcgaagtcgtagcctccgttaccgccggcagcgggggcggaaggcttgggagcggccgccggtggcgcagccggcggagccttgttgtctctcaccttctcgaagaagacggtgtagccgatgttctcggcgtcccacgagccgaacttgggcacgaccgcgtgcccggcctgcaatcaatctcaatgagcaattgctgt

SEQ ID NO: 765 - protein, 268 aa, Zea mays subsp. mays
  peptide (1)..(268): Ceres Seq. ID no. 12406275
MKDLLAFPFPCRRARGGAAWSGDDSSFGGCTGGAGAVLASSRWRFTFSNCTVNPCAAIAAFCSSHTPNLGTADGLLGRGGSGGCWWRGGDGDGEADAGLGAPWWYWAPWPWLPPCGCGGKLRSLVLLLVYLGWYGLGGENLLPRLLASDAALLAAAPGAAVVPVAGVRMLVLVRPMVGLRRWRVGVGVRAWRPGGRHVPGAEILVVLVGVEVVASSRRVAVRARRAGGHVPAAEVVVVLIGVEVAVAVAGAGRRRPGSGGLAVRARRA

SEQ ID NO: 766 - DNA, 1357 bp, Zea mays subsp. mays
  misc_feature (1)..(1357): Ceres Seq. ID no. 12407063
  misc_feature: MA Experiment ID: 108522 Result: Down-regulated in Transcription
  misc_feature: MA Experiment 108522 PARAMETER Experiment Name: Zm_42deg_Heat_P Parameter: Age (day) Value: 8
  misc_feature: MA Experiment 108522 PARAMETER Experiment Name: Zm_42deg_Heat_P Parameter: Organism Value: Zea mays
  misc_feature: MA Experiment 108522 PARAMETER Experiment Name: Zm_42deg_Heat_P Parameter: Plant Line Value: 35A19
  misc_feature: MA Experiment 108522 PARAMETER Experiment Name: Zm_42deg_Heat_P Parameter: Temperature (deg C) Value: 42 vs. 22
  misc_feature: MA Experiment 108522 PARAMETER Experiment Name: Zm_42deg_Heat_P Parameter: Timepoint (hr) Value: 1
  misc_feature: MA Experiment 108522 PARAMETER Experiment Name: Zm_42deg_Heat_P Parameter: Tissue Value: Aerial
  misc_feature: MA Experiment ID: 108529 Result: Down-regulated in Transcription
  misc_feature: MA Experiment 108529 PARAMETER Experiment Name: Zm_Imbibed_Seeds_P Parameter: Age (day) Value: 5 vs. 2
  misc_feature: MA Experiment 108529 PARAMETER Experiment Name: Zm_Imbibed_Seeds_P Parameter: Organism Value: Zea mays
  misc_feature: MA Experiment 108529 PARAMETER Experiment Name: Zm_Imbibed_Seeds_P Parameter: Plant Line Value: 35A19
  misc_feature: MA Experiment 108529 PARAMETER Experiment Name: Zm_Imbibed_Seeds_P Parameter: Tissue Value: Roots vs. Embryo
  misc_feature: MA Experiment ID: 108533 Result: Down-regulated in Transcription
  misc_feature: MA Experiment 108533 PARAMETER Experiment Name: Zm_4deg_Cold_P Parameter: Age (hr) Value: 8
  misc_feature: MA Experiment 108533 PARAMETER Experiment Name: Zm_4deg_Cold_P Parameter: Organism Value: Zea mays
  misc_feature: MA Experiment 108533 PARAMETER Experiment Name: Zm_4deg_Cold_P Parameter: Plant Line Value: 35A19
  misc_feature: MA Experiment 108533 PARAMETER Experiment Name: Zm_4deg_Cold_P Parameter: Temperature (deg C) Value: 4 vs. 22
  misc_feature: MA Experiment 108533 PARAMETER Experiment Name: Zm_4deg_Cold_P Parameter: Timepoint (hr) Value: 1
  misc_feature: MA Experiment 108533 PARAMETER Experiment Name: Zm_4deg_Cold_P Parameter: Tissue Value: Aerial
  misc_feature: MA Experiment ID: 108535 Result: Down-regulated in Transcription
  misc_feature: MA Experiment 108535 PARAMETER Experiment Name: Zm_Meristem_P Parameter: Age (day) Value: 8
  misc_feature: MA Experiment 108535 PARAMETER Experiment Name: Zm_Meristem_P Parameter: Organism Value: Zea mays
  misc_feature: MA Experiment 108535 PARAMETER Experiment Name: Zm_Meristem_P Parameter: Plant Line Value: 35A19
  misc_feature: MA Experiment 108535 PARAMETER Experiment Name: Zm_Meristem_P Parameter: Tissue Value: Root Meristem vs. Above Root Meristem
  misc_feature: MA Experiment ID: 108536 Result: Up-regulated in Transcription
  misc_feature: MA Experiment 108536 PARAMETER Experiment Name: Zm_Meristem_P Parameter: Age (day) Value: 8
  misc_feature: MA Experiment 108536 PARAMETER Experiment Name: Zm_Meristem_P Parameter: Organism Value: Zea mays
  misc_feature: MA Experiment 108536 PARAMETER Experiment Name: Zm_Meristem_P Parameter: Plant Line Value: 35A19
  misc_feature: MA Experiment 108536 PARAMETER Experiment Name: Zm_Meristem_P Parameter: Tissue Value: Shoot Meristem vs. Above Shoot Meristem
  misc_feature: MA Experiment ID: 108543 Result: Up-regulated in Transcription
  misc_feature: MA Experiment ID: 108546 Result: Down-regulated in Transcription
  misc_feature: MA Experiment 108546 PARAMETER Experiment Name: Zm_Imbibed_Seeds_P Parameter: Age (day) Value: 3 vs. 2
  misc_feature: MA Experiment 108546 PARAMETER Experiment Name: Zm_Imbibed_Seeds_P Parameter: Organism Value: Zea mays
  misc_feature: MA Experiment 108546 PARAMETER Experiment Name: Zm_Imbibed_Seeds_P Parameter: Plant Line Value: 35A19
  misc_feature: MA Experiment 108546 PARAMETER Experiment Name: Zm_Imbibed_Seeds_P Parameter: Tissue Value: Roots vs. Embryo
  misc_feature: MA Experiment ID: 108688 Result: Down-regulated in Transcription
  misc_feature: MA Experiment 108688 PARAMETER Experiment Name: Zm_Embryos-Flowers__P Parameter: Tissue Value: Immature Flowers vs. Aerial+
  misc_feature: MA Experiment ID: 20000479 Result: Down-regulated in Transcription
  misc_feature: MA Experiment 20000479 PARAMETER Experiment Name: Zm_Drought_P Parameter: Age (day) Value: 10
  misc_feature: MA Experiment 20000479 PARAMETER Experiment Name: Zm_Drought_P Parameter: Organism Value: Zea mays
  misc_feature: MA Experiment 20000479 PARAMETER Experiment Name: Zm_Drought_P Parameter: Plant Line Value: 35A19
  misc_feature: MA Experiment 20000479 PARAMETER Experiment Name: Zm_Drought_P Parameter: Timepoint (hr) Value: 48
  misc_feature: MA Experiment 20000479 PARAMETER Experiment Name: Zm_Drought_P Parameter: Tissue Value: Aerial
  misc_feature: MA Experiment 20000479 PARAMETER Experiment Name: Zm_Drought_P Parameter: Treatment Value: Drought vs. No Drought
  misc_feature: MA Experiment ID: 20000480 Result: Down-regulated in Transcription
  misc_feature: MA Experiment 20000480 PARAMETER Experiment Name: Zm_Drought_P Parameter: Age (day) Value: 11
  misc_feature: MA Experiment 20000480 PARAMETER Experiment Name: Zm_Drought_P Parameter: Organism Value: Zea mays
  misc_feature: MA Experiment 20000480 PARAMETER Experiment Name: Zm_Drought_P Parameter: Plant Line Value: 35A19
  misc_feature: MA Experiment 20000480 PARAMETER Experiment Name: Zm_Drought_P Parameter: Timepoint (hr) Value: 72
  misc_feature: MA Experiment 20000480 PARAMETER Experiment Name: Zm_Drought_P Parameter: Tissue Value: Aerial
  misc_feature: MA Experiment 20000480 PARAMETER Experiment Name: Zm_Drought_P Parameter: Treatment Value: Drought vs. No Drought
  misc_feature: MA Experiment ID: 20000492 Result: Down-regulated in Transcription
  misc_feature: MA Experiment 20000492 PARAMETER Experiment Name: Zm_Hybrid_Seed_Dev_P Parameter: DAP Value: 12
  misc_feature: MA Experiment 20000492 PARAMETER Experiment Name: Zm_Hybrid_Seed_Dev_P Parameter: Organism Value: Zea mays
  misc_feature: MA Experiment 20000492 PARAMETER Experiment Name: Zm_Hybrid_Seed_Dev_P Parameter: Plant Line Value: 35A19
  misc_feature: MA Experiment 20000492 PARAMETER Experiment Name: Zm_Hybrid_Seed_Dev_P Parameter: Tissue Value: Fert Kernel vs. Unfert Floret
  misc_feature: MA Experiment ID: 20000535 Result: Down-regulated in Transcription
  misc_feature: MA Experiment 20000535 PARAMETER Experiment Name: Zm_Hybrid_Seed_Dev_P Parameter: DAP Value: 30 vs. 12
  misc_feature: MA Experiment 20000535 PARAMETER Experiment Name: Zm_Hybrid_Seed_Dev_P Parameter: Organism Value: Zea mays
  misc_feature: MA Experiment 20000535 PARAMETER Experiment Name: Zm_Hybrid_Seed_Dev_P Parameter: Plant Line Value: 35A19
  misc_feature: MA Experiment 20000535 PARAMETER Experiment Name: Zm_Hybrid_Seed_Dev_P Parameter: Tissue Value: Embryo vs. Unfert Floret
atcggtggctcacgaccgagctgctgaggcaaagcttgtcccgcagtccttcccttagccttaacactcggagttgatcccgtctccgggggaagcagctggtaataatggcgcggtgccaggggaccgttgagagcctctgccaggggctgctcgacctcgacgacgacaagttcggtgcaatgtgcagcgccttcggctacctccaggagtggccggacctgggtgccgccatgtgcggcgccaatctcgccgtgccgcctgccgtggcgacgccgagcgccggcgacggcaacgattcctcctcttgcagcgtcagcggcgggttgaggaagaggaggccggacgcgtacctcgatgccaagggtggtgcgaacggcatgaacaagagacccagagggaagcagcagccgtctggcctctctgagatcgcggcggcgcccgggaaagggaagcaggagaggccaaaggctggcaccaagaagaaggccgaggctgcggcggcggcggcggctgccggccagaagaccgactacatccacgtccgggcccgcctgcggccaggccacggacagccacagcctcgccgagcgggtgaggagggagaggatcagcgagcggatgcggtacctgcaggagctggtgcccgggtgcagcaaggtcacgggcaaggccggcatgctcgacgagatcatcaactacgtccagtccctgcagaagcaagtcgagttcttgtccatgaagatcgccgcttccaacccggtggtgagcttcgacatcgtcgaggacctcttcggccgccagctgaagcaggcgtgcggcccggcggccggccagctggagccgtcctgccttcagatgagcatgagccccatgcagcaggtagtgcacccgtctgcagcggcgggctccactggctttgggccgctggacatggtcctcagcaacctgtacgcgcccgccgccgcaagctgccctgtgtcggctgccccgtcggtctcggtggccgccggaccgtcgaccatcgagccgtgcctcaacgtgaatggaactgctgctgcctgggatattggctcccagaatttgttcagcggatttgatgcacaatttcagtcggtagaaagtgagtagctgcttcctcaagaacaagccagaagttactttgccgcctcttgtgaaatgaaagaacacaatagtggttagatcagggtaaaaatgaaccccccaacgccaacctgaacatgtttaaagctcagagttcataatggccgtaacgtgccatcacagaaaactcaaactggctgccgatcaaataactccaccaaaaatgagcacatcaaataaaattttgacttgt

SEQ ID NO: 767 - protein, 330 aa, Zea mays subsp. mays
  peptide (1)..(330): Ceres Seq. ID no. 12407064
MARCQGTVESLCQGLLDLDDDKFGAMCSAFGYLQEWPDLGAAMCGANLAVPPAVATPSAGDGNDSSSCSVSGGLRKRRPDAYLDAKGGANGMNKRPRGKQQPSGLSEIAAAPGKGKQERPKAGTKKKAEAAAAAAAAGQKTDYIHVRARLRPGHGQPQPRRAGEEGEDQRADAVPAGAGARVQQGHGQGRHARRDHQLRPVPAEASRVLVHEDRRFQPGGELRHRRGPLRPPAEAGVRPGGRPAGAVLPSDEHEPHAAGSAPVCSGGLHWLWAAGHGPQQPVRARRRKLPCVGCPVGLGGRRTVDHRAVPQREWNCCCLGYWLPEFVQRI

SEQ ID NO: 768 - protein, 305 aa, Zea mays subsp. mays
  peptide (1)..(305): Ceres Seq. ID no. 12407065
MCSAFGYLQEWPDLGAAMCGANLAVPPAVATPSAGDGNDSSSCSVSGGLRKRRPDAYLDAKGGANGMNKRPRGKQQPSGLSEIAAAPGKGKQERPKAGTKKKAEAAAAAAAAGQKTDYIHVRARLRPGHGQPQPRRAGEEGEDQRADAVPAGAGARVQQGHGQGRHARRDHQLRPVPAEASRVLVHEDRRFQPGGELRHRRGPLRPPAEAGVRPGGRPAGAVLPSDEHEPHAAGSAPVCSGGLHWLWAAGHGPQQPVRARRRKLPCVGCPVGLGGRRTVDHRAVPQREWNCCCLGYWLPEFVQRI

SEQ ID NO: 769 - protein, 288 aa, Zea mays subsp. mays
  peptide (1)..(288): Ceres Seq. ID no. 12407066
MCGANLAVPPAVATPSAGDGNDSSSCSVSGGLRKRRPDAYLDAKGGANGMNKRPRGKQQPSGLSEIAAAPGKGKQERPKAGTKKKAEAAAAAAAAGQKTDYIHVRARLRPGHGQPQPRRAGEEGEDQRADAVPAGAGARVQQGHGQGRHARRDHQLRPVPAEASRVLVHEDRRFQPGGELRHRRGPLRPPAEAGVRPGGRPAGAVLPSDEHEPHAAGSAPVCSGGLHWLWAAGHGPQQPVRARRRKLPCVGCPVGLGGRRTVDHRAVPQREWNCCCLGYWLPEFVQRI

SEQ ID NO: 770 - DNA, 575 bp, Zea mays subsp. mays
  misc_feature (1)..(575): Ceres Seq. ID no. 12416865
  misc_feature: MA Experiment ID: 108535 Result: Up-regulated in Transcription
  misc_feature: MA Experiment 108535 PARAMETER Experiment Name: Zm_Meristem_P Parameter: Age (day) Value: 8
  misc_feature: MA Experiment 108535 PARAMETER Experiment Name: Zm_Meristem_P Parameter: Organism Value: Zea mays
  misc_feature: MA Experiment 108535 PARAMETER Experiment Name: Zm_Meristem_P Parameter: Plant Line Value: 35A19
  misc_feature: MA Experiment 108535 PARAMETER Experiment Name: Zm_Meristem_P Parameter: Tissue Value: Root Meristem vs. Above Root Meristem
  misc_feature: MA Experiment ID: 108544 Result: Down-regulated in Transcription
  misc_feature: MA Experiment ID: 20000492 Result: Up-regulated in Transcription
  misc_feature: MA Experiment 20000492 PARAMETER Experiment Name: Zm_Hybrid_Seed_Dev_P Parameter: DAP Value: 12
  misc_feature: MA Experiment 20000492 PARAMETER Experiment Name: Zm_Hybrid_Seed_Dev_P Parameter: Organism Value: Zea mays
  misc_feature: MA Experiment 20000492 PARAMETER Experiment Name: Zm_Hybrid_Seed_Dev_P Parameter: Plant Line Value: 35A19
  misc_feature: MA Experiment 20000492 PARAMETER Experiment Name: Zm_Hybrid_Seed_Dev_P Parameter: Tissue Value: Fert Kernel vs. Unfert Floret
gtatggaggtccatatggtgcctacgggtcatatggtggtgcctatggaggtggtgcgtatggtgctccaggagggtatggtgggggaggatatggcagctacggtggtgctggaggcatgggtgggggtggcagcactggtggtcggggatccagcagataccacccttatgggaaatgatcatccattctctgtgtttctctaggatctgataataaagccatacctttcctcgtttctgctactgagaaaatggaacatcccattcgtcttgttgaatcagcggcatntggacatttttttccttggaacttgcattgcacatcaaagattctatagtctatagtcgctgaaccctgaaccgcccccaccccgagctttctgtagaagctgcagctgaaattctcgtagtctggcatgagccttagaatgcccttgaaactattatctttgtggttaacattatggtgtcatggaacagatgtacgttgttgtaacattcactcactgatcagagacttgctatctctgcatatgtggagagaagctttgcaaatgattgactgatactatt

SEQ ID NO: 771 - protein, 70 aa, Zea mays subsp. mays
  peptide (1)..(70): Ceres Seq. ID no. 12416866
VWRSIWCLRVIWWCLWRWCVWCSRRVWWGRIWQLRWCWRHGWGWQHWWSGIQQIPPLWEMIIHSLCFSRI

SEQ ID NO: 772 - protein, 67 aa, Zea mays subsp. mays
  peptide (1)..(67): Ceres Seq. ID no. 12416867
MEVHMVPTGHMVVPMEVVRMVLQEGMVGEDMAATVVLEAWVGVAALVVGDPADTTLMGNDHPFSVFL

SEQ ID NO: 773 - protein, 63 aa, Zea mays subsp. mays
  peptide (1)..(63): Ceres Seq. ID no. 12416868
MVPTGHMVVPMEVVRMVLQEGMVGEDMAATVVLEAWVGVAALVVGDPADTTLMGNDHPFSVFL

SEQ ID NO: 774 - DNA, 1338 bp, Zea mays subsp. mays
  misc_feature (1)..(1338): Ceres Seq. ID no. 12386460
  misc_feature: MA Experiment ID: 108528 Result: Up-regulated in Transcription
  misc_feature: MA Experiment 108528 PARAMETER Experiment Name: Zm_Imbibed_Seeds_P Parameter: Age (day) Value: 5 vs. 2
  misc_feature: MA Experiment 108528 PARAMETER Experiment Name: Zm_Imbibed_Seeds_P Parameter: Organism Value: Zea mays
  misc_feature: MA Experiment 108528 PARAMETER Experiment Name: Zm_Imbibed_Seeds_P Parameter: Plant Line Value: 35A19
  misc_feature: MA Experiment 108528 PARAMETER Experiment Name: Zm_Imbibed_Seeds_P Parameter: Tissue Value: Aerial vs. Embryo
  misc_feature: MA Experiment ID: 108536 Result: Down-regulated in Transcription
  misc_feature: MA Experiment 108536 PARAMETER Experiment Name: Zm_Meristem_P Parameter: Age (day) Value: 8
  misc_feature: MA Experiment 108536 PARAMETER Experiment Name: Zm_Meristem_P Parameter: Organism Value: Zea mays
  misc_feature: MA Experiment 108536 PARAMETER Experiment Name: Zm_Meristem_P Parameter: Plant Line Value: 35A19
  misc_feature: MA Experiment 108536 PARAMETER Experiment Name: Zm_Meristem_P Parameter: Tissue Value: Shoot Meristem vs. Above Shoot Meristem
  misc_feature: MA Experiment ID: 108543 Result: Up-regulated in Transcription
  misc_feature: MA Experiment ID: 108544 Result: Down-regulated in Transcription
  misc_feature: MA Experiment ID: 108545 Result: Up-regulated in Transcription
  misc_feature: MA Experiment 108545 PARAMETER Experiment Name: Zm_Imbibed_Seeds_P Parameter: Age (day) Value: 3 vs. 2
  misc_feature: MA Experiment 108545 PARAMETER Experiment Name: Zm_Imbibed_Seeds_P Parameter: Organism Value: Zea mays
  misc_feature: MA Experiment 108545 PARAMETER Experiment Name: Zm_Imbibed_Seeds_P Parameter: Plant Line Value: 35A19
  misc_feature: MA Experiment 108545 PARAMETER Experiment Name: Zm_Imbibed_Seeds_P Parameter: Tissue Value: Aerial vs. Embryo
  misc_feature: MA Experiment ID: 20000479 Result: Down-regulated in Transcription
  misc_feature: MA Experiment 20000479 PARAMETER Experiment Name: Zm_Drought_P Parameter: Age (day) Value: 10
  misc_feature: MA Experiment 20000479 PARAMETER Experiment Name: Zm_Drought_P Parameter: Organism Value: Zea mays
  misc_feature: MA Experiment 20000479 PARAMETER Experiment Name: Zm_Drought_P Parameter: Plant Line Value: 35A19
  misc_feature: MA Experiment 20000479 PARAMETER Experiment Name: Zm_Drought_P Parameter: Timepoint (hr) Value: 48
  misc_feature: MA Experiment 20000479 PARAMETER Experiment Name: Zm_Drought_P Parameter: Tissue Value: Aerial
  misc_feature: MA Experiment 20000479 PARAMETER Experiment Name: Zm_Drought_P Parameter: Treatment Value: Drought vs. No Drought
  misc_feature: MA Experiment ID: 20000480 Result: Down-regulated in Transcription
  misc_feature: MA Experiment 20000480 PARAMETER Experiment Name: Zm_Drought_P Parameter: Age (day) Value: 11
  misc_feature: MA Experiment 20000480 PARAMETER Experiment Name: Zm_Drought_P Parameter: Organism Value: Zea mays
  misc_feature: MA Experiment 20000480 PARAMETER Experiment Name: Zm_Drought_P Parameter: Plant Line Value: 35A19
  misc_feature: MA Experiment 20000480 PARAMETER Experiment Name: Zm_Drought_P Parameter: Timepoint (hr) Value: 72
  misc_feature: MA Experiment 20000480 PARAMETER Experiment Name: Zm_Drought_P Parameter: Tissue Value: Aerial
  misc_feature: MA Experiment 20000480 PARAMETER Experiment Name: Zm_Drought_P Parameter: Treatment Value: Drought vs. No Drought
  misc_feature: MA Experiment ID: 20000488 Result: Down-regulated in Transcription
  misc_feature: MA Experiment 20000488 PARAMETER Experiment Name: Zm_50mM_NH4NO3_L_to_H_P Parameter: Organism Value: Zea mays
  misc_feature: MA Experiment 20000488 PARAMETER Experiment Name: Zm_50mM_NH4NO3_L_to_H_P Parameter: Timepoint (hr) Value: 8
  misc_feature: MA Experiment 20000488 PARAMETER Experiment Name: Zm_50mM_NH4NO3_L_to_H_P Parameter: Tissue Value: Leaves
  misc_feature: MA Experiment 20000488 PARAMETER Experiment Name: Zm_50mM_NH4NO3_L_to_H_P Parameter: Treatment Value: 50mM NH4NO3 vs. 100mM Mannitol
  misc_feature: MA Experiment ID: 20000629 Result: Up-regulated in Transcription
  misc_feature: MA Experiment 20000629 PARAMETER Experiment Name: Zm_Herbicide-Treatments_P Parameter: Timepoint (hr) Value: 12
  misc_feature: MA Experiment 20000629 PARAMETER Experiment Name: Zm_Herbicide-Treatments_P Parameter: Tissue Value: Aerial
  misc_feature: MA Experiment 20000629 PARAMETER Experiment Name: Zm_Herbicide-Treatments_P Parameter: Treatment Value: Trimec vs. No Treatment
agtgcaagccaagcattctcctcacacacgtacttccgccagcgcagctagctagctgttctcttcttgccatcatctctcgtctgtgatcgaacgccggcgcgcggccagcatggagatgatcgacgcggagctgcgtcttggcccgcccgggagcaacaacagcgacgtcgtcgtcaccgtcgtgccgcctgcagcggcgaggaagccggcggcgccgcgcgccggcgccggcttcggcggcgaaacggccgtcctcgtcggtggtgaagagcgacgcgtccgggacgggcgaccatgacgacgacgccgcaccggcctccaaggtgcgggcggtggggtggccgccggtaagagcgtaccggaagaacgcgttccacgcggcggcggaggcggcgaggaggaccaataataagggcgaggagctgcagggaggcggccgcctgtacgtgaaggtgagcatggacggggcgccctacctccgcaaggtcgacctgcggacctacggcggctaccgggagctgagggacgcgctggacgcgctcttcggctgcttctcctcctcctcctcctcggccgacggcggcagccagttcgccgtcgcctacgaggacaaggacggcgacctcatgctcgccggcgacgtgccctgggagatgttcatctgctcctgcaagaagctgaggatcatgagggggtccgaagcaagataaccaacgcagcgaggatgcaaagaacatgttggatgcatggcatgcatggaggtccagctagctatggtccgtccaactcatgcatgggacagagcacagagggagagagagagacagaaaaaaaagggaggtctttatatcggccatccaatggaattggaggcgcggcgtagggtatatacctgcacagggatcggaggccccatgcatgcatgcgcgcgtcgtcgtgttctacggccagcccagccggctcataccatacacaccatggacatgcacatgatcagatggagcatggaggtgatggttcaaggatcacggcggcgtagtacgcgtcacgccgtgtctcccgccatcagtcaggcggacgtgctgctgtggacggctgactgggacgtgcatgcatggcagatcggagattattcagccaagtagtagcatcggtgaaaagctactaccacctaggattttttttttttgtgctgtgcacgctagttagctcatatgctgtagtttcatagctagcttgtgcttgctagcctatctgtaactttgagttcctcttttgtaagtgacctgggcccatgtatattagttcattctaggggtacgtgcagccgcaccc

SEQ ID NO: 775 - protein, 132 aa, Zea mays subsp. mays
  peptide (1)..(132): Ceres Seq. ID no. 12386461
MACMEVQLAMVRPTHAWDRAQRERERQKKKGGLYIGHPMELEARRRVYTCTGIGGPMHACARRRVLRPAQPAHTIHTMDMHMIRWSMEVMVQGSRRRSTRHAVSPAISQADVLLWTADWDVHAWQIGDYSAK

SEQ ID NO: 776 - protein, 129 aa, Zea mays subsp. mays
  peptide (1)..(129): Ceres Seq. ID no. 12386462
MEVQLAMVRPTHAWDRAQRERERQKKKGGLYIGHPMELEARRRVYTCTGIGGPMHACARRRVLRPAQPAHTIHTMDMHMIRWSMEVMVQGSRRRSTRHAVSPAISQADVLLWTADWDVHAWQIGDYSAK

SEQ ID NO: 777 - protein, 123 aa, Zea mays subsp. mays
  peptide (1)..(123): Ceres Seq. ID no. 12386463
MVRPTHAWDRAQRERERQKKKGGLYIGHPMELEARRRVYTCTGIGGPMHACARRRVLRPAQPAHTIHTMDMHMIRWSMEVMVQGSRRRSTRHAVSPAISQADVLLWTADWDVHAWQIGDYSAK

SEQ ID NO: 778 - DNA, 1383 bp, Zea mays subsp. mays
  misc_feature (1)..(1383): Ceres Seq. ID no. 12387170
  misc_feature: MA Experiment ID: 108597 Result: Up-regulated in Transcription
  misc_feature: MA Experiment 108597 PARAMETER Experiment Name: Zm_100uM_ABA_P Parameter: Age (day) Value: 9
  misc_feature: MA Experiment 108597 PARAMETER Experiment Name: Zm_100uM_ABA_P Parameter: Organism Value: Zea mays
  misc_feature: MA Experiment 108597 PARAMETER Experiment Name: Zm_100uM_ABA_P Parameter: Plant Line Value: 35A19
  misc_feature: MA Experiment 108597 PARAMETER Experiment Name: Zm_100uM_ABA_P Parameter: Timepoint (hr) Value: 24
  misc_feature: MA Experiment 108597 PARAMETER Experiment Name: Zm_100uM_ABA_P Parameter: Tissue Value: Aerial
  misc_feature: MA Experiment 108597 PARAMETER Experiment Name: Zm_100uM_ABA_P Parameter: Treatment Value: 100uM ABA vs. No Treatment
  misc_feature: MA Experiment ID: 20000535 Result: Up-regulated in Transcription
  misc_feature: MA Experiment 20000535 PARAMETER Experiment Name: Zm_Hybrid_Seed_Dev_P Parameter: DAP Value: 30 vs. 12
  misc_feature: MA Experiment 20000535 PARAMETER Experiment Name: Zm_Hybrid_Seed_Dev_P Parameter: Organism Value: Zea mays
  misc_feature: MA Experiment 20000535 PARAMETER Experiment Name: Zm_Hybrid_Seed_Dev_P Parameter: Plant Line Value: 35A19
  misc_feature: MA Experiment 20000535 PARAMETER Experiment Name: Zm_Hybrid_Seed_Dev_P Parameter: Tissue Value: Embryo vs. Unfert Floret
atcggcatcggaatcggcgttgccacttccaccgcttctgctccccttcgccctgcttcatgttccgcgattcccttcgcacaccctcccgctgccgccgctgttctcctaccacccgtcctcccgcgctgggtagcggtactaatttaggatctgatacactttctgtgcggaagcgcggtcctgctaaatccgtgtgccggggttccagattgcaggagcttgccttgtagcgtcgggttatgctggttgcagcgagtggctaagcagagatccagtcgcggcgcgctgcttgcttgcttccaaccctgggtgcttgtgctactctttcaagctcgtgatctcatcatgggcaatgcagcatgctcgttcttactagttactaagtttatttatccatacaacccatgttataagttgggtcaggaactcaggatacggatactgttatgcagctgtgcaggcagggccacagaacaagtttgtttgtacacagactcaagaaatggaaaacaaattcttgttatttgggaaaacaacttcttgttatttgcgtttgcacaccattttgagttgatttcatccactgaagactaaagagtgaagtaataaggtcgtgtacacttgattttcccctcctctggttggttgcacaggaccatgatctggtcgttgagccgaggtcattcaccggttccactcagcccagcagaccggatgtaaggccatcgtcttcatcgtccagcgataatgccagggcacataattcaggtaaagtatgtatgttgtggacatccatcattttcttctgtcacagttgctgcactacctgtgctttgctgggcacttgataatgttgccagattccgaaggcttaactttgccggatcctctttctataggagatacctggaagagccttgtctttggctgggtaaacacaaataatactacgctgagcctcctcagttcaaatgctgaaagcgccttgggttttcttcactgttctcgtggcgcggtagcataattcagacattcatgtactgggagctgagggattagtacgaggccatttatgctgttttgctgcatgcgttgaagccgatgtatcatgctgctcccgtgacatccagacgccccgttcctccttccagacgcccatttctgggatccaaatatggtggctctggtagggtggtttaagatcatgtatctgctgctgaatagctgagctgcccgggttgtctgcacagaacttagcacagccgctgtgttcttatgtaatgctgcagcagtgcgcgggataagttttctgcagaaaaatagcattcattgtatttgtctggaacgtatgatcccaatttgataactgtagcttctgct

SEQ ID NO: 779 - protein, 82 aa, Zea mays subsp. mays
  peptide (1)..(82): Ceres Seq. ID no. 12387171
MGNAACSFLLVTKFIYPYNPCYKLGQELRIRILLCSCAGRATEQVCLYTDSRNGKQILVIWENNFLLFAFAHHFELISSTED

SEQ ID NO: 780 - protein, 82 aa, Zea mays subsp. mays
  peptide (1)..(82): Ceres Seq. ID no. 12387172
MYVVDIHHFLLSQLLHYLCFAGHLIMLPDSEGLTLPDPLSIGDTWKSLVFGWVNTNNTTLSLLSSNAESALGFLHCSRGAVA

SEQ ID NO: 781 - protein, 76 aa, Zea mays subsp. mays
  peptide (1)..(76): Ceres Seq. ID no. 12387173
RHRNRRCHFHRFCSPSPCFMFRDSLRTPSRCRRCSPTTRPPALGSGTNLGSDTLSVRKRGPAKSVCRGSRLQELAL

SEQ ID NO: 782 - DNA, 548 bp, Zea mays subsp. mays
  misc_feature (1)..(548): Ceres Seq. ID no. 12340454
  misc_feature: MA Experiment ID: 108535 Result: Up-regulated in Transcription
  misc_feature: MA Experiment 108535 PARAMETER Experiment Name: Zm_Meristem_P Parameter: Age (day) Value: 8
  misc_feature: MA Experiment 108535 PARAMETER Experiment Name: Zm_Meristem_P Parameter: Organism Value: Zea mays
  misc_feature: MA Experiment 108535 PARAMETER Experiment Name: Zm_Meristem_P Parameter: Plant Line Value: 35A19
  misc_feature: MA Experiment 108535 PARAMETER Experiment Name: Zm_Meristem_P Parameter: Tissue Value: Root Meristem vs. Above Root Meristem
aacccttgtgtcgtaccctccggatcgaatcctagacgacgcgaccggcacggcggcggcgcacagccccgacgacgaccctccccgctgccttctccccgatctctacgacaccaattatagatggggaaggtgaacctcctccctcttgggatccggcaccaactccaaaagttctacactcagatgagacaggcgaggttaaggttcgacgactcctcgagggacatgccaagaactatcaagttacattgttgtttattttccctgtcttattgggaagcaaagtattggaaaaaaactgcatttagttgatgatccactagattttaggctatgtcccactcgagtctttatactgtggtgttgtctcttgttatgcaatgttccctgcatgatttttgtttttggcatgtctacaactggttcagctgttcggctgctcattatggttgcagtcaaccataagattgttgtcttagcacctttgatatgtcgtagcaaaaactgctagttcactctttgatatgtctagattgaaccagtcc

SEQ ID NO: 783 - protein, 63 aa, Zea mays subsp. mays
  peptide (1)..(63): Ceres Seq. ID no. 12340455
MGKVNLLPLGIRHQLQKFYTQMRQARLRFDDSSRDMPRTIKLHCCLFSLSYWEAKYWKKTAFS

SEQ ID NO: 784 - protein, 44 aa, Zea mays subsp. mays
  peptide (1)..(44): Ceres Seq. ID no. 12340456
TLVSYPPDRILDDATGTAAAHSPDDDPPRCLLPDLYDTNYRWGR

SEQ ID NO: 785 - protein, 43 aa, Zea mays subsp. mays
  peptide (1)..(43): Ceres Seq. ID no. 12340457
MSHSSLYTVVLSLVMQCSLHDFCFWHVYNWFSCSAAHYGCSQP

SEQ ID NO: 786 - DNA, 1580 bp, Zea mays subsp. mays
  misc_feature (1)..(1580): Ceres Seq. ID no. 12345160
  misc_feature: MA Experiment ID: 108528 Result: Up-regulated in Transcription
  misc_feature: MA Experiment 108528 PARAMETER Experiment Name: Zm_Imbibed_Seeds_P Parameter: Age (day) Value: 5 vs. 2
  misc_feature: MA Experiment 108528 PARAMETER Experiment Name: Zm_Imbibed_Seeds_P Parameter: Organism Value: Zea mays
  misc_feature: MA Experiment 108528 PARAMETER Experiment Name: Zm_Imbibed_Seeds_P Parameter: Plant Line Value: 35A19
  misc_feature: MA Experiment 108528 PARAMETER Experiment Name: Zm_Imbibed_Seeds_P Parameter: Tissue Value: Aerial vs. Embryo
  misc_feature: MA Experiment ID: 108530 Result: Up-regulated in Transcription
  misc_feature: MA Experiment 108530 PARAMETER Experiment Name: Zm_Imbibed_Seeds_P Parameter: Age (day) Value: 6 vs. 2
  misc_feature: MA Experiment 108530 PARAMETER Experiment Name: Zm_Imbibed_Seeds_P Parameter: Organism Value: Zea mays
  misc_feature: MA Experiment 108530 PARAMETER Experiment Name: Zm_Imbibed_Seeds_P Parameter: Plant Line Value: 35A19
  misc_feature: MA Experiment 108530 PARAMETER Experiment Name: Zm_Imbibed_Seeds_P Parameter: Tissue Value: Aerial vs. Embryo
  misc_feature: MA Experiment ID: 108534 Result: Down-regulated in Transcription
  misc_feature: MA Experiment 108534 PARAMETER Experiment Name: Zm_4deg_Cold_P Parameter: Age (hr) Value: 8
  misc_feature: MA Experiment 108534 PARAMETER Experiment Name: Zm_4deg_Cold_P Parameter: Organism Value: Zea mays
  misc_feature: MA Experiment 108534 PARAMETER Experiment Name: Zm_4deg_Cold_P Parameter: Plant Line Value: 35A19
  misc_feature: MA Experiment 108534 PARAMETER Experiment Name: Zm_4deg_Cold_P Parameter: Temperature (deg C) Value: 4 vs. 22
  misc_feature: MA Experiment 108534 PARAMETER Experiment Name: Zm_4deg_Cold_P Parameter: Timepoint (hr) Value: 6
  misc_feature: MA Experiment 108534 PARAMETER Experiment Name: Zm_4deg_Cold_P Parameter: Tissue Value: Aerial
  misc_feature: MA Experiment ID: 108543 Result: Down-regulated in Transcription
  misc_feature: MA Experiment ID: 20000480 Result: Up-regulated in Transcription
  misc_feature: MA Experiment 20000480 PARAMETER Experiment Name: Zm_Drought_P Parameter: Age (day) Value: 11
  misc_feature: MA Experiment 20000480 PARAMETER Experiment Name: Zm_Drought_P Parameter: Organism Value: Zea mays
  misc_feature: MA Experiment 20000480 PARAMETER Experiment Name: Zm_Drought_P Parameter: Plant Line Value: 35A19
  misc_feature: MA Experiment 20000480 PARAMETER Experiment Name: Zm_Drought_P Parameter: Timepoint (hr) Value: 72
  misc_feature: MA Experiment 20000480 PARAMETER Experiment Name: Zm_Drought_P Parameter: Tissue Value: Aerial
  misc_feature: MA Experiment 20000480 PARAMETER Experiment Name: Zm_Drought_P Parameter: Treatment Value: Drought vs. No Drought
  misc_feature: MA Experiment ID: 20000535 Result: Up-regulated in Transcription
  misc_feature: MA Experiment 20000535 PARAMETER Experiment Name: Zm_Hybrid_Seed_Dev_P Parameter: DAP Value: 30 vs. 12
  misc_feature: MA Experiment 20000535 PARAMETER Experiment Name: Zm_Hybrid_Seed_Dev_P Parameter: Organism Value: Zea mays
  misc_feature: MA Experiment 20000535 PARAMETER Experiment Name: Zm_Hybrid_Seed_Dev_P Parameter: Plant Line Value: 35A19
  misc_feature: MA Experiment 20000535 PARAMETER Experiment Name: Zm_Hybrid_Seed_Dev_P Parameter: Tissue Value: Embryo vs. Unfert Floret
ctgtcgcgtccctgtcttcttccctgggttgacgccgcggctgtgccattcttaattgggtacgatccagtgttaggaattcgtcgtggcgtcgagtggtgaggagatgggaagtaggtcagtcttcggtcagatccgatggtgtaacagcaaggcccgtgcgacacttgctaaatgtctgatagaaagcctgaaccaaaaatcatcaccgatctcgtggtttcgagtttgatttaattatggtacgctagctgagaatcgtatgaagcaaaggacaaggatcaaagctaagtcgaccacaagatgttgttaagcgtgggcttctttgcatggtgatactggtaggcaaacctgaagatggatagacggagcaagtatcagaacaaaggctgatcatcaagtgatcgatgtcaaacaacactaacctagtgttcttccaggcaagccccggtgcatgcaaccccttccttgtgtttttaaatgatttttacacactttaagtctagcgaaatgtgcattaggtttatatgagttgcttggaaaccctttaatgcattggctaccttgaaatccaatccttttatagataattctggtgaagtatcaaatattgtttacaaaaattgcttagccctgcgtagaggtaaatcttgcggatagagtttgtcctttgcactaatgcctagctcaggtttatcctgaggaaggatggcttctacctgcaagaatattttcattgcgagcgtggtgggatcttactgcaaagttccctataatggtcttttcatcctcaggaacacaaacaattctaagggtggaagtacttaaatcgagacttgggctaggaacaggtgatgttctacccaggttgattaaggattatagagaatgtaggcctgatgatcgaggaccttttaactggtcacatgcctcatcatgggtaagctttgcctcgggcagactaataccagaaaggccaacacacaatgggagtggagagatggcgagagtagcgtgtaccctccatggcaagaggctggactgcgatgtatctatgctctcggttggcgtgaacccaatctggtcttaagaaacccggtggcgagttgacatatgcaagggttaagtgctacatatgtcgggtgattggagatccccagccgggtattaattgattcggatcgttgttacttctcggatatgaagacttggtcactgacttgcaatctaagtcattgatggaatcataatgagcaaaaatcatgttgtattgattaaagtgatgatgaaattagactagatgcaaacaaggtttattaatacttaatctaacattaaaatgttgaaagtaaggattcattttagtaagctttctgcaaactattaatgttgattcttgctaaaagcctttccttgatctccaaatccagcatatccttgagagtctttttttttagtcgggtaagtcttgctgagtacttgcgtacttaggcttttattcccattgttgctggaggttacgagtcactttgattgtgattggtattaagcgccagtgggcatggccttcttataagact

SEQ ID NO: 787 - protein, 104 aa, Zea mays subsp. mays
  peptide (1)..(104): Ceres Seq. ID no. 12345161
MVFSSSGTQTILRVEVLKSRLGLGTGDVLPRLIKDYRECRPDDRGPFNWSHASSWVSFASGRLIPERPTHNGSGEMARVACTLHGKRLDCDVSMLSVGVNPIWS

SEQ ID NO: 788 - protein, 57 aa, Zea mays subsp. mays
  peptide (1)..(57): Ceres Seq. ID no. 12345162
MGKLCLGQTNTRKANTQWEWRDGESSVYPPWQEAGLRCIYALGWREPNLVLRNPVAS

SEQ ID NO: 789 - DNA, 1404 bp, Zea mays subsp. mays
  misc_feature (1)..(1404): Ceres Seq. ID no. 12340650
  misc_feature: MA Experiment ID: 108522 Result: Up-regulated in Transcription
  misc_feature: MA Experiment 108522 PARAMETER Experiment Name: Zm_42deg_Heat_P Parameter: Age (day) Value: 8
  misc_feature: MA Experiment 108522 PARAMETER Experiment Name: Zm_42deg_Heat_P Parameter: Organism Value: Zea mays
  misc_feature: MA Experiment 108522 PARAMETER Experiment Name: Zm_42deg_Heat_P Parameter: Plant Line Value: 35A19
  misc_feature: MA Experiment 108522 PARAMETER Experiment Name: Zm_42deg_Heat_P Parameter: Temperature (deg C) Value: 42 vs. 22
  misc_feature: MA Experiment 108522 PARAMETER Experiment Name: Zm_42deg_Heat_P Parameter: Timepoint (hr) Value: 1
  misc_feature: MA Experiment 108522 PARAMETER Experiment Name: Zm_42deg_Heat_P Parameter: Tissue Value: Aerial
  misc_feature: MA Experiment ID: 108535 Result: Up-regulated in Transcription
  misc_feature: MA Experiment 108535 PARAMETER Experiment Name: Zm_Meristem_P Parameter: Age (day) Value: 8
  misc_feature: MA Experiment 108535 PARAMETER Experiment Name: Zm_Meristem_P Parameter: Organism Value: Zea mays
  misc_feature: MA Experiment 108535 PARAMETER Experiment Name: Zm_Meristem_P Parameter: Plant Line Value: 35A19
  misc_feature: MA Experiment 108535 PARAMETER Experiment Name: Zm_Meristem_P Parameter: Tissue Value: Root Meristem vs. Above Root Meristem
  misc_feature: MA Experiment ID: 108536 Result: Up-regulated in Transcription
  misc_feature: MA Experiment 108536 PARAMETER Experiment Name: Zm_Meristem_P Parameter: Age (day) Value: 8
  misc_feature: MA Experiment 108536 PARAMETER Experiment Name: Zm_Meristem_P Parameter: Organism Value: Zea mays
  misc_feature: MA Experiment 108536 PARAMETER Experiment Name: Zm_Meristem_P Parameter: Plant Line Value: 35A19
  misc_feature: MA Experiment 108536 PARAMETER Experiment Name: Zm_Meristem_P Parameter: Tissue Value: Shoot Meristem vs. Above Shoot Meristem
  misc_feature: MA Experiment ID: 108543 Result: Up-regulated in Transcription
  misc_feature: MA Experiment ID: 108545 Result: Down-regulated in Transcription
  misc_feature: MA Experiment 108545 PARAMETER Experiment Name: Zm_Imbibed_Seeds_P Parameter: Age (day) Value: 3 vs. 2
  misc_feature: MA Experiment 108545 PARAMETER Experiment Name: Zm_Imbibed_Seeds_P Parameter: Organism Value: Zea mays
  misc_feature: MA Experiment 108545 PARAMETER Experiment Name: Zm_Imbibed_Seeds_P Parameter: Plant Line Value: 35A19
  misc_feature: MA Experiment 108545 PARAMETER Experiment Name: Zm_Imbibed_Seeds_P Parameter: Tissue Value: Aerial vs. Embryo
  misc_feature: MA Experiment ID: 108556 Result: Up-regulated in Transcription
  misc_feature: MA Experiment 108556 PARAMETER Experiment Name: Zm_Drought_P Parameter: Age (day) Value: 9
  misc_feature: MA Experiment 108556 PARAMETER Experiment Name: Zm_Drought_P Parameter: Organism Value: Zea mays
  misc_feature: MA Experiment 108556 PARAMETER Experiment Name: Zm_Drought_P Parameter: Plant Line Value: 35A19
  misc_feature: MA Experiment 108556 PARAMETER Experiment Name: Zm_Drought_P Parameter: Timepoint (hr) Value: 24
  misc_feature: MA Experiment 108556 PARAMETER Experiment Name: Zm_Drought_P Parameter: Tissue Value: Aerial
  misc_feature: MA Experiment 108556 PARAMETER Experiment Name: Zm_Drought_P Parameter: Treatment Value: Drought vs. No Drought
  misc_feature: MA Experiment ID: 20000477 Result: Down-regulated in Transcription
  misc_feature: MA Experiment 20000477 PARAMETER Experiment Name: Zm_5mM_SA_P Parameter: Age (day) Value: 10
  misc_feature: MA Experiment 20000477 PARAMETER Experiment Name: Zm_5mM_SA_P Parameter: Organism Value: Zea mays
  misc_feature: MA Experiment 20000477 PARAMETER Experiment Name: Zm_5mM_SA_P Parameter: Plant Line Value: 35A19
  misc_feature: MA Experiment 20000477 PARAMETER Experiment Name: Zm_5mM_SA_P Parameter: Timepoint (hr) Value: 48
  misc_feature: MA Experiment 20000477 PARAMETER Experiment Name: Zm_5mM_SA_P Parameter: Tissue Value: Aerial
  misc_feature: MA Experiment 20000477 PARAMETER Experiment Name: Zm_5mM_SA_P Parameter: Treatment Value: 5mM SA vs. No Treatment
  misc_feature: MA Experiment ID: 20000488 Result: Down-regulated in Transcription
  misc_feature: MA Experiment 20000488 PARAMETER Experiment Name: Zm_50mM_NH4NO3_L_to_H_P Parameter: Organism Value: Zea mays
  misc_feature: MA Experiment 20000488 PARAMETER Experiment Name: Zm_50mM_NH4NO3_L_to_H_P Parameter: Timepoint (hr) Value: 8
  misc_feature: MA Experiment 20000488 PARAMETER Experiment Name: Zm_50mM_NH4NO3_L_to_H_P Parameter: Tissue Value: Leaves
  misc_feature: MA Experiment 20000488 PARAMETER Experiment Name: Zm_50mM_NH4NO3_L_to_H_P Parameter: Treatment Value: 50mM NH4NO3 vs. 100mM Mannitol
  misc_feature: MA Experiment ID: 20000535 Result: Down-regulated in Transcription
  misc_feature: MA Experiment 20000535 PARAMETER Experiment Name: Zm_Hybrid_Seed_Dev_P Parameter: DAP Value: 30 vs. 12
  misc_feature: MA Experiment 20000535 PARAMETER Experiment Name: Zm_Hybrid_Seed_Dev_P Parameter: Organism Value: Zea mays
  misc_feature: MA Experiment 20000535 PARAMETER Experiment Name: Zm_Hybrid_Seed_Dev_P Parameter: Plant Line Value: 35A19
  misc_feature: MA Experiment 20000535 PARAMETER Experiment Name: Zm_Hybrid_Seed_Dev_P Parameter: Tissue Value: Embryo vs. Unfert Floret
agggaaatatctacatctcgtctgcgccgccgctgggatttattagggttctacttctagcccgggccgactccactccaatccaatcctggggcgagcgactgcctccttccctcgatctattccccatcttgtcctccctttgctaaaaataacgaggcagaggcatcttcgatttgacgtgcgcttcctcttcctcgctcgctctcggtcgcagtgatggctgatgtcgacgagtaccgttgcttcattgggaacctgtcctggtcaacgactgatgaaagcctcaaggatgcgttcagcaaattcggcaacctcactgaggcaaaggtggttcttgacaaattttcaggacgttctcgtggtttcggctttgtaacttttgatgagaagcaagccatggaggatgctattgagggaatgaatggactggacttggacgggaggaacatcactgttgataaagctcagccacaaggacctggtagagaccgtaatggtgaccgtgattatgaccgcgagcgtggatctcgttatgaacgtggtcgtgactatggtggtgggcgtgcaccgcgaggtggtggtggtggtggtggtggtggtggtgactgcttcaagtgtgggaaacctggtcattttgctagagagtgcccatctggggatggtgggagaggggacagatatggtgggagagatgacaggtatggtggcggtggcggtggcggtcgttcctgatgaagtggttcaagtggacggtggcccagttcgagcgcctcaacaacttcgacaactgcgagttcagggtcatgcagctgggccccggcggggagtactccctcctcgttcaccacacccaggaggagctccagcagtggggcatgtcgccggagatgatcgccgaccagcagtggcgcgcctccgccaaccgccgctgctgggccgaggagtgctcctccttcatcgacaccttcttcgaggagcctacggctcgtcggagacctcctcctcggacgaagacgangcagaggacaaggaggaggagaccaagctgctggagcaactataactggtttcatccacatccaatccacccattcgcctcgtcctttgaaattctctccattggattggatcttataccatgtgggaagagcggagcagtgatgctgcattcagtcatcgctgatccctctcttattcgaaaacagtctgtagcatgttcataatagctattagctagaactagaaatgattcgagggcaatttcagaaaatgctaaagaaacatatgctgtatctcaaggttttagctctgacatgattctgtatgttcctagatataagaacgcatacattctctattcaaaataaaatgctcagaggagataaatttgtctcgatcgct

SEQ ID NO: 790 - protein, 213 aa, Zea mays subsp. mays
  peptide (1)..(213): Ceres Seq. ID no. 12340651
  misc_feature (199)..(199): Xaa is any aa, unknown or other
MDWTWTGGTSLLIKLSHKDLVETVMVTVIMTASVDLVMNVVVTMVVGVHREVVVVVVVVVVTASSVGNLVILLESAHLGMVGEGTDMVGEMTGMVAVAVAVVPDEVVQVDGGPVRAPQQLRQLRVQGHAAGPRRGVLPPRSPHPGGAPAVGHVAGDDRRPAVARLRQPPLLGRGVLLLHRHLLRGAYGSSETSSSDEDXAEDKEEETKLLEQL

SEQ ID NO: 791 - protein, 189 aa, Zea mays subsp. mays
  peptide (1)..(189): Ceres Seq. ID no. 12340652
  misc_feature (175)..(175): Xaa is any aa, unknown or other
MVTVIMTASVDLVMNVVVTMVVGVHREVVVVVVVVVVTASSVGNLVILLESAHLGMVGEGTDMVGEMTGMVAVAVAVVPDEVVQVDGGPVRAPQQLRQLRVQGHAAGPRRGVLPPRSPHPGGAPAVGHVAGDDRRPAVARLRQPPLLGRGVLLLHRHLLRGAYGSSETSSSDEDXAEDKEEETKLLEQL

SEQ ID NO: 792 - protein, 184 aa, Zea mays subsp. mays
  peptide (1)..(184): Ceres Seq. ID no. 12340653
  misc_feature (170)..(170): Xaa is any aa, unknown or other
MTASVDLVMNVVVTMVVGVHREVVVVVVVVVVTASSVGNLVILLESAHLGMVGEGTDMVGEMTGMVAVAVAVVPDEVVQVDGGPVRAPQQLRQLRVQGHAAGPRRGVLPPRSPHPGGAPAVGHVAGDDRRPAVARLRQPPLLGRGVLLLHRHLLRGAYGSSETSSSDEDXAEDKEEETKLLEQL

SEQ ID NO: 793 - DNA, 1553 bp, Zea mays subsp. mays
  misc_feature (1)..(1553): Ceres Seq. ID no. 12414807
  misc_feature: MA Experiment ID: 108535 Result: Up-regulated in Transcription
  misc_feature: MA Experiment 108535 PARAMETER Experiment Name: Zm_Meristem_P Parameter: Age (day) Value: 8
  misc_feature: MA Experiment 108535 PARAMETER Experiment Name: Zm_Meristem_P Parameter: Organism Value: Zea mays
  misc_feature: MA Experiment 108535 PARAMETER Experiment Name: Zm_Meristem_P Parameter: Plant Line Value: 35A19
  misc_feature: MA Experiment 108535 PARAMETER Experiment Name: Zm_Meristem_P Parameter: Tissue Value: Root Meristem vs. Above Root Meristem
  misc_feature: MA Experiment ID: 108556 Result: Down-regulated in Transcription
  misc_feature: MA Experiment 108556 PARAMETER Experiment Name: Zm_Drought_P Parameter: Age (day) Value: 9
  misc_feature: MA Experiment 108556 PARAMETER Experiment Name: Zm_Drought_P Parameter: Organism Value: Zea mays
  misc_feature: MA Experiment 108556 PARAMETER Experiment Name: Zm_Drought_P Parameter: Plant Line Value: 35A19
  misc_feature: MA Experiment 108556 PARAMETER Experiment Name: Zm_Drought_P Parameter: Timepoint (hr) Value: 24
  misc_feature: MA Experiment 108556 PARAMETER Experiment Name: Zm_Drought_P Parameter: Tissue Value: Aerial
  misc_feature: MA Experiment 108556 PARAMETER Experiment Name: Zm_Drought_P Parameter: Treatment Value: Drought vs. No Drought
  misc_feature: MA Experiment ID: 20000535 Result: Up-regulated in Transcription
  misc_feature: MA Experiment 20000535 PARAMETER Experiment Name: Zm_Hybrid_Seed_Dev_P Parameter: DAP Value: 30 vs. 12
  misc_feature: MA Experiment 20000535 PARAMETER Experiment Name: Zm_Hybrid_Seed_Dev_P Parameter: Organism Value: Zea mays
  misc_feature: MA Experiment 20000535 PARAMETER Experiment Name: Zm_Hybrid_Seed_Dev_P Parameter: Plant Line Value: 35A19
  misc_feature: MA Experiment 20000535 PARAMETER Experiment Name: Zm_Hybrid_Seed_Dev_P Parameter: Tissue Value: Embryo vs. Unfert Floret
atgaagacaaacattcaccgagccgaccgttgccttccccccaactcccagccccagcgtcaactgactacactcgctgactcgctcccccggttccccttctctgctcgccatcttttgctctccgcttggctcgtcaatcacctcctacgctccacacgccgccggcanctacaactgcttctgccgtggttacagagaagaaggggttggggagaagacatcctaaatcaattggatctgggagtatcagatctaaaaagtcaggttttcatcaaggtagaaaaagaaacttttctgtccggtcatggctttcccaactgcagcagctgttttgcttaatgagaacatgcagattcataaaggaaacagggttgatgacaccaagtgccaaaccactgaaatcatcagccaaacctgagagaaaggctcttcaggatgtgtctaacattcctaaaggcactgctttaaagaacagatccacagtcaaagaggggtccgccttgaaagaaaggcctgcactccacaatgtgtctaacaacctcaaagagaggtccatccgaaagagaggcctcctcttcaggatgtgtctaacacccgcaatgagaggtccatcctgaaagagaaatctgccctgtgtagccatgaagctattaagaacccagtgaatatttttgctgatgacgaagagatcaaacggtgccatgaatgggctaaggatgggatggagggcactcacttcactggaaatgattctcagaagttggataaagatgtgcaacacaaacgtatcaagaagaaagtggcgaaagttacgtcagcattgtatggctggtcacatgaggtatatggtcatgtgatgtttatggctatggttcccaagttttctgaagaatcgaaagagctggagctggaaccagagattcttccagacatcactaggtgtatgtctacctcaggcaagagggatgatgcaccaagcgccaaacggctgaagcctaagcttcaagaaccgaaggctcttcaggttcaggatttgtctaacactgtcaaagggagcccttctctgtgcagccatgaagctgtgaagaacccagtgaaaatattcactgttgaagagaccaaaaagtgtcatgaatcggctaatgatgtgtcggagggcactcacttcacaggaaatgatcgtcagaagctggataaggatgtgcaaggtgacaaaacacagctggttgaagattctcctactgatgatgagcttgacgactacccatttttggacaacagtcctgttaagtttgagctgaaagatgagtcggtgattccagatattggagcaatctgaagtgatagtgtttgtgcgattgttctgtagcaatctatgtagtacgatgtttagtacatgttgtttgttctgtagcaaactatgtagtttgagctgaaagatgagtcagtgcctcatcgggtacttttgagtaccgtagcggttgtcaagtttcatgctctcctgaaacatccttcgcaactcgcaagtgaaactctggtttatgccctgg

SEQ ID NO: 794 - protein, 205 aa, Zea mays subsp. mays
  peptide (1)..(205): Ceres Seq. ID no. 12414808
MEGTHFTGNDSQKLDKDVQHKRIKKKVAKVTSALYGWSHEVYGHVMFMAMVPKFSEESKELELEPEILPDITRCMSTSGKRDDAPSAKRLKPKLQEPKALQVQDLSNTVKGSPSLCSHEAVKNPVKIFTVEETKKCHESANDVSEGTHFTGNDRQKLDKDVQGDKTQLVEDSPTDDELDDYPFLDNSPVKFELKDESVIPDIGAI

SEQ ID NO: 795 - protein, 160 aa, Zea mays subsp. mays
  peptide (1)..(160): Ceres Seq. ID no. 12414809
MFMAMVPKFSEESKELELEPEILPDITRCMSTSGKRDDAPSAKRLKPKLQEPKALQVQDLSNTVKGSPSLCSHEAVKNPVKIFTVEETKKCHESANDVSEGTHFTGNDRQKLDKDVQGDKTQLVEDSPTDDELDDYPFLDNSPVKFELKDESVIPDIGAI

SEQ ID NO: 796 - protein, 158 aa, Zea mays subsp. mays
  peptide (1)..(158): Ceres Seq. ID no. 12414810
MAMVPKFSEESKELELEPEILPDITRCMSTSGKRDDAPSAKRLKPKLQEPKALQVQDLSNTVKGSPSLCSHEAVKNPVKIFTVEETKKCHESANDVSEGTHFTGNDRQKLDKDVQGDKTQLVEDSPTDDELDDYPFLDNSPVKFELKDESVIPDIGAI

SEQ ID NO: 797 - DNA, 1061 bp, Zea mays subsp. mays
  misc_feature (1)..(1061): Ceres Seq. ID no. 12348852
  misc_feature: MA Experiment ID: 108523 Result: Down-regulated in Transcription
  misc_feature: MA Experiment 108523 PARAMETER Experiment Name: Zm_42deg_Heat_P Parameter: Age (day) Value: 8
  misc_feature: MA Experiment 108523 PARAMETER Experiment Name: Zm_42deg_Heat_P Parameter: Organism Value: Zea mays
  misc_feature: MA Experiment 108523 PARAMETER Experiment Name: Zm_42deg_Heat_P Parameter: Plant Line Value: 35A19
  misc_feature: MA Experiment 108523 PARAMETER Experiment Name: Zm_42deg_Heat_P Parameter: Temperature (deg C) Value: 42 vs. 22
  misc_feature: MA Experiment 108523 PARAMETER Experiment Name: Zm_42deg_Heat_P Parameter: Timepoint (hr) Value: 6
  misc_feature: MA Experiment 108523 PARAMETER Experiment Name: Zm_42deg_Heat_P Parameter: Tissue Value: Aerial
  misc_feature: MA Experiment ID: 108543 Result: Up-regulated in Transcription
  misc_feature: MA Experiment ID: 108597 Result: Down-regulated in Transcription
  misc_feature: MA Experiment 108597 PARAMETER Experiment Name: Zm_100uM_ABA_P Parameter: Age (day) Value: 9
  misc_feature: MA Experiment 108597 PARAMETER Experiment Name: Zm_100uM_ABA_P Parameter: Organism Value: Zea mays
  misc_feature: MA Experiment 108597 PARAMETER Experiment Name: Zm_100uM_ABA_P Parameter: Plant Line Value: 35A19
  misc_feature: MA Experiment 108597 PARAMETER Experiment Name: Zm_100uM_ABA_P Parameter: Timepoint (hr) Value: 24
  misc_feature: MA Experiment 108597 PARAMETER Experiment Name: Zm_100uM_ABA_P Parameter: Tissue Value: Aerial
  misc_feature: MA Experiment 108597 PARAMETER Experiment Name: Zm_100uM_ABA_P Parameter: Treatment Value: 100uM ABA vs. No Treatment
  misc_feature: MA Experiment ID: 20000477 Result: Down-regulated in Transcription
  misc_feature: MA Experiment 20000477 PARAMETER Experiment Name: Zm_5mM_SA_P Parameter: Age (day) Value: 10
  misc_feature: MA Experiment 20000477 PARAMETER Experiment Name: Zm_5mM_SA_P Parameter: Organism Value: Zea mays
  misc_feature: MA Experiment 20000477 PARAMETER Experiment Name: Zm_5mM_SA_P Parameter: Plant Line Value: 35A19
  misc_feature: MA Experiment 20000477 PARAMETER Experiment Name: Zm_5mM_SA_P Parameter: Timepoint (hr) Value: 48
  misc_feature: MA Experiment 20000477 PARAMETER Experiment Name: Zm_5mM_SA_P Parameter: Tissue Value: Aerial
  misc_feature: MA Experiment 20000477 PARAMETER Experiment Name: Zm_5mM_SA_P Parameter: Treatment Value: 5mM SA vs. No Treatment
  misc_feature: MA Experiment ID: 20000478 Result: Down-regulated in Transcription
  misc_feature: MA Experiment 20000478 PARAMETER Experiment Name: Zm_5mM_SA_P Parameter: Age (day) Value: 11
  misc_feature: MA Experiment 20000478 PARAMETER Experiment Name: Zm_5mM_SA_P Parameter: Organism Value: Zea mays
  misc_feature: MA Experiment 20000478 PARAMETER Experiment Name: Zm_5mM_SA_P Parameter: Plant Line Value: 35A19
  misc_feature: MA Experiment 20000478 PARAMETER Experiment Name: Zm_5mM_SA_P Parameter: Timepoint (hr) Value: 72
  misc_feature: MA Experiment 20000478 PARAMETER Experiment Name: Zm_5mM_SA_P Parameter: Tissue Value: Aerial
  misc_feature: MA Experiment 20000478 PARAMETER Experiment Name: Zm_5mM_SA_P Parameter: Treatment Value: 5mM SA vs. No Treatment
  misc_feature: MA Experiment ID: 20000479 Result: Down-regulated in Transcription
  misc_feature: MA Experiment 20000479 PARAMETER Experiment Name: Zm_Drought_P Parameter: Age (day) Value: 10
  misc_feature: MA Experiment 20000479 PARAMETER Experiment Name: Zm_Drought_P Parameter: Organism Value: Zea mays
  misc_feature: MA Experiment 20000479 PARAMETER Experiment Name: Zm_Drought_P Parameter: Plant Line Value: 35A19
  misc_feature: MA Experiment 20000479 PARAMETER Experiment Name: Zm_Drought_P Parameter: Timepoint (hr) Value: 48
  misc_feature: MA Experiment 20000479 PARAMETER Experiment Name: Zm_Drought_P Parameter: Tissue Value: Aerial
  misc_feature: MA Experiment 20000479 PARAMETER Experiment Name: Zm_Drought_P Parameter: Treatment Value: Drought vs. No Drought
  misc_feature: MA Experiment ID: 20000480 Result: Down-regulated in Transcription
  misc_feature: MA Experiment 20000480 PARAMETER Experiment Name: Zm_Drought_P Parameter: Age (day) Value: 11
  misc_feature: MA Experiment 20000480 PARAMETER Experiment Name: Zm_Drought_P Parameter: Organism Value: Zea mays
  misc_feature: MA Experiment 20000480 PARAMETER Experiment Name: Zm_Drought_P Parameter: Plant Line Value: 35A19
  misc_feature: MA Experiment 20000480 PARAMETER Experiment Name: Zm_Drought_P Parameter: Timepoint (hr) Value: 72
  misc_feature: MA Experiment 20000480 PARAMETER Experiment Name: Zm_Drought_P Parameter: Tissue Value: Aerial
  misc_feature: MA Experiment 20000480 PARAMETER Experiment Name: Zm_Drought_P Parameter: Treatment Value: Drought vs. No Drought
  misc_feature: MA Experiment ID: 20000492 Result: Up-regulated in Transcription
  misc_feature: MA Experiment 20000492 PARAMETER Experiment Name: Zm_Hybrid_Seed_Dev_P Parameter: DAP Value: 12
  misc_feature: MA Experiment 20000492 PARAMETER Experiment Name: Zm_Hybrid_Seed_Dev_P Parameter: Organism Value: Zea mays
  misc_feature: MA Experiment 20000492 PARAMETER Experiment Name: Zm_Hybrid_Seed_Dev_P Parameter: Plant Line Value: 35A19
  misc_feature: MA Experiment 20000492 PARAMETER Experiment Name: Zm_Hybrid_Seed_Dev_P Parameter: Tissue Value: Fert Kernel vs. Unfert Floret
  misc_feature: MA Experiment ID: 20000626 Result: Down-regulated in Transcription
  misc_feature: MA Experiment 20000626 PARAMETER Experiment Name: Zm_Herbicide-Treatments_P Parameter: Timepoint (hr) Value: 12
  misc_feature: MA Experiment 20000626 PARAMETER Experiment Name: Zm_Herbicide-Treatments_P Parameter: Tissue Value: Aerial
  misc_feature: MA Experiment 20000626 PARAMETER Experiment Name: Zm_Herbicide-Treatments_P Parameter: Treatment Value: Roundup vs. No Treatment
ccttaccaatcaataaaaccattcccaactgagatttgaagcctaaggccgatggggatggaggcgagatgcggtgacctggccgtagctgccggcgcccgcgtccggcgcccgctacaaccgcgggacaccaacgtggcggcgtccacggtagtggtcggcaaggctgcgccgaagcccaaagctcatccaaagggggcgacgaggcccactttgccttcgctgccgccggcaccgctgttcccggtggtgaagccaaccccgcccgtgaaggaccagtgcgacgcgtctgttgcgggcgtggccgaagtgtcgctggcggaggagctcgagagggcgcgggagcggcgcgctcggctccgcgcggcgcgggaacagacggaacgggagatggtgagccgtgccgagacgatggagcgagcgacggcggagtgggagcgccgcgcggaggaccagcgaaggctcgtctcggagctcatgcgcctcatcggggtgcctgaggtgtacacgcctgtggaatcactgagatccaaggaagagaggaagcgaagggtggccaccattggtcgttccgggtcgactggctccatctcgacagcatcaacagtgcaggctgatgttggagcaaaagcctgcagtgatcagcaatccgaggatactggagggataatagagacggcaaaagcaaccgagatcacctcctgattttgtgcaattggttccattttcaactgaaagcagagttgcttgtggctttgtttttcaattgatctccatccccattcgacgttatgggtgaagggatgaaggccgagcggtcgaggcgtcaagtgaagttgcggaccattggatgagtcgagtggcgatcagcgagggcaaggagccgatgaaattgtagggggtgggtggatggcgatggacttgtggggtggatgaccagctagattgagtgaatgtgcttaaagggttgagagaggtagagttagttaggtagtgtttggttcaaaagtataccaggacaaccattctattccagtattgagcttgtttggttcgattct

SEQ ID NO: 798 - protein, 217 aa, Zea mays subsp. mays
  peptide (1)..(217): Ceres Seq. ID no. 12348853
MGMEARCGDLAVAAGARVRRPLQPRDTNVAASTVVVGKAAPKPKAHPKGATRPTLPSLPPAPLFPVVKPTPPVKDQCDASVAGVAEVSLAEELERARERRARLRAAREQTEREMVSRAETMERATAEWERRAEDQRRLVSELMRLIGVPEVYTPVESLRSKEERKRRVATIGRSGSTGSISTASTVQADVGAKACSDQQSEDTGGIIETAKATEITS

SEQ ID NO: 799 - protein, 215 aa, Zea mays subsp. mays
  peptide (1)..(215): Ceres Seq. ID no. 12348854
MEARCGDLAVAAGARVRRPLQPRDTNVAASTVVVGKAAPKPKAHPKGATRPTLPSLPPAPLFPVVKPTPPVKDQCDASVAGVAEVSLAEELERARERRARLRAAREQTEREMVSRAETMERATAEWERRAEDQRRLVSELMRLIGVPEVYTPVESLRSKEERKRRVATIGRSGSTGSISTASTVQADVGAKACSDQQSEDTGGIIETAKATEITS

SEQ ID NO: 800 - DNA, 490 bp, Zea mays subsp. mays
  misc_feature (1)..(490): Ceres Seq. ID no. 13564932
  misc_feature: MA Experiment ID: 108527 Result: Up-regulated in Transcription
  misc_feature: MA Experiment 108527 PARAMETER Experiment Name: Zm_5mM_NO_P Parameter: Age (day) Value: 8
  misc_feature: MA Experiment 108527 PARAMETER Experiment Name: Zm_5mM_NO_P Parameter: Organism Value: Zea mays
  misc_feature: MA Experiment 108527 PARAMETER Experiment Name: Zm_5mM_NO_P Parameter: Plant Line Value: 35A19
  misc_feature: MA Experiment 108527 PARAMETER Experiment Name: Zm_5mM_NO_P Parameter: Timepoint (hr) Value: 6
  misc_feature: MA Experiment 108527 PARAMETER Experiment Name: Zm_5mM_NO_P Parameter: Tissue Value: Aerial
  misc_feature: MA Experiment 108527 PARAMETER Experiment Name: Zm_5mM_NO_P Parameter: Treatment Value: 5mM NO vs. No Treatment
  misc_feature: MA Experiment ID: 108559 Result: Up-regulated in Transcription
  misc_feature: MA Experiment 108559 PARAMETER Experiment Name: Zm_5mM_NO_P Parameter: Age (day) Value: 8
  misc_feature: MA Experiment 108559 PARAMETER Experiment Name: Zm_5mM_NO_P Parameter: Organism Value: Zea mays
  misc_feature: MA Experiment 108559 PARAMETER Experiment Name: Zm_5mM_NO_P Parameter: Plant Line Value: 35A19
  misc_feature: MA Experiment 108559 PARAMETER Experiment Name: Zm_5mM_NO_P Parameter: Timepoint (hr) Value: 12
  misc_feature: MA Experiment 108559 PARAMETER Experiment Name: Zm_5mM_NO_P Parameter: Tissue Value: Aerial
  misc_feature: MA Experiment 108559 PARAMETER Experiment Name: Zm_5mM_NO_P Parameter: Treatment Value: 5mM NO vs. No Treatment
cttggacccgaggtaagaccgcccatagaattttcatttcgccgcattattttttttcccttctcactccctccttcggtccttcgccttcctcatgtccccgactctccgatactagtcgagtagtccggtacatcacaccgcctcgcaccgcggccatgttgacaccgcgcgtcctcaaggcttcgctgctccgctgcttgcgcgctaccgccgagctgcctccgttgcggcgaccccggatcctacctgtgcgggtttaccattccagaggctattctagtgggggaagctccaagtatgataggccaatgagacagttttctgaacagaatgagtcaacctctcagccattaatatattacattgctccatctgctctgcttgcttttgctgggatagccacatttgttcattacaatgatgagaggcgtgcagttcccttcgctaaagtaccaggacagaccaatgttcccaaaagatgtactac

SEQ ID NO: 801 - protein, 162 aa, Zea mays subsp. mays
  peptide (1)..(162): Ceres Seq. ID no. 13564933
WTRGKTAHRIFISPHYFFSLLTPSFGPSPSSCPRLSDTSRVVRYITPPRTAAMLTPRVLKASLLRCLRATAELPPLRRPRILPVRVYHSRGYSSGGSSKYDRPMRQFSEQNESTSQPLIYYIAPSALLAFAGIATFVHYNDERRAVPFAKVPGQTNVPKRCT

SEQ ID NO: 802 - protein, 110 aa, Zea mays subsp. mays
  peptide (1)..(110): Ceres Seq. ID no. 13564934
MLTPRVLKASLLRCLRATAELPPLRRPRILPVRVYHSRGYSSGGSSKYDRPMRQFSEQNESTSQPLIYYIAPSALLAFAGIATFVHYNDERRAVPFAKVPGQTNVPKRCT

SEQ ID NO: 803 - DNA, 1488 bp, Zea mays subsp. mays
  misc_feature (1)..(1488): Ceres Seq. ID no. 12411210
  misc_feature: MA Experiment ID: 108527 Result: Down-regulated in Transcription
  misc_feature: MA Experiment 108527 PARAMETER Experiment Name: Zm_5mM_NO_P Parameter: Age (day) Value: 8
  misc_feature: MA Experiment 108527 PARAMETER Experiment Name: Zm_5mM_NO_P Parameter: Organism Value: Zea mays
  misc_feature: MA Experiment 108527 PARAMETER Experiment Name: Zm_5mM_NO_P Parameter: Plant Line Value: 35A19
  misc_feature: MA Experiment 108527 PARAMETER Experiment Name: Zm_5mM_NO_P Parameter: Timepoint (hr) Value: 6
  misc_feature: MA Experiment 108527 PARAMETER Experiment Name: Zm_5mM_NO_P Parameter: Tissue Value: Aerial
  misc_feature: MA Experiment 108527 PARAMETER Experiment Name: Zm_5mM_NO_P Parameter: Treatment Value: 5mM NO vs. No Treatment
  misc_feature: MA Experiment ID: 108529 Result: Up-regulated in Transcription
  misc_feature: MA Experiment 108529 PARAMETER Experiment Name: Zm_Imbibed_Seeds_P Parameter: Age (day) Value: 5 vs. 2
  misc_feature: MA Experiment 108529 PARAMETER Experiment Name: Zm_Imbibed_Seeds_P Parameter: Organism Value: Zea mays
  misc_feature: MA Experiment 108529 PARAMETER Experiment Name: Zm_Imbibed_Seeds_P Parameter: Plant Line Value: 35A19
  misc_feature: MA Experiment 108529 PARAMETER Experiment Name: Zm_Imbibed_Seeds_P Parameter: Tissue Value: Roots vs. Embryo
  misc_feature: MA Experiment ID: 108544 Result: Up-regulated in Transcription
  misc_feature: MA Experiment ID: 108546 Result: Up-regulated in Transcription
  misc_feature: MA Experiment 108546 PARAMETER Experiment Name: Zm_Imbibed_Seeds_P Parameter: Age (day) Value: 3 vs. 2
  misc_feature: MA Experiment 108546 PARAMETER Experiment Name: Zm_Imbibed_Seeds_P Parameter: Organism Value: Zea mays
  misc_feature: MA Experiment 108546 PARAMETER Experiment Name: Zm_Imbibed_Seeds_P Parameter: Plant Line Value: 35A19
  misc_feature: MA Experiment 108546 PARAMETER Experiment Name: Zm_Imbibed_Seeds_P Parameter: Tissue Value: Roots vs. Embryo
  misc_feature: MA Experiment ID: 108689 Result: Up-regulated in Transcription
  misc_feature: MA Experiment 108689 PARAMETER Experiment Name: Zm_Drought_Roots_P Parameter: Age (day) Value: 9
  misc_feature: MA Experiment 108689 PARAMETER Experiment Name: Zm_Drought_Roots_P Parameter: Organism Value: Zea mays
  misc_feature: MA Experiment 108689 PARAMETER Experiment Name: Zm_Drought_Roots_P Parameter: Plant Line Value: 35A19
  misc_feature: MA Experiment 108689 PARAMETER Experiment Name: Zm_Drought_Roots_P Parameter: Timepoint (hr) Value: 24
  misc_feature: MA Experiment 108689 PARAMETER Experiment Name: Zm_Drought_Roots_P Parameter: Tissue Value: Roots
  misc_feature: MA Experiment 108689 PARAMETER Experiment Name: Zm_Drought_Roots_P Parameter: Treatment Value: Drought vs. No Drought
ccccctctcctcctctagcttctccttctctctctctccttcctggaccattctctctatctcctttctctctctacacatactcagacgagcagaagcagctagggacaccataggcaaactacttcagcaagaaattaaactatctcctacgcaagatcagaagaaactgtgtatggagcaagaagaggttggcctcgccctgggcctctccctcggctccggccaccaccaccaggagctcaagccccaacatccgtcgcatccgtgtgcggcgttgttggagccttctctgtcgctcagcggcccggcgaccaaggatgatggcccgaccgcaccggtgaggaggttcgctgccgtgaagagggagctgcagacgatggaggggaacgacgacgaggccaccggcaggggtacttgtctactcagtggcgtcgtcggcggtggttactgccgacgacgacgaagggtgcaacagcagccggaagaagctgaggctgtccaaggagcagtcggcgctgctggaggaccacttcaaggagcacagcaccctcaaccctaagcagaaggctgctttggccagacaactgaacctgagcccaaggcaagtggaggtttggttccaaaacagaagagccagaaccaagctgaagcagacagaagtggactgcgagattctcaagcgctgctgcgagacgttaacagaggagaaccggcgtctccaccgcgagctccagcagctccgcgccctcagccacccgcacccccacccggctgcctttttcatgcccaccgccgctgccgctgcgctctccatctgcccctcctgccagcgccttgttgccaccggagcatctgccgccgccgcaaccaccgccggtgcagataataagcctaaggcgggcggcccccggcggccgagcgccacacgtgttcagccctttcaccaattctgccgcctgctgaacacgcacacatatgtatatacatgcatgcgcacacatacatatatacgtatttttctttagcgctagccacgctctatcattcatcgatggtcatctactagctagatagtaattggttcactagatggcatatattcctgtcccctccccccttaattcattagctttgttttttcacaagctaattaatgaattgatagcggcgtcgcgtgaggacgatggagcaccacgcatgcatatgattctagtagcaaaaacaagagatatatgtcttgtttaatttggtgttgcttctgcttagtatagtgcccactgctggtgctgtagctgtagctttaattagtaggtgttcctgatggatttcctcttgtattagttaactgtcagtcagggaatagtaatgatgacagcatgacaccacatacacatcccagtttatttggatgtggatccatgtatatatgcacatgccacatgacggatctgtttcaacaattaaatactatattgatttgtctcc

SEQ ID NO: 804 - protein, 186 aa, Zea mays subsp. mays
  peptide (1)..(186): Ceres Seq. ID no. 12411211
PLSSSSFSFSLSPSWTILSISFLSLHILRRAEAARDTIGKLLQQEIKLSPTQDQKKLCMEQEEVGLALGLSLGSGHHHQELKPQHPSHPCAALLEPSLSLSGPATKDDGPTAPVRRFAAVKRELQTMEGNDDEATGRGTCLLSGVVGGGYCRRRRRVQQQPEEAEAVQGAVGAAGGPLQGAQHPQP

SEQ ID NO: 805 - protein, 128 aa, Zea mays subsp. mays
  peptide (1)..(128): Ceres Seq. ID no. 12411212
MEQEEVGLALGLSLGSGHHHQELKPQHPSHPCAALLEPSLSLSGPATKDDGPTAPVRRFAAVKRELQTMEGNDDEATGRGTCLLSGVVGGGYCRRRRRVQQQPEEAEAVQGAVGAAGGPLQGAQHPQP

SEQ ID NO: 806 - DNA, 1162 bp, Zea mays subsp. mays
  misc_feature (1)..(1162): Ceres Seq. ID no. 13501279
  misc_feature: MA Experiment ID: 108535 Result: Down-regulated in Transcription
  misc_feature: MA Experiment 108535 PARAMETER Experiment Name: Zm_Meristem_P Parameter: Age (day) Value: 8
  misc_feature: MA Experiment 108535 PARAMETER Experiment Name: Zm_Meristem_P Parameter: Organism Value: Zea mays
  misc_feature: MA Experiment 108535 PARAMETER Experiment Name: Zm_Meristem_P Parameter: Plant Line Value: 35A19
  misc_feature: MA Experiment 108535 PARAMETER Experiment Name: Zm_Meristem_P Parameter: Tissue Value: Root Meristem vs. Above Root Meristem
  misc_feature: MA Experiment ID: 108543 Result: Up-regulated in Transcription
  misc_feature: MA Experiment ID: 20000108 Result: Down-regulated in Transcription
  misc_feature: MA Experiment 20000108 PARAMETER Experiment Name: Zm_Root-Tips_P Parameter: Age (day) Value: 12
  misc_feature: MA Experiment 20000108 PARAMETER Experiment Name: Zm_Root-Tips_P Parameter: Organism Value: Zea mays
  misc_feature: MA Experiment 20000108 PARAMETER Experiment Name: Zm_Root-Tips_P Parameter: Tissue Value: Root tips vs. Root mid region    35
  misc_feature: MA Experiment 20000108 PARAMETER Experiment Name: Zm_Root-Tips_P Parameter: Tissue Value: Root tips vs. Root mid region   Sequence Listing-Misc Features (4)
  misc_feature: MA Experiment ID: 20000492 Result: Down-regulated in Transcription
  misc_feature: MA Experiment 20000492 PARAMETER Experiment Name: Zm_Hybrid_Seed_Dev_P Parameter: DAP Value: 12
  misc_feature: MA Experiment 20000492 PARAMETER Experiment Name: Zm_Hybrid_Seed_Dev_P Parameter: Organism Value: Zea mays
  misc_feature: MA Experiment 20000492 PARAMETER Experiment Name: Zm_Hybrid_Seed_Dev_P Parameter: Plant Line Value: 35A19
  misc_feature: MA Experiment 20000492 PARAMETER Experiment Name: Zm_Hybrid_Seed_Dev_P Parameter: Tissue Value: Fert Kernel vs. Unfert Floret
  misc_feature: MA Experiment ID: 20001608 Result: Down-regulated in Transcription
  misc_feature: MA Experiment 20001608 PARAMETER Experiment Name: Zm_50ppm_KNO3_L-to-H_P Parameter: Age (day) Value: 21
  misc_feature: MA Experiment 20001608 PARAMETER Experiment Name: Zm_50ppm_KNO3_L-to-H_P Parameter: Organism Value: Zea mays
  misc_feature: MA Experiment 20001608 PARAMETER Experiment Name: Zm_50ppm_KNO3_L-to-H_P Parameter: Plant Line Value: 35A19
  misc_feature: MA Experiment 20001608 PARAMETER Experiment Name: Zm_50ppm_KNO3_L-to-H_P Parameter: Timepoint (hr) Value: 48
  misc_feature: MA Experiment 20001608 PARAMETER Experiment Name: Zm_50ppm_KNO3_L-to-H_P Parameter: Tissue Value: Shoots
  misc_feature: MA Experiment 20001608 PARAMETER Experiment Name: Zm_50ppm_KNO3_L-to-H_P Parameter: Treatment Value: 50ppm KNO3 vs. 50ppm KCl
acgtatacgttacgtttcgcttggtttttttttcacggaacgatccagacgcgctagccgtaggccgcgcgtagctgggcggtgtgcgctgcgccatgaagaccacttcgtcgcacgggctccacgccgcgtcggcgtcgctctgcacgccgtacctactcctcctaccgctcggcctcctcgccgtgctgctggcgctcccgagcctcggctcctcttacgcgcgctcccaaggcctcggcgtgctctgccgcagcgcggcggcaggcaccgacggcggcggcggcggtgactactcctcctccgtcgcgtcgggcgccggcgacgagaagaaggccgcggtcgccgagacaccgccgccgccgcggccggagctcagcctgctggtgggcgtgctgaccgtgccgggcccggcgggagcggcgggacatcctgcggacggcctacgcgctgcagccggcggcgcccgcgtcgcgcgtggacgtgcgcttcgtcttctgcagcgtgacggacccggtggaggcggcgctggtggcggtggaggcgcggcgccacggcgacgtgctggtgctggactgcgcggagaacatgaacgacgggaagacgcacgcgtacctgtcctccgtgccgcgcctcttcgcgtccgcgccctacgactacgtcatgaagaccgacgacgacacgtacctgcgcgtcgcggcgctggtggcggagctgcgccccaggccccgcgacgacgtctacctgggctacggcttccccgtcggcgacgaccccatgccgttcatgcacggcatgggctacgtcgtgtcctgggacgtggcgcgctgggtgtccgccaacggggacatcctgcgccacaacgacacgcacgggcccgaggacctgctcgtcggcaagtggctcaacatcggcggcaggggcaggaaccgctacgacctcaagcccaggatgtacgacctcaactggttcatggacaacttccgcccggacaccatcgccgtgcacatgctcaaggacaaccgccgatgggcggccacgttcacctacttcaacgtcaccgccaggatccacaccaacagcctgccgtgatcaaccagttatttcagttcgatttttttttccctgaggttgacgttggctgattgtgccaaggtggcgt

SEQ ID NO: 807 - protein, 349 aa, Zea mays subsp. mays
  peptide (1)..(349): Ceres Seq. ID no. 13501280
MKTTSSHGLHAASASLCTPYLLLLPLGLLAVLLALPSLGSSYARSQGLGVLCRSAAAGTDGGGGGDYSSSVASGAGDEKKAAVAETPPPPRPELSLLVGVLTVPGPAGAAGHPADGLRAAAGGARVARGRALRLLQRDGPGGGGAGGGGGAAPRRRAGAGLRGEHERREDARVPVLRAAPLRVRALRLRHEDRRRHVPARRGAGGGAAPQAPRRRLPGLRLPRRRRPHAVHARHGLRRVLGRGALGVRQRGHPAPQRHARARGPARRQVAQHRRQGQEPLRPQAQDVRPQLVHGQLPPGHHRRAHAQGQPPMGGHVHLLQRHRQDPHQQPAVINQLFQFDFFFPEVDVG

SEQ ID NO: 808 - DNA, 1384 bp, Zea mays subsp. mays
  misc_feature (1)..(1384): Ceres Seq. ID no. 12454939
  misc_feature: MA Experiment ID: 108535 Result: Up-regulated in Transcription
  misc_feature: MA Experiment 108535 PARAMETER Experiment Name: Zm_Meristem_P Parameter: Age (day) Value: 8
  misc_feature: MA Experiment 108535 PARAMETER Experiment Name: Zm_Meristem_P Parameter: Organism Value: Zea mays
  misc_feature: MA Experiment 108535 PARAMETER Experiment Name: Zm_Meristem_P Parameter: Plant Line Value: 35A19
  misc_feature: MA Experiment 108535 PARAMETER Experiment Name: Zm_Meristem_P Parameter: Tissue Value: Root Meristem vs. Above Root Meristem
  misc_feature: MA Experiment ID: 20000487 Result: Up-regulated in Transcription
  misc_feature: MA Experiment 20000487 PARAMETER Experiment Name: Zm_50mM_NH4NO3_L_to_H_P Parameter: Organism Value: Zea mays
  misc_feature: MA Experiment 20000487 PARAMETER Experiment Name: Zm_50mM_NH4NO3_L_to_H_P Parameter: Timepoint (hr) Value: 4
  misc_feature: MA Experiment 20000487 PARAMETER Experiment Name: Zm_50mM_NH4NO3_L_to_H_P Parameter: Tissue Value: Leaves
  misc_feature: MA Experiment 20000487 PARAMETER Experiment Name: Zm_50mM_NH4NO3_L_to_H_P Parameter: Treatment Value: 50mM NH4NO3 vs. 100mM Mannitol
tatattaattgtgcagcgtgccaatctaatatgagttatgttctttttggtgttcctttcaagggaaacgctcggcggcgaagctaaagcagagcttgcgctacacgcgctgcgagcagtttctgtctaaagggcaaggtctgatctcatgtgagtcatgtctggttggtgtgatacattaatcttaatcaatttttgtgattttggggatttctggtttttggttgacaattcgccagtggtgtacatgacagatttgagctccccgtggcactgctcgcccggccagccaccatcccggtcttgcgctcggcggcgtgcatggtgtgctcgtccctgacagtggctagcttctgttttcttaattgatggctagcttctgttttcttaattgatgatttgttttttccttttctgatcgtcaatagggaagagacgacgataacatggacactgttttctaaatggatcagtatttttggtatatacacatgcttttactagtagaggagtatttattttcatttgtagcagccaaggaacttgtgcattccttatgaatcatgagaagaccatgaagatgcacacaaatttgcttgacttctgaccagtaataattagcgaaagaaagaaaatccagaaccatgaatcagcttgatagcagtaacaaatttgcttgacttctgacgagtaagaaattggcagcaagttcagcaggggccagactaataaatcagcttgatagcatccttgcagcggtgccttggactttggcggttagaagaggtttataattttatatgatgaaattatgtgcatcttcagttgtttttgcctcactgctctgtaaggacatataaaattggtatttgtactttctaaggttctccttggaatggtagagttttacagggaaccttccatcatcagttgctgacatagctcgaactcgacgtttcttcttcgccagttgcggctctggataaactcgaagctgacctatccaagttcgacgacgggcccttcttcctaggccaattcagcttggcggatgtagcgtacattacgattctggaaagggttcagatatactattcccatcttaggaactacgacatcgccgaaggcaggcccaacctccaggaattcatcgaggagatgaacaagattgaagcgtatgcgcagaccaagaacgatcctctgttcttgcttgatcttgccaagaaccatcttaagattgcctgaagatgtgacaaagcagcattagtccgttgatcggtggaagaccactcgtcagtgttgagttgaatgtttgatcaataaaatacggcatgttgtaagggttgttttacgctatttataatacaatgtactgttcagttgt

SEQ ID NO: 809 - protein, 60 aa, Zea mays subsp. mays
  peptide (1)..(60): Ceres Seq. ID no. 12454940
MSGWCDTLILINFCDFGDFWFLVDNSPVVYMTDLSSPWHCSPGQPPSRSCARRRAWCARP

SEQ ID NO: 810 - protein, 31 aa, Zea mays subsp. mays
  peptide (1)..(31): Ceres Seq. ID no. 12454941
MDQYFWYIHMLLLVEEYLFSFVAAKELVHSL

SEQ ID NO: 811 - protein, 30 aa, Zea mays subsp. mays
  peptide (1)..(30): Ceres Seq. ID no. 12454942
MFFLVFLSRETLGGEAKAELALHALRAVSV

SEQ ID NO: 812 - DNA, 1748 bp, Zea mays subsp. mays
  misc_feature (1)..(1748): Ceres Seq. ID no. 12450451
  misc_feature: MA Experiment ID: 20000534 Result: Down-regulated in Transcription
  misc_feature: MA Experiment 20000534 PARAMETER Experiment Name: Zm_Hybrid_Pollen_P Parameter: Age (day) Value: 8
  misc_feature: MA Experiment 20000534 PARAMETER Experiment Name: Zm_Hybrid_Pollen_P Parameter: Organism Value: Zea mays
  misc_feature: MA Experiment 20000534 PARAMETER Experiment Name: Zm_Hybrid_Pollen_P Parameter: Plant Line Value: 35A19
  misc_feature: MA Experiment 20000534 PARAMETER Experiment Name: Zm_Hybrid_Pollen_P Parameter: Tissue Value: Pollen vs. Aerial
actttggacatctattgaaactctattccatggtattgctattcaacatatatatgtatatattcgtctagctgtccaatcttcattagccccatagttttgcgcgtgggcaacggtagatgggcatcgctagcttgacgatcttgatcggtgagttgctccttccatttttcttggtggttatggaatttatctgcaatatgtcttgtgcttttgtatgtctgctatttgtgctgctatttttttttctattatgtgcactatgtctctttgtcatatacatatacagatgtgcaaactatatttttgcagaatcgtgctaggaatccaatgtctggtggctattctcagcagggatatcgccctcctcgtccccagtcaaactggggcccgccttctgtgccaccccagcagcctggctatggttatatgcagcctggggcttatcctggggcaccgccacagtatggtgcacctcagcaaccttatggtagctaccccccaacatctggtggctatcagactggatgggatcagtctcaaaaccagcaatctcatacaactccccctggtactgggtatgattattatagtcagcagcagcaacctcagcaacaatctgcccctgggacagctgcttctactgatgccactagctacaattatggtcagccttcgacgtatgcttcacagggatatgattctacctacactcagcagagtggtgggcagcaagcatatggacatgatggctacactggttaccagacccaagggcagcagcagggctactctcagcagactggttatgatcagcagggttatggcacatctgcttatggatcagctgcaaactcgacccaggatgggtccaactatggtggtcctggaggggccagtcaggcatctccagggcagcaaacatcaaacccagctgctggaagccaacctggctataccagccaaccgcccactagtgctgcagcaacttacccacctcaaggttcagctccatctggatatggcgctccaccatcccagtctggctatggcacccaaccaccacagcaaggcggatatggtcagggcgcttatgggcagccttctccacagggccagaaacctcctccattgtcaccttatggacaggctctgcctcctggttctgctcaggctggttacgggcagtatggttacagccaacctgcttacggtgcaccaccagcttaccctggtgcacccattgcaagccaccagggctatggccagcagcagtcttatggcgatgcttatggtagtgcaagctatgggcagcctccagcctactctactgaagcaacacctcctgctgcatcccaggatcactctgctgcccctgctgcggcccttggaacaacagcttcgacagctcctgaaaacagtgggggcgcccaaacatccgctgaaacttgagcttcagcagctaattgggaacaaacattttccaagaccctgccgtgtggtttcctccgcgctgttgcttaatataattacgcatctaatttagggtctacaactacaagttatttttttttctgcctgttgtttttgacaccatgacttgctgtttccttgctatattgagtagtaccttgcagttattttattgctggcatatatgtctggactagtgatatatgtgtttgtgtggttacccttgttggaccgtaatgggtaccttccggcttggtntggacanataaannccc

SEQ ID NO: 813 - protein, 442 aa, Zea mays subsp. mays
  peptide (1)..(442): Ceres Seq. ID no. 12450452
MSAICAAIFFSIMCTMSLCHIHIQMCKLYFCRIVLGIQCLVAILSRDIALLVPSQTGARLLCHPSSLAMVICSLGLILGHRHSMVHLSNLMVATPQHLVAIRLDGISLKTSNLIQLPLVLGMIIIVSSSNLSNNLPLGQLLLLMPLATIMVSLRRMLHRDMILPTLSRVVGSKHMDMMATLVTRPKGSSRATLSRLVMISRVMAHLLMDQLQTRPRMGPTMVVLEGPVRHLQGSKHQTQLLEANLAIPANRPLVLQQLTHLKVQLHLDMALHHPSLAMAPNHHSKADMVRALMGSLLHRARNLLHCHLMDRLCLLVLLRLVTGSMVTANLLTVHHQLTLVHPLQATRAMASSSLMAMLMVVQAMGSLQPTLLKQHLLLHPRITLLPLLRPLEQQLRQLLKTVGAPKHPLKLELQQLIGNKHFPRPCRVVSSALLLNIITHLI

SEQ ID NO: 814 - protein, 430 aa, Zea mays subsp. mays
  peptide (1)..(430): Ceres Seq. ID no. 12450453
MCTMSLCHIHIQMCKLYFCRIVLGIQCLVAILSRDIALLVPSQTGARLLCHPSSLAMVICSLGLILGHRHSMVHLSNLMVATPQHLVAIRLDGISLKTSNLIQLPLVLGMIIIVSSSNLSNNLPLGQLLLLMPLATIMVSLRRMLHRDMILPTLSRVVGSKHMDMMATLVTRPKGSSRATLSRLVMISRVMAHLLMDQLQTRPRMGPTMVVLEGPVRHLQGSKHQTQLLEANLAIPANRPLVLQQLTHLKVQLHLDMALHHPSLAMAPNHHSKADMVRALMGSLLHRARNLLHCHLMDRLCLLVLLRLVTGSMVTANLLTVHHQLTLVHPLQATRAMASSSLMAMLMVVQAMGSLQPTLLKQHLLLHPRITLLPLLRPLEQQLRQLLKTVGAPKHPLKLELQQLIGNKHFPRPCRVVSSALLLNIITHLI

SEQ ID NO: 815 - protein, 427 aa, Zea mays subsp. mays
  peptide (1)..(427): Ceres Seq. ID no. 12450454
MSLCHIHIQMCKLYFCRIVLGIQCLVAILSRDIALLVPSQTGARLLCHPSSLAMVICSLGLILGHRHSMVHLSNLMVATPQHLVAIRLDGISLKTSNLIQLPLVLGMIIIVSSSNLSNNLPLGQLLLLMPLATIMVSLRRMLHRDMILPTLSRVVGSKHMDMMATLVTRPKGSSRATLSRLVMISRVMAHLLMDQLQTRPRMGPTMVVLEGPVRHLQGSKHQTQLLEANLAIPANRPLVLQQLTHLKVQLHLDMALHHPSLAMAPNHHSKADMVRALMGSLLHRARNLLHCHLMDRLCLLVLLRLVTGSMVTANLLTVHHQLTLVHPLQATRAMASSSLMAMLMVVQAMGSLQPTLLKQHLLLHPRITLLPLLRPLEQQLRQLLKTVGAPKHPLKLELQQLIGNKHFPRPCRVVSSALLLNIITHLI

SEQ ID NO: 816 - DNA, 1353 bp, Zea mays subsp. mays
  misc_feature (1)..(1353): Ceres Seq. ID no. 12566077
  misc_feature: MA Experiment ID: 108522 Result: Up-regulated in Transcription
  misc_feature: MA Experiment 108522 PARAMETER Experiment Name: Zm_42deg_Heat_P Parameter: Age (day) Value: 8
  misc_feature: MA Experiment 108522 PARAMETER Experiment Name: Zm_42deg_Heat_P Parameter: Organism Value: Zea mays
  misc_feature: MA Experiment 108522 PARAMETER Experiment Name: Zm_42deg_Heat_P Parameter: Plant Line Value: 35A19
  misc_feature: MA Experiment 108522 PARAMETER Experiment Name: Zm_42deg_Heat_P Parameter: Temperature (deg C) Value: 42 vs. 22
  misc_feature: MA Experiment 108522 PARAMETER Experiment Name: Zm_42deg_Heat_P Parameter: Timepoint (hr) Value: 1
  misc_feature: MA Experiment 108522 PARAMETER Experiment Name: Zm_42deg_Heat_P Parameter: Tissue Value: Aerial
aaaaaatccggccgtccgcgttcttatccaccctaattaaaaatgacaaaaccaatacatttattgaaagaaaatagacgagtctcatagtagccggctaagagtggcgtaatggtgggcatggtagcggggtggtatacatgtcgaagaagatctggaggcgggaatcgaagctgttgtccgtgatctgctgccagatctcgcgcagctcctccttgttaattttgtcaacctgcacctgacggcggcggctcaatgtgtcaaacagctcgagcgcgaactctttcgattccgtcatccctgcacgtgtacatgcagctccccaatgtttcaacgacgaagggaaatggaggagaaagccgaggggaggcagcgcggcgtggtggtaccaatgcattccgcgaagtcggagcgggagaggaaaccctcggaagcgaggcggtcgaagttggcctgcacctccatccaggcgttgttggccttgttgctgctgatgaagcggaggccgcggagcgccttgtgcgcgccggagcgcgtgcggtcgagctgcgcgcgctgccgccgcgcggcgcgggcagcgagggccgactcgatgcctgacgacggctgctgctgctgcccctgcccttccgcgcggctttgggtgcggccgaagcgcttggtgaggtcctgcgagaactggcgcgcgatggacatggcctccgccttgagctcctgcgagaactgcaggagccggtgcgacgaggtccgcctgatcgncggcgacaaggaccgcgacgacgacgacgcgccgccggcatggtccccgcgcgcgcccagcggcagcgcggtggcgccccccgccgcggccggctcgacgctccgcagaatgatggtgtcgtcctcctgcaggtcgagcgtgacctcgaccagctcctccccgtcgtcggagctgcgttcggagccccgcggcgaggagcccgtgntgagtgaccgcggngtngtccccgccgagccgctccatcgctggtggcccggggcggcggcgcccctcatcgccgacccaatcanaagccgctttccagcgcggctcccggaacagtccaatgctcgaanaggagacgcgctcgacgactggatggatcgattttgtgggtggccttggaatctctggggaaaggcgcccgngacgcgtccgagcgggagctcaagccgatgaaagaggaagcgcaacgagacagcaatatatgaggatgagaaggcgagtacggtgggccgggccacgcaaatgcacaactctatttaattatccacattgtcatctactaatatgtaagcagactctacatgcatatgtgcaatcaattttccacc

SEQ ID NO: 817 - protein, 290 aa, Zea mays subsp. mays
  peptide (1)..(290): Ceres Seq. ID no. 12566078
  misc_feature (145)..(145): Xaa is any aa, unknown or other
  misc_feature (214)..(214): Xaa is any aa, unknown or other
  misc_feature (218)..(218): Xaa is any aa, unknown or other
  misc_feature (219)..(219): Xaa is any aa, unknown or other
  misc_feature (242)..(242): Xaa is any aa, unknown or other
  misc_feature (257)..(257): Xaa is any aa, unknown or other
  misc_feature (281)..(281): Xaa is any aa, unknown or other
MFQRRREMEEKAEGRQRGVVVPMHSAKSERERKPSEARRSKLACTSIQALLALLLLMKRRPRSALCAPERVRSSCARCRRAARAARADSMPDDGCCCCPCPSARLWVRPKRLVRSCENWRAMDMASALSSCENCRSRCDEVRLIXGDKDRDDDDAPPAWSPRAPSGSAVAPPAAAGSTLRRMMVSSSCRSSVTSTSSSPSSELRSEPRGEEPVXSDRXXVPAEPLHRWWPGAAAPLIADPIXSRFPARLPEQSNARXGDALDDWMDRFCGWPWNLWGKAPXTRPSGSSSR

SEQ ID NO: 818 - protein, 283 aa, Zea mays subsp. mays
  peptide (1)..(283): Ceres Seq. ID no. 12566079
  misc_feature (138)..(138): Xaa is any aa, unknown or other
  misc_feature (207)..(207): Xaa is any aa, unknown or other
  misc_feature (211)..(211): Xaa is any aa, unknown or other
  misc_feature (212)..(212): Xaa is any aa, unknown or other
  misc_feature (235)..(235): Xaa is any aa, unknown or other
  misc_feature (250)..(250): Xaa is any aa, unknown or other
  misc_feature (274)..(274): Xaa is any aa, unknown or other
MEEKAEGRQRGVVVPMHSAKSERERKPSEARRSKLACTSIQALLALLLLMKRRPRSALCAPERVRSSCARCRRAARAARADSMPDDGCCCCPCPSARLWVRPKRLVRSCENWRAMDMASALSSCENCRSRCDEVRLIXGDKDRDDDDAPPAWSPRAPSGSAVAPPAAAGSTLRRMMVSSSCRSSVTSTSSSPSSELRSEPRGEEPVXSDRXXVPAEPLHRWWPGAAAPLIADPIXSRFPARLPEQSNARXGDALDDWMDRFCGWPWNLWGKAPXTRPSGSSSR

SEQ ID NO: 819 - protein, 268 aa, Zea mays subsp. mays
  peptide (1)..(268): Ceres Seq. ID no. 12566080
  misc_feature (123)..(123): Xaa is any aa, unknown or other
  misc_feature (192)..(192): Xaa is any aa, unknown or other
  misc_feature (196)..(196): Xaa is any aa, unknown or other
  misc_feature (197)..(197): Xaa is any aa, unknown or other
  misc_feature (220)..(220): Xaa is any aa, unknown or other
  misc_feature (235)..(235): Xaa is any aa, unknown or other
  misc_feature (259)..(259): Xaa is any aa, unknown or other
MHSAKSERERKPSEARRSKLACTSIQALLALLLLMKRRPRSALCAPERVRSSCARCRRAARAARADSMPDDGCCCCPCPSARLWVRPKRLVRSCENWRAMDMASALSSCENCRSRCDEVRLIXGDKDRDDDDAPPAWSPRAPSGSAVAPPAAAGSTLRRMMVSSSCRSSVTSTSSSPSSELRSEPRGEEPVXSDRXXVPAEPLHRWWPGAAAPLIADPIXSRFPARLPEQSNARXGDALDDWMDRFCGWPWNLWGKAPXTRPSGSSSR

SEQ ID NO: 820 - DNA, 437 bp, Zea mays subsp. mays
  misc_feature (1)..(437): Ceres Seq. ID no. 3010869
  misc_feature: MA Experiment ID: 108529 Result: Down-regulated in Transcription
  misc_feature: MA Experiment 108529 PARAMETER Experiment Name: Zm_Imbibed_Seeds_P Parameter: Age (day) Value: 5 vs. 2
  misc_feature: MA Experiment 108529 PARAMETER Experiment Name: Zm_Imbibed_Seeds_P Parameter: Organism Value: Zea mays
  misc_feature: MA Experiment 108529 PARAMETER Experiment Name: Zm_Imbibed_Seeds_P Parameter: Plant Line Value: 35A19
  misc_feature: MA Experiment 108529 PARAMETER Experiment Name: Zm_Imbibed_Seeds_P Parameter: Tissue Value: Roots vs. Embryo
  misc_feature: MA Experiment ID: 20000535 Result: Up-regulated in Transcription
  misc_feature: MA Experiment 20000535 PARAMETER Experiment Name: Zm_Hybrid_Seed_Dev_P Parameter: DAP Value: 30 vs. 12
  misc_feature: MA Experiment 20000535 PARAMETER Experiment Name: Zm_Hybrid_Seed_Dev_P Parameter: Organism Value: Zea mays
  misc_feature: MA Experiment 20000535 PARAMETER Experiment Name: Zm_Hybrid_Seed_Dev_P Parameter: Plant Line Value: 35A19
  misc_feature: MA Experiment 20000535 PARAMETER Experiment Name: Zm_Hybrid_Seed_Dev_P Parameter: Tissue Value: Embryo vs. Unfert Floret
  misc_feature: Pfam Name: Aldo_ket_red Pfam Description: Aldo/keto reductase family
atagaatctccggttgctagcgtaaagcgcatccgtacatataagagaacaagagamcttctgctattgcttaagtcgttcatttttttacatgttgtaggggcttagcatgggtaggagtgtgcgctcgcgacggcggcttgcacgggaatcactggaccaagataaagccggcggtgaaccagatcgagacgcacccttacttccagcgcgactctcttgtcaagttctgccagaagcacgggatctgcgtgaccgcgcacaccccgctgggtggctccaccgccaacgctgagtggttcgggarggtgtcgtgcctggacgancctgtyatcaaragcttgactgagaagttcgacaagacsccggtkcarctcgtcctccgctggggtctgtarcgggacacggtggtgatccccaagacctctaargtggag

SEQ ID NO: 821 - protein, 61 aa, Zea mays subsp. mays
  peptide (1)..(61): Ceres Seq. ID no. 3010870
  misc_feature: Pfam Name: Aldo_ket_red Pfam Description: Aldo/keto reductase family
MGRSVRSRRRLARESLDQDKAGGEPDRDAPLLPARLSCQVLPEARDLRDRAHPAGWLHRQR

SEQ ID NO: 822 - protein, 35 aa, Zea mays subsp. mays
  peptide (1)..(35): Ceres Seq. ID no. 3010871
  misc_feature: Pfam Name: Aldo_ket_red Pfam Description: Aldo/keto reductase family
  misc_feature (19)..(19): Xaa is any aa, unknown or other
IESPVASVKRIRTYKRTRXLLLLLKSFIFLHVVGA

SEQ ID NO: 823 - DNA, 551 bp, Zea mays subsp. mays
  misc_feature (1)..(551): Ceres Seq. ID no. 12467704
  misc_feature: MA Experiment ID: 108515 Result: Up-regulated in Transcription
  misc_feature: MA Experiment 108515 PARAMETER Experiment Name: Zm_2mM_SA_P Parameter: Age (day) Value: 8
  misc_feature: MA Experiment 108515 PARAMETER Experiment Name: Zm_2mM_SA_P Parameter: Organism Value: Zea mays
  misc_feature: MA Experiment 108515 PARAMETER Experiment Name: Zm_2mM_SA_P Parameter: Plant Line Value: 35A19
  misc_feature: MA Experiment 108515 PARAMETER Experiment Name: Zm_2mM_SA_P Parameter: Timepoint (hr) Value: 12
  misc_feature: MA Experiment 108515 PARAMETER Experiment Name: Zm_2mM_SA_P Parameter: Tissue Value: Aerial
  misc_feature: MA Experiment 108515 PARAMETER Experiment Name: Zm_2mM_SA_P Parameter: Treatment Value: 2mM SA vs. No Treatment
  misc_feature: MA Experiment ID: 108527 Result: Up-regulated in Transcription
  misc_feature: MA Experiment 108527 PARAMETER Experiment Name: Zm_5mM_NO_P Parameter: Age (day) Value: 8
  misc_feature: MA Experiment 108527 PARAMETER Experiment Name: Zm_5mM_NO_P Parameter: Organism Value: Zea mays
  misc_feature: MA Experiment 108527 PARAMETER Experiment Name: Zm_5mM_NO_P Parameter: Plant Line Value: 35A19
  misc_feature: MA Experiment 108527 PARAMETER Experiment Name: Zm_5mM_NO_P Parameter: Timepoint (hr) Value: 6
  misc_feature: MA Experiment 108527 PARAMETER Experiment Name: Zm_5mM_NO_P Parameter: Tissue Value: Aerial
  misc_feature: MA Experiment 108527 PARAMETER Experiment Name: Zm_5mM_NO_P Parameter: Treatment Value: 5mM NO vs. No Treatment
  misc_feature: MA Experiment ID: 108534 Result: Up-regulated in Transcription
  misc_feature: MA Experiment 108534 PARAMETER Experiment Name: Zm_4deg_Cold_P Parameter: Age (hr) Value: 8
  misc_feature: MA Experiment 108534 PARAMETER Experiment Name: Zm_4deg_Cold_P Parameter: Organism Value: Zea mays
  misc_feature: MA Experiment 108534 PARAMETER Experiment Name: Zm_4deg_Cold_P Parameter: Plant Line Value: 35A19
  misc_feature: MA Experiment 108534 PARAMETER Experiment Name: Zm_4deg_Cold_P Parameter: Temperature (deg C) Value: 4 vs. 22
  misc_feature: MA Experiment 108534 PARAMETER Experiment Name: Zm_4deg_Cold_P Parameter: Timepoint (hr) Value: 6
  misc_feature: MA Experiment 108534 PARAMETER Experiment Name: Zm_4deg_Cold_P Parameter: Tissue Value: Aerial
acttattacaaccgaccaacgcgctttgtaacgcctccgctgcaatcagcccccgcggcgagcttgccctgcccctgaccctgagtgctagttctcgccgttacgtaaggcttcttggccttgcgtcctccgtctttcgttgctgatacatcgaggtattaaagaagctgcctgattccgggtagcagaggtcgccgccgcctgcagcaatggccgacttctcctggctcacggtgcttggtttcctattcctcacattcaactcaggcatggcgatttatcggtccaacggtggggaagacgagaaacggagtcggttacaagggtatctcccgtgaccttgcacccattcagaggctaagcgtgatcgtggaaggagcagagctagtgagtgatccattcattgatcagtattcagtagtactagtaaactagtacggagtagtttgatcaagccggcaatttagtttacctgctccccttgttccgtttganaggagatcggtgtactgtgtacaatatgttttcaataaacttttgattntttggtt

SEQ ID NO: 824 - protein, 47 aa, Zea mays subsp. mays
  peptide (1)..(47): Ceres Seq. ID no. 12467705
LLQPTNALCNASAAISPRGELALPLTLSASSRRYVRLLGLASSVFRC

SEQ ID NO: 825 - protein, 42 aa, Zea mays subsp. mays
  peptide (1)..(42): Ceres Seq. ID no. 12467706
MADFSWLTVLGFLFLTFNSGMAIYRSNGGEDEKRSRLQGYLP

SEQ ID NO: 826 - DNA, 408 bp, Zea mays subsp. mays
  misc_feature (1)..(408): Ceres Seq. ID no. 3477294
  misc_feature: MA Experiment ID: 108536 Result: Up-regulated in Transcription
  misc_feature: MA Experiment 108536 PARAMETER Experiment Name: Zm_Meristem_P Parameter: Age (day) Value: 8
  misc_feature: MA Experiment 108536 PARAMETER Experiment Name: Zm_Meristem_P Parameter: Organism Value: Zea mays
  misc_feature: MA Experiment 108536 PARAMETER Experiment Name: Zm_Meristem_P Parameter: Plant Line Value: 35A19
  misc_feature: MA Experiment 108536 PARAMETER Experiment Name: Zm_Meristem_P Parameter: Tissue Value: Shoot Meristem vs. Above Shoot Meristem
  misc_feature: MA Experiment ID: 20000535 Result: Up-regulated in Transcription
  misc_feature: MA Experiment 20000535 PARAMETER Experiment Name: Zm_Hybrid_Seed_Dev_P Parameter: DAP Value: 30 vs. 12
  misc_feature: MA Experiment 20000535 PARAMETER Experiment Name: Zm_Hybrid_Seed_Dev_P Parameter: Organism Value: Zea mays
  misc_feature: MA Experiment 20000535 PARAMETER Experiment Name: Zm_Hybrid_Seed_Dev_P Parameter: Plant Line Value: 35A19
  misc_feature: MA Experiment 20000535 PARAMETER Experiment Name: Zm_Hybrid_Seed_Dev_P Parameter: Tissue Value: Embryo vs. Unfert Floret
gaaccagtccccggggctttcrgtactcccttggcagaaacatgcgatgaagttggatcggcactggccaaaggaaggccagttacctatcacaaaaatgaaggcaatattgagagccagaaatcacccttggtggcaaacagcactaatgataaagaacacaaactaggaaagtcagaaaagacggtttgggaaaaaaatgacgaacccggtgatgaggtcgatgttcagcaaaatggctggggaacatggaaacaaaatagtacgtcagcttggtcttatagagcccttaggagcagcgcccttggcccgacgatggcacttctacgcgggaagaacaaccagaggggtaaaccaccctatcgaaagaaggccaagtaattgcctacstgtttagtgtttaagttc

SEQ ID NO: 827 - protein, 126 aa, Zea mays subsp. mays
  peptide (1)..(126): Ceres Seq. ID no. 3477295
  misc_feature (8)..(8): Xaa is any aa, unknown or other
EPVPGAFXTPLAETCDEVGSALAKGRPVTYHKNEGNIESQKSPLVANSTNDKEHKLGKSEKTVWEKNDEPGDEVDVQQNGWGTWKQNSTSAWSYRALRSSALGPTMALLRGKNNQRGKPPYRKKAK

SEQ ID NO: 828 - protein, 65 aa, Zea mays subsp. mays
  peptide (1)..(65): Ceres Seq. ID no. 3477296
  misc_feature (64)..(64): Xaa is any aa, unknown or other
MTNPVMRSMFSKMAGEHGNKIVRQLGLIEPLGAAPLARRWHFYAGRTTRGVNHPIERRPSNCLXV

SEQ ID NO: 829 - DNA, 791 bp, Zea mays subsp. mays
  misc_feature (1)..(791): Ceres Seq. ID no. 12468710
  misc_feature: MA Experiment ID: 108533 Result: Down-regulated in Transcription
  misc_feature: MA Experiment 108533 PARAMETER Experiment Name: Zm_4deg_Cold_P Parameter: Age (hr) Value: 8
  misc_feature: MA Experiment 108533 PARAMETER Experiment Name: Zm_4deg_Cold_P Parameter: Organism Value: Zea mays
  misc_feature: MA Experiment 108533 PARAMETER Experiment Name: Zm_4deg_Cold_P Parameter: Plant Line Value: 35A19
  misc_feature: MA Experiment 108533 PARAMETER Experiment Name: Zm_4deg_Cold_P Parameter: Temperature (deg C) Value: 4 vs. 22
  misc_feature: MA Experiment 108533 PARAMETER Experiment Name: Zm_4deg_Cold_P Parameter: Timepoint (hr) Value: 1
  misc_feature: MA Experiment 108533 PARAMETER Experiment Name: Zm_4deg_Cold_P Parameter: Tissue Value: Aerial
  misc_feature: MA Experiment ID: 108534 Result: Down-regulated in Transcription
  misc_feature: MA Experiment 108534 PARAMETER Experiment Name: Zm_4deg_Cold_P Parameter: Age (hr) Value: 8
  misc_feature: MA Experiment 108534 PARAMETER Experiment Name: Zm_4deg_Cold_P Parameter: Organism Value: Zea mays
  misc_feature: MA Experiment 108534 PARAMETER Experiment Name: Zm_4deg_Cold_P Parameter: Plant Line Value: 35A19
  misc_feature: MA Experiment 108534 PARAMETER Experiment Name: Zm_4deg_Cold_P Parameter: Temperature (deg C) Value: 4 vs. 22
  misc_feature: MA Experiment 108534 PARAMETER Experiment Name: Zm_4deg_Cold_P Parameter: Timepoint (hr) Value: 6
  misc_feature: MA Experiment 108534 PARAMETER Experiment Name: Zm_4deg_Cold_P Parameter: Tissue Value: Aerial
taaagcacatgcgaaaggcgttcattcactctgtaaggcgttcttgttcttcacccaacgcttctcgcacgggggtcttctattgaccattgaagaaaaacatttgactggagatagcatctggaatatatgaatctagtataacgaactaggtctgaaaatctgggcaattccagattcgattctcatgtgagatgataaaaacgtcataattatcctgcgtactaaaaaatattcgctagttgagtcgttccggcatatacaaaattattagctacagttgttcctgcatgcgtgtaatgtccttcggtgaacttgtctgtcattatcatttaaaaacgtatctagatgcattacggaagatttttagtttcctttgttatatttgagaagttatatattgtatatacagagagatgcagctgtgtattatttgctgtagcttcgattgcgagacgcatggttgcagtcattttattgtagttagtttatatgatacgtcgttgtcaccgcatgaagattaactgctgtgccatatgaagacctcctgcctcatcacggtgtttgtatataagatcaactgcagtgcctacacggtggacggagtatttgtatgatgtgaaggtcactattcagcatcgtcagtatgaaatggctatggccttcaaagctttctttcttggtcaccggacagggaagaaatattctgctcaagctcacaattagatacaagacataactcagataagagcttgttcaacttgcactatagttcatttgagtatttacct

SEQ ID NO: 830 - protein, 44 aa, Zea mays subsp. mays
  peptide (1)..(44): Ceres Seq. ID no. 12468711
MHYGRFLVSFVIFEKLYIVYTERCSCVLFAVASIARRMVAVILL

SEQ ID NO: 831 - protein, 43 aa, Zea mays subsp. mays
  peptide (1)..(43): Ceres Seq. ID no. 12468712
KAHAKGVHSLCKAFLFFTQRFSHGGLLLTIEEKHLTGDSIWNI

SEQ ID NO: 832 - protein, 35 aa, Zea mays subsp. mays
  peptide (1)..(35): Ceres Seq. ID no. 12468713
MQLCIICCSFDCETHGCSHFIVVSLYDTSLSPHED

SEQ ID NO: 833 - DNA, 233 bp, Zea mays subsp. mays
  misc_feature (1)..(233): Ceres Seq. ID no. 15169985
  misc_feature: MA Experiment ID: 108544 Result: Up-regulated in Transcription
  misc_feature: MA Experiment ID: 20000477 Result: Up-regulated in Transcription
  misc_feature: MA Experiment 20000477 PARAMETER Experiment Name: Zm_5mM_SA_P Parameter: Age (day) Value: 10
  misc_feature: MA Experiment 20000477 PARAMETER Experiment Name: Zm_5mM_SA_P Parameter: Organism Value: Zea mays
  misc_feature: MA Experiment 20000477 PARAMETER Experiment Name: Zm_5mM_SA_P Parameter: Plant Line Value: 35A19
  misc_feature: MA Experiment 20000477 PARAMETER Experiment Name: Zm_5mM_SA_P Parameter: Timepoint (hr) Value: 48
  misc_feature: MA Experiment 20000477 PARAMETER Experiment Name: Zm_5mM_SA_P Parameter: Tissue Value: Aerial
  misc_feature: MA Experiment 20000477 PARAMETER Experiment Name: Zm_5mM_SA_P Parameter: Treatment Value: 5mM SA vs. No Treatment
  misc_feature: MA Experiment ID: 20000534 Result: Down-regulated in Transcription
  misc_feature: MA Experiment 20000534 PARAMETER Experiment Name: Zm_Hybrid_Pollen_P Parameter: Age (day) Value: 8
  misc_feature: MA Experiment 20000534 PARAMETER Experiment Name: Zm_Hybrid_Pollen_P Parameter: Organism Value: Zea mays
  misc_feature: MA Experiment 20000534 PARAMETER Experiment Name: Zm_Hybrid_Pollen_P Parameter: Plant Line Value: 35A19
  misc_feature: MA Experiment 20000534 PARAMETER Experiment Name: Zm_Hybrid_Pollen_P Parameter: Tissue Value: Pollen vs. Aerial
  misc_feature: MA Experiment ID: 20000535 Result: Down-regulated in Transcription
  misc_feature: MA Experiment 20000535 PARAMETER Experiment Name: Zm_Hybrid_Seed_Dev_P Parameter: DAP Value: 30 vs. 12
  misc_feature: MA Experiment 20000535 PARAMETER Experiment Name: Zm_Hybrid_Seed_Dev_P Parameter: Organism Value: Zea mays
  misc_feature: MA Experiment 20000535 PARAMETER Experiment Name: Zm_Hybrid_Seed_Dev_P Parameter: Plant Line Value: 35A19
  misc_feature: MA Experiment 20000535 PARAMETER Experiment Name: Zm_Hybrid_Seed_Dev_P Parameter: Tissue Value: Embryo vs. Unfert Floret
acgaggcttccaagaaggccaagtagagggcgaagttcttctccacatggctttgctttagtaagtctgaagatcgaataacaggaccatatctgaagatcgaataacggatcatataaatgaggtactcggaaaatgttctgaaatccttacgaacagaacgttgccttcatgtttacactgtactcatgagtcacagtgatatggagatggcatagcctactattggaagt

SEQ ID NO: 834 - protein, 32 aa, Zea mays subsp. mays
  peptide (1)..(32): Ceres Seq. ID no. 15169986
MRYSENVLKSLRTERCLHVYTVLMSHSDMEMA

SEQ ID NO: 835 - DNA, 483 bp, Zea mays subsp. mays
  misc_feature (1)..(483): Ceres Seq. ID no. 15169987
  misc_feature: MA Experiment ID: 108535 Result: Up-regulated in Transcription
  misc_feature: MA Experiment 108535 PARAMETER Experiment Name: Zm_Meristem_P Parameter: Age (day) Value: 8
  misc_feature: MA Experiment 108535 PARAMETER Experiment Name: Zm_Meristem_P Parameter: Organism Value: Zea mays
  misc_feature: MA Experiment 108535 PARAMETER Experiment Name: Zm_Meristem_P Parameter: Plant Line Value: 35A19
  misc_feature: MA Experiment 108535 PARAMETER Experiment Name: Zm_Meristem_P Parameter: Tissue Value: Root Meristem vs. Above Root Meristem
  misc_feature: MA Experiment ID: 108543 Result: Up-regulated in Transcription
  misc_feature: MA Experiment ID: 108556 Result: Down-regulated in Transcription
  misc_feature: MA Experiment 108556 PARAMETER Experiment Name: Zm_Drought_P Parameter: Age (day) Value: 9
  misc_feature: MA Experiment 108556 PARAMETER Experiment Name: Zm_Drought_P Parameter: Organism Value: Zea mays
  misc_feature: MA Experiment 108556 PARAMETER Experiment Name: Zm_Drought_P Parameter: Plant Line Value: 35A19
  misc_feature: MA Experiment 108556 PARAMETER Experiment Name: Zm_Drought_P Parameter: Timepoint (hr) Value: 24
  misc_feature: MA Experiment 108556 PARAMETER Experiment Name: Zm_Drought_P Parameter: Tissue Value: Aerial
  misc_feature: MA Experiment 108556 PARAMETER Experiment Name: Zm_Drought_P Parameter: Treatment Value: Drought vs. No Drought
  misc_feature: MA Experiment ID: 20000477 Result: Down-regulated in Transcription
  misc_feature: MA Experiment 20000477 PARAMETER Experiment Name: Zm_5mM_SA_P Parameter: Age (day) Value: 10
  misc_feature: MA Experiment 20000477 PARAMETER Experiment Name: Zm_5mM_SA_P Parameter: Organism Value: Zea mays
  misc_feature: MA Experiment 20000477 PARAMETER Experiment Name: Zm_5mM_SA_P Parameter: Plant Line Value: 35A19
  misc_feature: MA Experiment 20000477 PARAMETER Experiment Name: Zm_5mM_SA_P Parameter: Timepoint (hr) Value: 48
  misc_feature: MA Experiment 20000477 PARAMETER Experiment Name: Zm_5mM_SA_P Parameter: Tissue Value: Aerial
  misc_feature: MA Experiment 20000477 PARAMETER Experiment Name: Zm_5mM_SA_P Parameter: Treatment Value: 5mM SA vs. No Treatment
  misc_feature: MA Experiment ID: 20000479 Result: Down-regulated in Transcription
  misc_feature: MA Experiment 20000479 PARAMETER Experiment Name: Zm_Drought_P Parameter: Age (day) Value: 10
  misc_feature: MA Experiment 20000479 PARAMETER Experiment Name: Zm_Drought_P Parameter: Organism Value: Zea mays
  misc_feature: MA Experiment 20000479 PARAMETER Experiment Name: Zm_Drought_P Parameter: Plant Line Value: 35A19
  misc_feature: MA Experiment 20000479 PARAMETER Experiment Name: Zm_Drought_P Parameter: Timepoint (hr) Value: 48
  misc_feature: MA Experiment 20000479 PARAMETER Experiment Name: Zm_Drought_P Parameter: Tissue Value: Aerial
  misc_feature: MA Experiment 20000479 PARAMETER Experiment Name: Zm_Drought_P Parameter: Treatment Value: Drought vs. No Drought
  misc_feature: MA Experiment ID: 20000480 Result: Down-regulated in Transcription
  misc_feature: MA Experiment 20000480 PARAMETER Experiment Name: Zm_Drought_P Parameter: Age (day) Value: 11
  misc_feature: MA Experiment 20000480 PARAMETER Experiment Name: Zm_Drought_P Parameter: Organism Value: Zea mays
  misc_feature: MA Experiment 20000480 PARAMETER Experiment Name: Zm_Drought_P Parameter: Plant Line Value: 35A19
  misc_feature: MA Experiment 20000480 PARAMETER Experiment Name: Zm_Drought_P Parameter: Timepoint (hr) Value: 72
  misc_feature: MA Experiment 20000480 PARAMETER Experiment Name: Zm_Drought_P Parameter: Tissue Value: Aerial
  misc_feature: MA Experiment 20000480 PARAMETER Experiment Name: Zm_Drought_P Parameter: Treatment Value: Drought vs. No Drought
  misc_feature: MA Experiment ID: 20000487 Result: Down-regulated in Transcription
  misc_feature: MA Experiment 20000487 PARAMETER Experiment Name: Zm_50mM_NH4NO3_L_to_H_P Parameter: Organism Value: Zea mays
  misc_feature: MA Experiment 20000487 PARAMETER Experiment Name: Zm_50mM_NH4NO3_L_to_H_P Parameter: Timepoint (hr) Value: 4
  misc_feature: MA Experiment 20000487 PARAMETER Experiment Name: Zm_50mM_NH4NO3_L_to_H_P Parameter: Tissue Value: Leaves
  misc_feature: MA Experiment 20000487 PARAMETER Experiment Name: Zm_50mM_NH4NO3_L_to_H_P Parameter: Treatment Value: 50mM NH4NO3 vs. 100mM Mannitol
  misc_feature: MA Experiment ID: 20000492 Result: Up-regulated in Transcription
  misc_feature: MA Experiment 20000492 PARAMETER Experiment Name: Zm_Hybrid_Seed_Dev_P Parameter: DAP Value: 12
  misc_feature: MA Experiment 20000492 PARAMETER Experiment Name: Zm_Hybrid_Seed_Dev_P Parameter: Organism Value: Zea mays
  misc_feature: MA Experiment 20000492 PARAMETER Experiment Name: Zm_Hybrid_Seed_Dev_P Parameter: Plant Line Value: 35A19
  misc_feature: MA Experiment 20000492 PARAMETER Experiment Name: Zm_Hybrid_Seed_Dev_P Parameter: Tissue Value: Fert Kernel vs. Unfert Floret
  misc_feature: MA Experiment ID: 20000632 Result: Down-regulated in Transcription
  misc_feature: MA Experiment 20000632 PARAMETER Experiment Name: Zm_Herbicide-Treatments_P Parameter: Timepoint (hr) Value: 4
  misc_feature: MA Experiment 20000632 PARAMETER Experiment Name: Zm_Herbicide-Treatments_P Parameter: Tissue Value: Aerial
  misc_feature: MA Experiment 20000632 PARAMETER Experiment Name: Zm_Herbicide-Treatments_P Parameter: Treatment Value: Glean vs. No Treatment
atctgaacagatgcaatctctgcattcagacaacaagggtgatgagatgaaagatgagaacgaaaccatttatatgcagaacagcaaaggtcggactcagactctatccaatgctgatgcatcagtactttccactaccgaggctgagaacacatccatcaagacttcccctgaaattgagctcaatggggatgatgtctgtattacaagcagcatagggaagaccaggaagtatagagcaaaattcactttgtttctgagcgtgatcgtgatctttttagcaatcatcaccatgctcatcaggatagagaatgatgatgattcagcgtaccttgtccccacttaatattttgtatgcttcattgctgtctgtttaaattcctatttttattttatcactatagagtggtttgtgttttgaacaattttgcagtcatctatccatgaatgacagcaaataattaaattagaattttcatgctc

SEQ ID NO: 836 - protein, 114 aa, Zea mays subsp. mays
  peptide (1)..(114): Ceres Seq. ID no. 15169988
SEQMQSLHSDNKGDEMKDENETIYMQNSKGRTQTLSNADASVLSTTEAENTSIKTSPEIELNGDDVCITSSIGKTRKYRAKFTLFLSVIVIFLAIITMLIRIENDDDSAYLVPT

SEQ ID NO: 837 - protein, 111 aa, Zea mays subsp. mays
  peptide (1)..(111): Ceres Seq. ID no. 15169989
MQSLHSDNKGDEMKDENETIYMQNSKGRTQTLSNADASVLSTTEAENTSIKTSPEIELNGDDVCITSSIGKTRKYRAKFTLFLSVIVIFLAIITMLIRIENDDDSAYLVPT

SEQ ID NO: 838 - protein, 99 aa, Zea mays subsp. mays
  peptide (1)..(99): Ceres Seq. ID no. 15169990
MKDENETIYMQNSKGRTQTLSNADASVLSTTEAENTSIKTSPEIELNGDDVCITSSIGKTRKYRAKFTLFLSVIVIFLAIITMLIRIENDDDSAYLVPT

SEQ ID NO: 839 - DNA, 547 bp, Zea mays subsp. mays
  misc_feature (1)..(547): Ceres Seq. ID no. 3624700
  misc_feature: MA Experiment ID: 108522 Result: Up-regulated in Transcription
  misc_feature: MA Experiment 108522 PARAMETER Experiment Name: Zm_42deg_Heat_P Parameter: Age (day) Value: 8
  misc_feature: MA Experiment 108522 PARAMETER Experiment Name: Zm_42deg_Heat_P Parameter: Organism Value: Zea mays
  misc_feature: MA Experiment 108522 PARAMETER Experiment Name: Zm_42deg_Heat_P Parameter: Plant Line Value: 35A19
  misc_feature: MA Experiment 108522 PARAMETER Experiment Name: Zm_42deg_Heat_P Parameter: Temperature (deg C) Value: 42 vs. 22
  misc_feature: MA Experiment 108522 PARAMETER Experiment Name: Zm_42deg_Heat_P Parameter: Timepoint (hr) Value: 1
  misc_feature: MA Experiment 108522 PARAMETER Experiment Name: Zm_42deg_Heat_P Parameter: Tissue Value: Aerial
  misc_feature: MA Experiment ID: 108543 Result: Up-regulated in Transcription
attttcatcgactgttcgggtgccagcatgtgtgaggtgcagaaagtggaagcagcttttagacatgcagccgaggttcatcctaaccatccaagtattgaacttatcagaacaaacaccgacggaatggcctcctcctcatctgaccatcccaacacagagcccaggaattgatggctcggtttgtcagatccttccaacccaggagcaggtaaatgtgagttgcttaagtaccaaagagagaggtcctgttcagcaagatgattagaagcattggcaattggcatggcttgttaattagattcgtggttcttagtctaaaatcacattgaagagggagacggacccaagtgatgcagttcatgtgttatctgtatcagtctctgtttttataagctgtcatatattttctcgaaactatcttgtgttgattttgtgtgaagtgtacttttaatggcacgggccattgtgtatttgcttgaaagataaggatggkattatctttgtatttgaactctaaatgcttaaantgaagtgatcattctgg

SEQ ID NO: 840 - protein, 88 aa, Zea mays subsp. mays
  peptide (1)..(88): Ceres Seq. ID no. 3624701
FSSTVRVPACVRCRKWKQLLDMQPRFILTIQVLNLSEQTPTEWPPPHLTIPTQSPGIDGSVCQILPTQEQVNVSCLSTKERGPVQQDD

SEQ ID NO: 841 - protein, 67 aa, Zea mays subsp. mays
  peptide (1)..(67): Ceres Seq. ID no. 3624702
MQPRFILTIQVLNLSEQTPTEWPPPHLTIPTQSPGIDGSVCQILPTQEQVNVSCLSTKERGPVQQDD

SEQ ID NO: 842 - protein, 57 aa, Zea mays subsp. mays
  peptide (1)..(57): Ceres Seq. ID no. 3624703
IFIDCSGASMCEVQKVEAAFRHAAEVHPNHPSIELIRTNTDGMASSSSDHPNTEPRN

SEQ ID NO: 843 - DNA, 426 bp, Zea mays subsp. mays
  misc_feature (1)..(426): Ceres Seq. ID no. 15170030
  misc_feature: MA Experiment ID: 108529 Result: Down-regulated in Transcription
  misc_feature: MA Experiment 108529 PARAMETER Experiment Name: Zm_Imbibed_Seeds_P Parameter: Age (day) Value: 5 vs. 2
  misc_feature: MA Experiment 108529 PARAMETER Experiment Name: Zm_Imbibed_Seeds_P Parameter: Organism Value: Zea mays
  misc_feature: MA Experiment 108529 PARAMETER Experiment Name: Zm_Imbibed_Seeds_P Parameter: Plant Line Value: 35A19
  misc_feature: MA Experiment 108529 PARAMETER Experiment Name: Zm_Imbibed_Seeds_P Parameter: Tissue Value: Roots vs. Embryo
  misc_feature: MA Experiment ID: 20000478 Result: Down-regulated in Transcription
  misc_feature: MA Experiment 20000478 PARAMETER Experiment Name: Zm_5mM_SA_P Parameter: Age (day) Value: 11
  misc_feature: MA Experiment 20000478 PARAMETER Experiment Name: Zm_5mM_SA_P Parameter: Organism Value: Zea mays
  misc_feature: MA Experiment 20000478 PARAMETER Experiment Name: Zm_5mM_SA_P Parameter: Plant Line Value: 35A19
  misc_feature: MA Experiment 20000478 PARAMETER Experiment Name: Zm_5mM_SA_P Parameter: Timepoint (hr) Value: 72
  misc_feature: MA Experiment 20000478 PARAMETER Experiment Name: Zm_5mM_SA_P Parameter: Tissue Value: Aerial
  misc_feature: MA Experiment 20000478 PARAMETER Experiment Name: Zm_5mM_SA_P Parameter: Treatment Value: 5mM SA vs. No Treatment
  misc_feature: MA Experiment ID: 20000479 Result: Down-regulated in Transcription
  misc_feature: MA Experiment 20000479 PARAMETER Experiment Name: Zm_Drought_P Parameter: Age (day) Value: 10
  misc_feature: MA Experiment 20000479 PARAMETER Experiment Name: Zm_Drought_P Parameter: Organism Value: Zea mays
  misc_feature: MA Experiment 20000479 PARAMETER Experiment Name: Zm_Drought_P Parameter: Plant Line Value: 35A19
  misc_feature: MA Experiment 20000479 PARAMETER Experiment Name: Zm_Drought_P Parameter: Timepoint (hr) Value: 48
  misc_feature: MA Experiment 20000479 PARAMETER Experiment Name: Zm_Drought_P Parameter: Tissue Value: Aerial
  misc_feature: MA Experiment 20000479 PARAMETER Experiment Name: Zm_Drought_P Parameter: Treatment Value: Drought vs. No Drought
  misc_feature: MA Experiment ID: 20000480 Result: Down-regulated in Transcription
  misc_feature: MA Experiment 20000480 PARAMETER Experiment Name: Zm_Drought_P Parameter: Age (day) Value: 11
  misc_feature: MA Experiment 20000480 PARAMETER Experiment Name: Zm_Drought_P Parameter: Organism Value: Zea mays
  misc_feature: MA Experiment 20000480 PARAMETER Experiment Name: Zm_Drought_P Parameter: Plant Line Value: 35A19
  misc_feature: MA Experiment 20000480 PARAMETER Experiment Name: Zm_Drought_P Parameter: Timepoint (hr) Value: 72
  misc_feature: MA Experiment 20000480 PARAMETER Experiment Name: Zm_Drought_P Parameter: Tissue Value: Aerial
  misc_feature: MA Experiment 20000480 PARAMETER Experiment Name: Zm_Drought_P Parameter: Treatment Value: Drought vs. No Drought
tcatggtggacacggtactttgtccagaccggcttgacagagaacgaagggccgctgaagaaattcgaagaggctacatccaagaacaaatacaaaccaggttgtcagatcttccacctgagttcgccaaggtgatgcgcatccatagcaccttgaattgttgtcacaccccctgccctcctccggttggcttgctcattgttcgtgtggaggaaatcgtcgcaaaaaaagccatcaggaataggttagcttatgtaaagaggctccgacacttgttgctagaaattcactctggaaattaaattgtgtccccaatgattgcaaactggagccccgctgggatatatatgttagaactttcacgctgttgtaccgctgtgctatccatgtattgagcagtttgaaatgtaaagctcttgatgatcc

SEQ ID NO: 844 - protein, 99 aa, Zea mays subsp. mays
  peptide (1)..(99): Ceres Seq. ID no. 15170031
MVDTVLCPDRLDRERRAAEEIRRGYIQEQIQTRLSDLPPEFAKVMRIHSTLNCCHTPCPPPVGLLIVRVEEIVAKKAIRNRLAYVKRLRHLLLEIHSGN

SEQ ID NO: 845 - protein, 55 aa, Zea mays subsp. mays
  peptide (1)..(55): Ceres Seq. ID no. 15170032
MRIHSTLNCCHTPCPPPVGLLIVRVEEIVAKKAIRNRLAYVKRLRHLLLEIHSGN

SEQ ID NO: 846 - DNA, 310 bp, Zea mays subsp. mays
  misc_feature (1)..(310): Ceres Seq. ID no. 3623316
  misc_feature: MA Experiment ID: 108527 Result: Up-regulated in Transcription
  misc_feature: MA Experiment 108527 PARAMETER Experiment Name: Zm_5mM_NO_P Parameter: Age (day) Value: 8
  misc_feature: MA Experiment 108527 PARAMETER Experiment Name: Zm_5mM_NO_P Parameter: Organism Value: Zea mays
  misc_feature: MA Experiment 108527 PARAMETER Experiment Name: Zm_5mM_NO_P Parameter: Plant Line Value: 35A19
  misc_feature: MA Experiment 108527 PARAMETER Experiment Name: Zm_5mM_NO_P Parameter: Timepoint (hr) Value: 6
  misc_feature: MA Experiment 108527 PARAMETER Experiment Name: Zm_5mM_NO_P Parameter: Tissue Value: Aerial
  misc_feature: MA Experiment 108527 PARAMETER Experiment Name: Zm_5mM_NO_P Parameter: Treatment Value: 5mM NO vs. No Treatment
  misc_feature: MA Experiment ID: 108528 Result: Up-regulated in Transcription
  misc_feature: MA Experiment 108528 PARAMETER Experiment Name: Zm_Imbibed_Seeds_P Parameter: Age (day) Value: 5 vs. 2
  misc_feature: MA Experiment 108528 PARAMETER Experiment Name: Zm_Imbibed_Seeds_P Parameter: Organism Value: Zea mays
  misc_feature: MA Experiment 108528 PARAMETER Experiment Name: Zm_Imbibed_Seeds_P Parameter: Plant Line Value: 35A19
  misc_feature: MA Experiment 108528 PARAMETER Experiment Name: Zm_Imbibed_Seeds_P Parameter: Tissue Value: Aerial vs. Embryo
  misc_feature: MA Experiment ID: 108529 Result: Up-regulated in Transcription
  misc_feature: MA Experiment 108529 PARAMETER Experiment Name: Zm_Imbibed_Seeds_P Parameter: Age (day) Value: 5 vs. 2
  misc_feature: MA Experiment 108529 PARAMETER Experiment Name: Zm_Imbibed_Seeds_P Parameter: Organism Value: Zea mays
  misc_feature: MA Experiment 108529 PARAMETER Experiment Name: Zm_Imbibed_Seeds_P Parameter: Plant Line Value: 35A19
  misc_feature: MA Experiment 108529 PARAMETER Experiment Name: Zm_Imbibed_Seeds_P Parameter: Tissue Value: Roots vs. Embryo
  misc_feature: MA Experiment ID: 108530 Result: Up-regulated in Transcription
  misc_feature: MA Experiment 108530 PARAMETER Experiment Name: Zm_Imbibed_Seeds_P Parameter: Age (day) Value: 6 vs. 2
  misc_feature: MA Experiment 108530 PARAMETER Experiment Name: Zm_Imbibed_Seeds_P Parameter: Organism Value: Zea mays
  misc_feature: MA Experiment 108530 PARAMETER Experiment Name: Zm_Imbibed_Seeds_P Parameter: Plant Line Value: 35A19
  misc_feature: MA Experiment 108530 PARAMETER Experiment Name: Zm_Imbibed_Seeds_P Parameter: Tissue Value: Aerial vs. Embryo
  misc_feature: MA Experiment ID: 108534 Result: Up-regulated in Transcription
  misc_feature: MA Experiment 108534 PARAMETER Experiment Name: Zm_4deg_Cold_P Parameter: Age (hr) Value: 8
  misc_feature: MA Experiment 108534 PARAMETER Experiment Name: Zm_4deg_Cold_P Parameter: Organism Value: Zea mays
  misc_feature: MA Experiment 108534 PARAMETER Experiment Name: Zm_4deg_Cold_P Parameter: Plant Line Value: 35A19
  misc_feature: MA Experiment 108534 PARAMETER Experiment Name: Zm_4deg_Cold_P Parameter: Temperature (deg C) Value: 4 vs. 22
  misc_feature: MA Experiment 108534 PARAMETER Experiment Name: Zm_4deg_Cold_P Parameter: Timepoint (hr) Value: 6
  misc_feature: MA Experiment 108534 PARAMETER Experiment Name: Zm_4deg_Cold_P Parameter: Tissue Value: Aerial
  misc_feature: MA Experiment ID: 108535 Result: Down-regulated in Transcription
  misc_feature: MA Experiment 108535 PARAMETER Experiment Name: Zm_Meristem_P Parameter: Age (day) Value: 8
  misc_feature: MA Experiment 108535 PARAMETER Experiment Name: Zm_Meristem_P Parameter: Organism Value: Zea mays
  misc_feature: MA Experiment 108535 PARAMETER Experiment Name: Zm_Meristem_P Parameter: Plant Line Value: 35A19
  misc_feature: MA Experiment 108535 PARAMETER Experiment Name: Zm_Meristem_P Parameter: Tissue Value: Root Meristem vs. Above Root Meristem
  misc_feature: MA Experiment ID: 20000478 Result: Down-regulated in Transcription
  misc_feature: MA Experiment 20000478 PARAMETER Experiment Name: Zm_5mM_SA_P Parameter: Age (day) Value: 11
  misc_feature: MA Experiment 20000478 PARAMETER Experiment Name: Zm_5mM_SA_P Parameter: Organism Value: Zea mays
  misc_feature: MA Experiment 20000478 PARAMETER Experiment Name: Zm_5mM_SA_P Parameter: Plant Line Value: 35A19
  misc_feature: MA Experiment 20000478 PARAMETER Experiment Name: Zm_5mM_SA_P Parameter: Timepoint (hr) Value: 72
  misc_feature: MA Experiment 20000478 PARAMETER Experiment Name: Zm_5mM_SA_P Parameter: Tissue Value: Aerial
  misc_feature: MA Experiment 20000478 PARAMETER Experiment Name: Zm_5mM_SA_P Parameter: Treatment Value: 5mM SA vs. No Treatment
  misc_feature: MA Experiment ID: 20000487 Result: Down-regulated in Transcription
  misc_feature: MA Experiment 20000487 PARAMETER Experiment Name: Zm_50mM_NH4NO3_L_to_H_P Parameter: Organism Value: Zea mays
  misc_feature: MA Experiment 20000487 PARAMETER Experiment Name: Zm_50mM_NH4NO3_L_to_H_P Parameter: Timepoint (hr) Value: 4
  misc_feature: MA Experiment 20000487 PARAMETER Experiment Name: Zm_50mM_NH4NO3_L_to_H_P Parameter: Tissue Value: Leaves
  misc_feature: MA Experiment 20000487 PARAMETER Experiment Name: Zm_50mM_NH4NO3_L_to_H_P Parameter: Treatment Value: 50mM NH4NO3 vs. 100mM Mannitol
  misc_feature: MA Experiment ID: 20000488 Result: Down-regulated in Transcription
  misc_feature: MA Experiment 20000488 PARAMETER Experiment Name: Zm_50mM_NH4NO3_L_to_H_P Parameter: Organism Value: Zea mays
  misc_feature: MA Experiment 20000488 PARAMETER Experiment Name: Zm_50mM_NH4NO3_L_to_H_P Parameter: Timepoint (hr) Value: 8
  misc_feature: MA Experiment 20000488 PARAMETER Experiment Name: Zm_50mM_NH4NO3_L_to_H_P Parameter: Tissue Value: Leaves
  misc_feature: MA Experiment 20000488 PARAMETER Experiment Name: Zm_50mM_NH4NO3_L_to_H_P Parameter: Treatment Value: 50mM NH4NO3 vs. 100mM Mannitol
  misc_feature: MA Experiment ID: 20000626 Result: Up-regulated in Transcription
  misc_feature: MA Experiment 20000626 PARAMETER Experiment Name: Zm_Herbicide-Treatments_P Parameter: Timepoint (hr) Value: 12
  misc_feature: MA Experiment 20000626 PARAMETER Experiment Name: Zm_Herbicide-Treatments_P Parameter: Tissue Value: Aerial
  misc_feature: MA Experiment 20000626 PARAMETER Experiment Name: Zm_Herbicide-Treatments_P Parameter: Treatment Value: Roundup vs. No Treatment
  misc_feature: MA Experiment ID: 20001608 Result: Down-regulated in Transcription
  misc_feature: MA Experiment 20001608 PARAMETER Experiment Name: Zm_50ppm_KNO3_L-to-H_P Parameter: Age (day) Value: 21
  misc_feature: MA Experiment 20001608 PARAMETER Experiment Name: Zm_50ppm_KNO3_L-to-H_P Parameter: Organism Value: Zea mays
  misc_feature: MA Experiment 20001608 PARAMETER Experiment Name: Zm_50ppm_KNO3_L-to-H_P Parameter: Plant Line Value: 35A19
  misc_feature: MA Experiment 20001608 PARAMETER Experiment Name: Zm_50ppm_KNO3_L-to-H_P Parameter: Timepoint (hr) Value: 48
  misc_feature: MA Experiment 20001608 PARAMETER Experiment Name: Zm_50ppm_KNO3_L-to-H_P Parameter: Tissue Value: Shoots
  misc_feature: MA Experiment 20001608 PARAMETER Experiment Name: Zm_50ppm_KNO3_L-to-H_P Parameter: Treatment Value: 50ppm KNO3 vs. 50ppm KCl
aaagctctgatagtctgatgtgagcgtgaatgtgaatggtttggcttttgtgaatacagacagtgaaagtgtaaattccttgttccactgggtgggatgggagatatggtgttgtacagcaatttatagttgttggtcagtaggcagttcaggatgtgaagaattctggtgagctgggcgaatatggatgctctttcaccaggatttagtcaggctcgatggatggatgctaaaacgcgtctggaaatgtaaattgtggcaccttgtttgattttcgaactgaaataatgtaaataattgattgcaagtt

SEQ ID NO: 847 - DNA, 548 bp, Zea mays subsp. mays
  misc_feature (1)..(548): Ceres Seq. ID no. 12589511
  misc_feature: MA Experiment ID: 20000487 Result: Up-regulated in Transcription
  misc_feature: MA Experiment 20000487 PARAMETER Experiment Name: Zm_50mM_NH4NO3_L_to_H_P Parameter: Organism Value: Zea mays
  misc_feature: MA Experiment 20000487 PARAMETER Experiment Name: Zm_50mM_NH4NO3_L_to_H_P Parameter: Timepoint (hr) Value: 4
  misc_feature: MA Experiment 20000487 PARAMETER Experiment Name: Zm_50mM_NH4NO3_L_to_H_P Parameter: Tissue Value: Leaves
  misc_feature: MA Experiment 20000487 PARAMETER Experiment Name: Zm_50mM_NH4NO3_L_to_H_P Parameter: Treatment Value: 50mM NH4NO3 vs. 100mM Mannitol
  misc_feature: MA Experiment ID: 20001605 Result: Up-regulated in Transcription
  misc_feature: MA Experiment 20001605 PARAMETER Experiment Name: Zm_50ppm_KNO3_L-to-H_P Parameter: Age (day) Value: 19
  misc_feature: MA Experiment 20001605 PARAMETER Experiment Name: Zm_50ppm_KNO3_L-to-H_P Parameter: Organism Value: Zea mays
  misc_feature: MA Experiment 20001605 PARAMETER Experiment Name: Zm_50ppm_KNO3_L-to-H_P Parameter: Plant Line Value: 35A19
  misc_feature: MA Experiment 20001605 PARAMETER Experiment Name: Zm_50ppm_KNO3_L-to-H_P Parameter: Timepoint (hr) Value: 4
  misc_feature: MA Experiment 20001605 PARAMETER Experiment Name: Zm_50ppm_KNO3_L-to-H_P Parameter: Tissue Value: Shoots
  misc_feature: MA Experiment 20001605 PARAMETER Experiment Name: Zm_50ppm_KNO3_L-to-H_P Parameter: Treatment Value: 50ppm KNO3 vs. 50ppm KCl
  misc_feature: MA Experiment ID: 20001606 Result: Up-regulated in Transcription
  misc_feature: MA Experiment 20001606 PARAMETER Experiment Name: Zm_50ppm_KNO3_L-to-H_P Parameter: Age (day) Value: 19
  misc_feature: MA Experiment 20001606 PARAMETER Experiment Name: Zm_50ppm_KNO3_L-to-H_P Parameter: Organism Value: Zea mays
  misc_feature: MA Experiment 20001606 PARAMETER Experiment Name: Zm_50ppm_KNO3_L-to-H_P Parameter: Plant Line Value: 35A19
  misc_feature: MA Experiment 20001606 PARAMETER Experiment Name: Zm_50ppm_KNO3_L-to-H_P Parameter: Timepoint (hr) Value: 8
  misc_feature: MA Experiment 20001606 PARAMETER Experiment Name: Zm_50ppm_KNO3_L-to-H_P Parameter: Tissue Value: Shoots
  misc_feature: MA Experiment 20001606 PARAMETER Experiment Name: Zm_50ppm_KNO3_L-to-H_P Parameter: Treatment Value: 50ppm KNO3 vs. 50ppm KCl
tctatctctctttttattgctattgtgacttgaaagatgttagaacaggtattctacatttatgttcttctcatccggattgccatatgttttcttcagttctgcacaactagttgctctgcaggatagtgtgtatcggctttgtgctaacttatatgcattttgtgccgtaagtgtttcctgctatatagactgaaggaaagtgggcagttgggttagacttgtatcctgtcttttccaacaatcattttcctctcatgtgacataatacatttgttcttggaaactagtttttgaattgctgtcttagcatttacatgtttagctgctttattatactgtatgcatccaggggtatggaatatggtctgttgcatgtgctttttcctggtatgcaaagcatgtagtttgaattccatgggttgtgttatatgtttcgctatctaagtcagcttcatctgaaaatgatwagcagatcagtttnaattggaacatgccaagctgaagcgatactcacctgcaaggagcgtyttctctgtgtactgcgt

SEQ ID NO: 848 - protein, 44 aa, Zea mays subsp. mays
  peptide (1)..(44): Ceres Seq. ID no. 12589512
MFFSSGLPYVFFSSAQLVALQDSVYRLCANLYAFCAVSVSCYID

SEQ ID NO: 849 - protein, 39 aa, Zea mays subsp. mays
  peptide (1)..(39): Ceres Seq. ID no. 12589513
  misc_feature (13)..(13): Xaa is any aa, unknown or other
  misc_feature (18)..(18): Xaa is any aa, unknown or other
  misc_feature (34)..(34): Xaa is any aa, unknown or other
MFRYLSQLHLKMXSRSVXIGTCQAEAILTCKERXLCVLR

SEQ ID NO: 850 - protein, 36 aa, Zea mays subsp. mays
  peptide (1)..(36): Ceres Seq. ID no. 12589514
YLSFYCYCDLKDVRTGILHLCSSHPDCHMFSSVLHN

SEQ ID NO: 851 - DNA, 567 bp, Zea mays subsp. mays
  misc_feature (1)..(567): Ceres Seq. ID no. 12469610
  misc_feature: MA Experiment ID: 108689 Result: Up-regulated in Transcription
  misc_feature: MA Experiment 108689 PARAMETER Experiment Name: Zm_Drought_Roots_P Parameter: Age (day) Value: 9
  misc_feature: MA Experiment 108689 PARAMETER Experiment Name: Zm_Drought_Roots_P Parameter: Organism Value: Zea mays
  misc_feature: MA Experiment 108689 PARAMETER Experiment Name: Zm_Drought_Roots_P Parameter: Plant Line Value: 35A19
  misc_feature: MA Experiment 108689 PARAMETER Experiment Name: Zm_Drought_Roots_P Parameter: Timepoint (hr) Value: 24
  misc_feature: MA Experiment 108689 PARAMETER Experiment Name: Zm_Drought_Roots_P Parameter: Tissue Value: Roots
  misc_feature: MA Experiment 108689 PARAMETER Experiment Name: Zm_Drought_Roots_P Parameter: Treatment Value: Drought vs. No Drought
  misc_feature: MA Experiment ID: 20000535 Result: Up-regulated in Transcription
  misc_feature: MA Experiment 20000535 PARAMETER Experiment Name: Zm_Hybrid_Seed_Dev_P Parameter: DAP Value: 30 vs. 12
  misc_feature: MA Experiment 20000535 PARAMETER Experiment Name: Zm_Hybrid_Seed_Dev_P Parameter: Organism Value: Zea mays
  misc_feature: MA Experiment 20000535 PARAMETER Experiment Name: Zm_Hybrid_Seed_Dev_P Parameter: Plant Line Value: 35A19
  misc_feature: MA Experiment 20000535 PARAMETER Experiment Name: Zm_Hybrid_Seed_Dev_P Parameter: Tissue Value: Embryo vs. Unfert Floret
atatgatgacacatgtacgagctgcatcgatcagaatcctcagaccctggtgacccccttgggctcgccggccgcgccgccgacgccgtagtcgtggtcccggtagccaccgctgccgccgaagaggcccgtgtggagcatgagcacgtagaggagctgcgtgaaggcgaggatgatgacgaaggcctccagcacgcgcaggcgccagccgcggtgtccgccgatgtggatctccttgcaggccagcccgaaggcgagcgccgtgatggcccaggcgatgagcgacgacgcggcgttggtggccaggctgtcgtggcgccaggcgcgcacgtggtgcacgcccgccagcttggacgccgcgcccaccacgccggccaggatggcgaacaccaggaagtagaacgtcgcgccgttgccggccacgcctgcgtgcaatgcaacgcaatgcgcatcagaggcgcgccatgcatatcgatgcatgagtatatgcatgatgcgtgattactactggcctttcttacgtaccggggtagttggtctgcccgttgatgaagtggttcaggttcc

SEQ ID NO: 852 - protein, 162 aa, Zea mays subsp. mays
  peptide (1)..(162): Ceres Seq. ID no. 12469611
MYELHRSESSDPGDPLGLAGRAADAVVVVPVATAAAEEARVEHEHVEELREGEDDDEGLQHAQAPAAVSADVDLLAGQPEGERRDGPGDERRRGVGGQAVVAPGAHVVHARQLGRRAHHAGQDGEHQEVERRAVAGHACVQCNAMRIRGAPCISMHEYMHDA

SEQ ID NO: 853 - DNA, 548 bp, Zea mays subsp. mays
  misc_feature (1)..(548): Ceres Seq. ID no. 12469817
  misc_feature: MA Experiment ID: 108528 Result: Up-regulated in Transcription
  misc_feature: MA Experiment 108528 PARAMETER Experiment Name: Zm_Imbibed_Seeds_P Parameter: Age (day) Value: 5 vs. 2
  misc_feature: MA Experiment 108528 PARAMETER Experiment Name: Zm_Imbibed_Seeds_P Parameter: Organism Value: Zea mays
  misc_feature: MA Experiment 108528 PARAMETER Experiment Name: Zm_Imbibed_Seeds_P Parameter: Plant Line Value: 35A19
  misc_feature: MA Experiment 108528 PARAMETER Experiment Name: Zm_Imbibed_Seeds_P Parameter: Tissue Value: Aerial vs. Embryo
  misc_feature: MA Experiment ID: 108530 Result: Up-regulated in Transcription
  misc_feature: MA Experiment 108530 PARAMETER Experiment Name: Zm_Imbibed_Seeds_P Parameter: Age (day) Value: 6 vs. 2
  misc_feature: MA Experiment 108530 PARAMETER Experiment Name: Zm_Imbibed_Seeds_P Parameter: Organism Value: Zea mays
  misc_feature: MA Experiment 108530 PARAMETER Experiment Name: Zm_Imbibed_Seeds_P Parameter: Plant Line Value: 35A19
  misc_feature: MA Experiment 108530 PARAMETER Experiment Name: Zm_Imbibed_Seeds_P Parameter: Tissue Value: Aerial vs. Embryo
  misc_feature: MA Experiment ID: 108534 Result: Down-regulated in Transcription
  misc_feature: MA Experiment 108534 PARAMETER Experiment Name: Zm_4deg_Cold_P Parameter: Age (hr) Value: 8
  misc_feature: MA Experiment 108534 PARAMETER Experiment Name: Zm_4deg_Cold_P Parameter: Organism Value: Zea mays
  misc_feature: MA Experiment 108534 PARAMETER Experiment Name: Zm_4deg_Cold_P Parameter: Plant Line Value: 35A19
  misc_feature: MA Experiment 108534 PARAMETER Experiment Name: Zm_4deg_Cold_P Parameter: Temperature (deg C) Value: 4 vs. 22
  misc_feature: MA Experiment 108534 PARAMETER Experiment Name: Zm_4deg_Cold_P Parameter: Timepoint (hr) Value: 6
  misc_feature: MA Experiment 108534 PARAMETER Experiment Name: Zm_4deg_Cold_P Parameter: Tissue Value: Aerial
  misc_feature: MA Experiment ID: 108547 Result: Up-regulated in Transcription
  misc_feature: MA Experiment 108547 PARAMETER Experiment Name: Zm_Imbibed_Seeds_P Parameter: Age (day) Value: 4 vs. 2
  misc_feature: MA Experiment 108547 PARAMETER Experiment Name: Zm_Imbibed_Seeds_P Parameter: Organism Value: Zea mays
  misc_feature: MA Experiment 108547 PARAMETER Experiment Name: Zm_Imbibed_Seeds_P Parameter: Plant Line Value: 35A19
  misc_feature: MA Experiment 108547 PARAMETER Experiment Name: Zm_Imbibed_Seeds_P Parameter: Tissue Value: Aerial vs. Embryo
  misc_feature: MA Experiment ID: 108689 Result: Up-regulated in Transcription
  misc_feature: MA Experiment 108689 PARAMETER Experiment Name: Zm_Drought_Roots_P Parameter: Age (day) Value: 9
  misc_feature: MA Experiment 108689 PARAMETER Experiment Name: Zm_Drought_Roots_P Parameter: Organism Value: Zea mays
  misc_feature: MA Experiment 108689 PARAMETER Experiment Name: Zm_Drought_Roots_P Parameter: Plant Line Value: 35A19
  misc_feature: MA Experiment 108689 PARAMETER Experiment Name: Zm_Drought_Roots_P Parameter: Timepoint (hr) Value: 24
  misc_feature: MA Experiment 108689 PARAMETER Experiment Name: Zm_Drought_Roots_P Parameter: Tissue Value: Roots
  misc_feature: MA Experiment 108689 PARAMETER Experiment Name: Zm_Drought_Roots_P Parameter: Treatment Value: Drought vs. No Drought
  misc_feature: MA Experiment ID: 20000478 Result: Up-regulated in Transcription
  misc_feature: MA Experiment 20000478 PARAMETER Experiment Name: Zm_5mM_SA_P Parameter: Age (day) Value: 11
  misc_feature: MA Experiment 20000478 PARAMETER Experiment Name: Zm_5mM_SA_P Parameter: Organism Value: Zea mays
  misc_feature: MA Experiment 20000478 PARAMETER Experiment Name: Zm_5mM_SA_P Parameter: Plant Line Value: 35A19
  misc_feature: MA Experiment 20000478 PARAMETER Experiment Name: Zm_5mM_SA_P Parameter: Timepoint (hr) Value: 72
  misc_feature: MA Experiment 20000478 PARAMETER Experiment Name: Zm_5mM_SA_P Parameter: Tissue Value: Aerial
  misc_feature: MA Experiment 20000478 PARAMETER Experiment Name: Zm_5mM_SA_P Parameter: Treatment Value: 5mM SA vs. No Treatment
  misc_feature: MA Experiment ID: 20000479 Result: Up-regulated in Transcription
  misc_feature: MA Experiment 20000479 PARAMETER Experiment Name: Zm_Drought_P Parameter: Age (day) Value: 10
  misc_feature: MA Experiment 20000479 PARAMETER Experiment Name: Zm_Drought_P Parameter: Organism Value: Zea mays
  misc_feature: MA Experiment 20000479 PARAMETER Experiment Name: Zm_Drought_P Parameter: Plant Line Value: 35A19
  misc_feature: MA Experiment 20000479 PARAMETER Experiment Name: Zm_Drought_P Parameter: Timepoint (hr) Value: 48
  misc_feature: MA Experiment 20000479 PARAMETER Experiment Name: Zm_Drought_P Parameter: Tissue Value: Aerial
  misc_feature: MA Experiment 20000479 PARAMETER Experiment Name: Zm_Drought_P Parameter: Treatment Value: Drought vs. No Drought
  misc_feature: MA Experiment ID: 20000480 Result: Up-regulated in Transcription
  misc_feature: MA Experiment 20000480 PARAMETER Experiment Name: Zm_Drought_P Parameter: Age (day) Value: 11
  misc_feature: MA Experiment 20000480 PARAMETER Experiment Name: Zm_Drought_P Parameter: Organism Value: Zea mays
  misc_feature: MA Experiment 20000480 PARAMETER Experiment Name: Zm_Drought_P Parameter: Plant Line Value: 35A19
  misc_feature: MA Experiment 20000480 PARAMETER Experiment Name: Zm_Drought_P Parameter: Timepoint (hr) Value: 72
  misc_feature: MA Experiment 20000480 PARAMETER Experiment Name: Zm_Drought_P Parameter: Tissue Value: Aerial
  misc_feature: MA Experiment 20000480 PARAMETER Experiment Name: Zm_Drought_P Parameter: Treatment Value: Drought vs. No Drought
  misc_feature: MA Experiment ID: 20000633 Result: Up-regulated in Transcription
  misc_feature: MA Experiment 20000633 PARAMETER Experiment Name: Zm_Herbicide-Treatments_P Parameter: Timepoint (hr) Value: 4
  misc_feature: MA Experiment 20000633 PARAMETER Experiment Name: Zm_Herbicide-Treatments_P Parameter: Tissue Value: Aerial
  misc_feature: MA Experiment 20000633 PARAMETER Experiment Name: Zm_Herbicide-Treatments_P Parameter: Treatment Value: Trimec vs. No Treatment
agtgaaggattcacctggccttcggattctagccctagaccagtgtaaaagtgtggaagtccttgtgctccagttgatgccagtctcttcccagccactaggtttgctctgcacaagtgttggcacaccatcggtctgccagtagtgaccacgccggtcagtttggccatgtcgccgtggccaagacaactcagcaagagctccgagcagaaggagtgtaaattcaagacgaagtggttgtggaagaggagtttgctccagtgcctattcagcaagtggatggagctatctaactggttattgggtagaaaggtcttaagcctcttcactgcaataaaggtgatgaggagtactctatgtgttcgtgaggctggagggcgctttcagttntagaggaggattagttaggcttgtgtataagctttggaggggtcctaccttcctgctaatgtagtaagttatgcactttgagtatatcaggacttgtaataaatgtaactcttcctatgtaataaacttcagttttagaaatgaaaagaatgttttgt

SEQ ID NO: 854 - protein, 74 aa, Zea mays subsp. mays
  peptide (1)..(74): Ceres Seq. ID no. 12469818
  misc_feature (74)..(74): Xaa is any aa, unknown or other
MSPWPRQLSKSSEQKECKFKTKWLWKRSLLQCLFSKWMELSNWLLGRKVLSLFTAIKVMRSTLCVREAGGRFQX

SEQ ID NO: 855 - protein, 47 aa, Zea mays subsp. mays
  peptide (1)..(47): Ceres Seq. ID no. 12469819
VKDSPGLRILALDQCKSVEVLVLQLMPVSSQPLGLLCTSVGTPSVCQ

SEQ ID NO: 856 - protein, 37 aa, Zea mays subsp. mays
  peptide (1)..(37): Ceres Seq. ID no. 12469820
  misc_feature (37)..(37): Xaa is any aa, unknown or other
MELSNWLLGRKVLSLFTAIKVMRSTLCVREAGGRFQX

SEQ ID NO: 857 - DNA, 633 bp, Zea mays subsp. mays
  misc_feature (1)..(633): Ceres Seq. ID no. 12469383
  misc_feature: MA Experiment ID: 108689 Result: Up-regulated in Transcription
  misc_feature: MA Experiment 108689 PARAMETER Experiment Name: Zm_Drought_Roots_P Parameter: Age (day) Value: 9
  misc_feature: MA Experiment 108689 PARAMETER Experiment Name: Zm_Drought_Roots_P Parameter: Organism Value: Zea mays
  misc_feature: MA Experiment 108689 PARAMETER Experiment Name: Zm_Drought_Roots_P Parameter: Plant Line Value: 35A19
  misc_feature: MA Experiment 108689 PARAMETER Experiment Name: Zm_Drought_Roots_P Parameter: Timepoint (hr) Value: 24
  misc_feature: MA Experiment 108689 PARAMETER Experiment Name: Zm_Drought_Roots_P Parameter: Tissue Value: Roots
  misc_feature: MA Experiment 108689 PARAMETER Experiment Name: Zm_Drought_Roots_P Parameter: Treatment Value: Drought vs. No Drought
acataatcagtgatgcctgcccatatatatacaaccctttggttgggttcagtgaaggtttcctccctgctcacgaattctgtccaaagataactgaagggtgttgtggcgcatgtgttcctgctagtattaatcttctccccagtccctagatcgatttgcttaagctggtatgtgccaccccctgtgctggtgaccacgcgtgcagttctcccacctcgccatggctcggacgtccttaggagttgctggcccgtatgaagcttgttccgtaatcatctcagagctcccaaaataaagagcgaagattcaagatgaagtggttgctaaagaggactctactccaatgcctgctcatcaagtggatggagccatctaactggggtttaatagagggatttagacctccgtctccgcaacaaaggtgttgaggagtactcaaagtgattcggaggctggacggcatttccagtactgggggaggattagttaggcttgtgtataagctttggagggttcctaccttcctgctattgtaataagttatgcactttatatatatcaggacttgtaataaatgtaactcttcctatgtaataaccttcatttttagaaatgaaaacaatgttttgt

SEQ ID NO: 858 - protein, 49 aa, Zea mays subsp. mays
  peptide (1)..(49): Ceres Seq. ID no. 12469384
IISDACPYIYNPLVGFSEGFLPAHEFCPKITEGCCGACVPASINLLPSP

SEQ ID NO: 859 - protein, 38 aa, Zea mays subsp. mays
  peptide (1)..(38): Ceres Seq. ID no. 12469385
MKWLLKRTLLQCLLIKWMEPSNWGLIEGFRPPSPQQRC

SEQ ID NO: 860 - DNA, 819 bp, Zea mays subsp. mays
  misc_feature (1)..(819): Ceres Seq. ID no. 12469329
  misc_feature: MA Experiment ID: 108515 Result: Up-regulated in Transcription
  misc_feature: MA Experiment 108515 PARAMETER Experiment Name: Zm_2mM_SA_P Parameter: Age (day) Value: 8
  misc_feature: MA Experiment 108515 PARAMETER Experiment Name: Zm_2mM_SA_P Parameter: Organism Value: Zea mays
  misc_feature: MA Experiment 108515 PARAMETER Experiment Name: Zm_2mM_SA_P Parameter: Plant Line Value: 35A19
  misc_feature: MA Experiment 108515 PARAMETER Experiment Name: Zm_2mM_SA_P Parameter: Timepoint (hr) Value: 12
  misc_feature: MA Experiment 108515 PARAMETER Experiment Name: Zm_2mM_SA_P Parameter: Tissue Value: Aerial
  misc_feature: MA Experiment 108515 PARAMETER Experiment Name: Zm_2mM_SA_P Parameter: Treatment Value: 2mM SA vs. No Treatment
  misc_feature: MA Experiment ID: 108527 Result: Up-regulated in Transcription
  misc_feature: MA Experiment 108527 PARAMETER Experiment Name: Zm_5mM_NO_P Parameter: Age (day) Value: 8
  misc_feature: MA Experiment 108527 PARAMETER Experiment Name: Zm_5mM_NO_P Parameter: Organism Value: Zea mays
  misc_feature: MA Experiment 108527 PARAMETER Experiment Name: Zm_5mM_NO_P Parameter: Plant Line Value: 35A19
  misc_feature: MA Experiment 108527 PARAMETER Experiment Name: Zm_5mM_NO_P Parameter: Timepoint (hr) Value: 6
  misc_feature: MA Experiment 108527 PARAMETER Experiment Name: Zm_5mM_NO_P Parameter: Tissue Value: Aerial
  misc_feature: MA Experiment 108527 PARAMETER Experiment Name: Zm_5mM_NO_P Parameter: Treatment Value: 5mM NO vs. No Treatment
  misc_feature: MA Experiment ID: 108528 Result: Down-regulated in Transcription
  misc_feature: MA Experiment 108528 PARAMETER Experiment Name: Zm_Imbibed_Seeds_P Parameter: Age (day) Value: 5 vs. 2
  misc_feature: MA Experiment 108528 PARAMETER Experiment Name: Zm_Imbibed_Seeds_P Parameter: Organism Value: Zea mays
  misc_feature: MA Experiment 108528 PARAMETER Experiment Name: Zm_Imbibed_Seeds_P Parameter: Plant Line Value: 35A19
  misc_feature: MA Experiment 108528 PARAMETER Experiment Name: Zm_Imbibed_Seeds_P Parameter: Tissue Value: Aerial vs. Embryo
  misc_feature: MA Experiment ID: 108535 Result: Down-regulated in Transcription
  misc_feature: MA Experiment 108535 PARAMETER Experiment Name: Zm_Meristem_P Parameter: Age (day) Value: 8
  misc_feature: MA Experiment 108535 PARAMETER Experiment Name: Zm_Meristem_P Parameter: Organism Value: Zea mays
  misc_feature: MA Experiment 108535 PARAMETER Experiment Name: Zm_Meristem_P Parameter: Plant Line Value: 35A19
  misc_feature: MA Experiment 108535 PARAMETER Experiment Name: Zm_Meristem_P Parameter: Tissue Value: Root Meristem vs. Above Root Meristem
  misc_feature: MA Experiment ID: 108547 Result: Down-regulated in Transcription
  misc_feature: MA Experiment 108547 PARAMETER Experiment Name: Zm_Imbibed_Seeds_P Parameter: Age (day) Value: 4 vs. 2
  misc_feature: MA Experiment 108547 PARAMETER Experiment Name: Zm_Imbibed_Seeds_P Parameter: Organism Value: Zea mays
  misc_feature: MA Experiment 108547 PARAMETER Experiment Name: Zm_Imbibed_Seeds_P Parameter: Plant Line Value: 35A19
  misc_feature: MA Experiment 108547 PARAMETER Experiment Name: Zm_Imbibed_Seeds_P Parameter: Tissue Value: Aerial vs. Embryo
  misc_feature: MA Experiment ID: 108548 Result: Up-regulated in Transcription
  misc_feature: MA Experiment 108548 PARAMETER Experiment Name: Zm_20uM_KNO3_H-to-L_P Parameter: Age (day) Value: 11
  misc_feature: MA Experiment 108548 PARAMETER Experiment Name: Zm_20uM_KNO3_H-to-L_P Parameter: Organism Value: Zea mays
  misc_feature: MA Experiment 108548 PARAMETER Experiment Name: Zm_20uM_KNO3_H-to-L_P Parameter: Plant Line Value: 35A19
  misc_feature: MA Experiment 108548 PARAMETER Experiment Name: Zm_20uM_KNO3_H-to-L_P Parameter: Timepoint (hr) Value: 4
  misc_feature: MA Experiment 108548 PARAMETER Experiment Name: Zm_20uM_KNO3_H-to-L_P Parameter: Tissue Value: Roots
  misc_feature: MA Experiment 108548 PARAMETER Experiment Name: Zm_20uM_KNO3_H-to-L_P Parameter: Treatment Value: 20uM KNO3 vs. 60mM KNO3
  misc_feature: MA Experiment ID: 108559 Result: Up-regulated in Transcription
  misc_feature: MA Experiment 108559 PARAMETER Experiment Name: Zm_5mM_NO_P Parameter: Age (day) Value: 8
  misc_feature: MA Experiment 108559 PARAMETER Experiment Name: Zm_5mM_NO_P Parameter: Organism Value: Zea mays
  misc_feature: MA Experiment 108559 PARAMETER Experiment Name: Zm_5mM_NO_P Parameter: Plant Line Value: 35A19
  misc_feature: MA Experiment 108559 PARAMETER Experiment Name: Zm_5mM_NO_P Parameter: Timepoint (hr) Value: 12
  misc_feature: MA Experiment 108559 PARAMETER Experiment Name: Zm_5mM_NO_P Parameter: Tissue Value: Aerial
  misc_feature: MA Experiment 108559 PARAMETER Experiment Name: Zm_5mM_NO_P Parameter: Treatment Value: 5mM NO vs. No Treatment
  misc_feature: MA Experiment ID: 108687 Result: Down-regulated in Transcription
  misc_feature: MA Experiment 108687 PARAMETER Experiment Name: Zm_Embryos-Flowers__P Parameter: Tissue Value: Embryo vs. Aerial+
  misc_feature: MA Experiment ID: 108689 Result: Down-regulated in Transcription
  misc_feature: MA Experiment 108689 PARAMETER Experiment Name: Zm_Drought_Roots_P Parameter: Age (day) Value: 9
  misc_feature: MA Experiment 108689 PARAMETER Experiment Name: Zm_Drought_Roots_P Parameter: Organism Value: Zea mays
  misc_feature: MA Experiment 108689 PARAMETER Experiment Name: Zm_Drought_Roots_P Parameter: Plant Line Value: 35A19
  misc_feature: MA Experiment 108689 PARAMETER Experiment Name: Zm_Drought_Roots_P Parameter: Timepoint (hr) Value: 24
  misc_feature: MA Experiment 108689 PARAMETER Experiment Name: Zm_Drought_Roots_P Parameter: Tissue Value: Roots
  misc_feature: MA Experiment 108689 PARAMETER Experiment Name: Zm_Drought_Roots_P Parameter: Treatment Value: Drought vs. No Drought
  misc_feature: MA Experiment ID: 20000108 Result: Down-regulated in Transcription
  misc_feature: MA Experiment 20000108 PARAMETER Experiment Name: Zm_Root-Tips_P Parameter: Age (day) Value: 12
  misc_feature: MA Experiment 20000108 PARAMETER Experiment Name: Zm_Root-Tips_P Parameter: Organism Value: Zea mays
  misc_feature: MA Experiment 20000108 PARAMETER Experiment Name: Zm_Root-Tips_P Parameter: Tissue Value: Root tips vs. Root mid region    35
  misc_feature: MA Experiment 20000108 PARAMETER Experiment Name: Zm_Root-Tips_P Parameter: Tissue Value: Root tips vs. Root mid region   Sequence Listing-Misc Features (4)
  misc_feature: MA Experiment ID: 20000477 Result: Up-regulated in Transcription
  misc_feature: MA Experiment 20000477 PARAMETER Experiment Name: Zm_5mM_SA_P Parameter: Age (day) Value: 10
  misc_feature: MA Experiment 20000477 PARAMETER Experiment Name: Zm_5mM_SA_P Parameter: Organism Value: Zea mays
  misc_feature: MA Experiment 20000477 PARAMETER Experiment Name: Zm_5mM_SA_P Parameter: Plant Line Value: 35A19
  misc_feature: MA Experiment 20000477 PARAMETER Experiment Name: Zm_5mM_SA_P Parameter: Timepoint (hr) Value: 48
  misc_feature: MA Experiment 20000477 PARAMETER Experiment Name: Zm_5mM_SA_P Parameter: Tissue Value: Aerial
  misc_feature: MA Experiment 20000477 PARAMETER Experiment Name: Zm_5mM_SA_P Parameter: Treatment Value: 5mM SA vs. No Treatment
  misc_feature: MA Experiment ID: 20000478 Result: Up-regulated in Transcription
  misc_feature: MA Experiment 20000478 PARAMETER Experiment Name: Zm_5mM_SA_P Parameter: Age (day) Value: 11
  misc_feature: MA Experiment 20000478 PARAMETER Experiment Name: Zm_5mM_SA_P Parameter: Organism Value: Zea mays
  misc_feature: MA Experiment 20000478 PARAMETER Experiment Name: Zm_5mM_SA_P Parameter: Plant Line Value: 35A19
  misc_feature: MA Experiment 20000478 PARAMETER Experiment Name: Zm_5mM_SA_P Parameter: Timepoint (hr) Value: 72
  misc_feature: MA Experiment 20000478 PARAMETER Experiment Name: Zm_5mM_SA_P Parameter: Tissue Value: Aerial
  misc_feature: MA Experiment 20000478 PARAMETER Experiment Name: Zm_5mM_SA_P Parameter: Treatment Value: 5mM SA vs. No Treatment
  misc_feature: MA Experiment ID: 20000488 Result: Down-regulated in Transcription
  misc_feature: MA Experiment 20000488 PARAMETER Experiment Name: Zm_50mM_NH4NO3_L_to_H_P Parameter: Organism Value: Zea mays
  misc_feature: MA Experiment 20000488 PARAMETER Experiment Name: Zm_50mM_NH4NO3_L_to_H_P Parameter: Timepoint (hr) Value: 8
  misc_feature: MA Experiment 20000488 PARAMETER Experiment Name: Zm_50mM_NH4NO3_L_to_H_P Parameter: Tissue Value: Leaves
  misc_feature: MA Experiment 20000488 PARAMETER Experiment Name: Zm_50mM_NH4NO3_L_to_H_P Parameter: Treatment Value: 50mM NH4NO3 vs. 100mM Mannitol
  misc_feature: MA Experiment ID: 20000626 Result: Up-regulated in Transcription
  misc_feature: MA Experiment 20000626 PARAMETER Experiment Name: Zm_Herbicide-Treatments_P Parameter: Timepoint (hr) Value: 12
  misc_feature: MA Experiment 20000626 PARAMETER Experiment Name: Zm_Herbicide-Treatments_P Parameter: Tissue Value: Aerial
  misc_feature: MA Experiment 20000626 PARAMETER Experiment Name: Zm_Herbicide-Treatments_P Parameter: Treatment Value: Roundup vs. No Treatment
  misc_feature: MA Experiment ID: 20000627 Result: Up-regulated in Transcription
  misc_feature: MA Experiment 20000627 PARAMETER Experiment Name: Zm_Herbicide-Treatments_P Parameter: Timepoint (hr) Value: 12
  misc_feature: MA Experiment 20000627 PARAMETER Experiment Name: Zm_Herbicide-Treatments_P Parameter: Tissue Value: Aerial
  misc_feature: MA Experiment 20000627 PARAMETER Experiment Name: Zm_Herbicide-Treatments_P Parameter: Treatment Value: Finale vs. No Treatment
  misc_feature: MA Experiment ID: 20000629 Result: Up-regulated in Transcription
  misc_feature: MA Experiment 20000629 PARAMETER Experiment Name: Zm_Herbicide-Treatments_P Parameter: Timepoint (hr) Value: 12
  misc_feature: MA Experiment 20000629 PARAMETER Experiment Name: Zm_Herbicide-Treatments_P Parameter: Tissue Value: Aerial
  misc_feature: MA Experiment 20000629 PARAMETER Experiment Name: Zm_Herbicide-Treatments_P Parameter: Treatment Value: Trimec vs. No Treatment
  misc_feature: MA Experiment ID: 20000630 Result: Up-regulated in Transcription
  misc_feature: MA Experiment 20000630 PARAMETER Experiment Name: Zm_Herbicide-Treatments_P Parameter: Timepoint (hr) Value: 4
  misc_feature: MA Experiment 20000630 PARAMETER Experiment Name: Zm_Herbicide-Treatments_P Parameter: Tissue Value: Aerial
  misc_feature: MA Experiment 20000630 PARAMETER Experiment Name: Zm_Herbicide-Treatments_P Parameter: Treatment Value: Roundup vs. No Treatment
agatcggagctagcaccggcgacctcgtaacgaactcagcgcgccaaggaaatctcgcgtggtcgttacgtgccgagctcgcctcctcgcgcctatataacctggccatctgttcctcctccttgtctcatgaggtcgcgatcgaagccaccatctaccgggagcagagggtgtcgccgccgatgaacttgcgatgggccaacgcagggaccccggcgtgctgctcggggggttttccggttccgagggtcgagaagggtgtcttcatgaagccgatgcagtggagcgccctgtggtggcttgattcctcaccggacttggtgtccgccgcggaaccgcgctccgccccagtaagctcctgaagccgttctggctggcgcactggacagagggcgacgcgcagaaggctcaggcggaagatgccaagcagaagctggcgctcctggaggcgcagctcgacgggaggaggttnttcgggggcgacaccatcggctacgtcgacatcgcagcctgcgtgctagctccttggctcagcgtcgtagaggaggtgactggagtggccgtggttgacgaaggtgagttccctgctntgcgccgttggtccagagagtacagctcctgcgaagctntcaagcagtgcgtcccggacagggaccagctcgtcgccttctatactgaaaggaaggaggcgtacaaagtgttcgctaatgcatggttgcagcagtagtttggttttgtgtgtggaataataatgtatggatcacagattgtctgtgctgaaataacagtaatgagcctagctagataagtaaataacct

SEQ ID NO: 861 - protein, 119 aa, Zea mays subsp. mays
  peptide (1)..(119): Ceres Seq. ID no. 12469330
IGASTGDLVTNSARQGNLAWSLRAELASSRLYNLAICSSSLSHEVAIEATIYREQRVSPPMNLRWANAGTPACCSGGFPVPRVEKGVFMKPMQWSALWWLDSSPDLVSAAEPRSAPVSS

SEQ ID NO: 862 - protein, 59 aa, Zea mays subsp. mays
  peptide (1)..(59): Ceres Seq. ID no. 12469331
MNLRWANAGTPACCSGGFPVPRVEKGVFMKPMQWSALWWLDSSPDLVSAAEPRSAPVSS

SEQ ID NO: 863 - DNA, 338 bp, Zea mays subsp. mays
  misc_feature (1)..(338): Ceres Seq. ID no. 11028919
  misc_feature: MA Experiment ID: 108527 Result: Up-regulated in Transcription
  misc_feature: MA Experiment 108527 PARAMETER Experiment Name: Zm_5mM_NO_P Parameter: Age (day) Value: 8
  misc_feature: MA Experiment 108527 PARAMETER Experiment Name: Zm_5mM_NO_P Parameter: Organism Value: Zea mays
  misc_feature: MA Experiment 108527 PARAMETER Experiment Name: Zm_5mM_NO_P Parameter: Plant Line Value: 35A19
  misc_feature: MA Experiment 108527 PARAMETER Experiment Name: Zm_5mM_NO_P Parameter: Timepoint (hr) Value: 6
  misc_feature: MA Experiment 108527 PARAMETER Experiment Name: Zm_5mM_NO_P Parameter: Tissue Value: Aerial
  misc_feature: MA Experiment 108527 PARAMETER Experiment Name: Zm_5mM_NO_P Parameter: Treatment Value: 5mM NO vs. No Treatment
ttcgaccgacagtgttggaggtgtgattgtctcgccagttggtgagggcaatcgcaggctgagcagtatggtcaacttggttgccgtgctcaacacagagttggaccatgcccttgacaagttgggcaaggttcgggcgaagattgctgaattgtgtgctgaatgcgcggcacaccactatcttgatggnggttctcccgcccctgtcgggattcagcacccttaccgttcaccgccccatggtcgcttcgattatggtaccccagactgcaggacccgcatagatttaggtccatagatcgatgtantcggagtctgtaataatgcttaatttagtg

SEQ ID NO: 864 - protein, 98 aa, Zea mays subsp. mays
  peptide (1)..(98): Ceres Seq. ID no. 11028920
  misc_feature (63)..(63): Xaa is any aa, unknown or other
STDSVGGVIVSPVGEGNRRLSSMVNLVAVLNTELDHALDKLGKVRAKIAELCAECAAHHYLDXGSPAPVGIQHPYRSPPHGRFDYGTPDCRTRIDLGP

SEQ ID NO: 865 - protein, 76 aa, Zea mays subsp. mays
  peptide (1)..(76): Ceres Seq. ID no. 11028921
  misc_feature (41)..(41): Xaa is any aa, unknown or other
MVNLVAVLNTELDHALDKLGKVRAKIAELCAECAAHHYLDXGSPAPVGIQHPYRSPPHGRFDYGTPDCRTRIDLGP

SEQ ID NO: 866 - protein, 58 aa, Zea mays subsp. mays
  peptide (1)..(58): Ceres Seq. ID no. 11028922
  misc_feature (28)..(28): Xaa is any aa, unknown or other
MPLTSWARFGRRLLNCVLNARHTTILMXVLPPLSGFSTLTVHRPMVASIMVPQTAGPA

SEQ ID NO: 867 - DNA, 471 bp, Zea mays subsp. mays
  misc_feature (1)..(471): Ceres Seq. ID no. 13589174
  misc_feature: MA Experiment ID: 108543 Result: Down-regulated in Transcription
  misc_feature: MA Experiment ID: 20000492 Result: Up-regulated in Transcription
  misc_feature: MA Experiment 20000492 PARAMETER Experiment Name: Zm_Hybrid_Seed_Dev_P Parameter: DAP Value: 12
  misc_feature: MA Experiment 20000492 PARAMETER Experiment Name: Zm_Hybrid_Seed_Dev_P Parameter: Organism Value: Zea mays
  misc_feature: MA Experiment 20000492 PARAMETER Experiment Name: Zm_Hybrid_Seed_Dev_P Parameter: Plant Line Value: 35A19
  misc_feature: MA Experiment 20000492 PARAMETER Experiment Name: Zm_Hybrid_Seed_Dev_P Parameter: Tissue Value: Fert Kernel vs. Unfert Floret
ggccaccgtcaccgccgtcgtcccgtccacggccgagcccgtggatccgtccaccgggttcgagatcaagttcaccgtctgatccccccgtcccgcgacaggttcgcgtctcgccgcgcgttcttggacggtctattcgtgcactactactgcgaatctgcgattaaagatcagaggcgacatctaatgtaccgtagtctgtttacctgaaaagctccgctatctgcttgggttggaattcatgccagattgtgggtgcaaacctgtttccttactacctagtgtccaagtcggaatattaataagctatgccaggattcagatcgaaatatttctgtctctgagagatgtgttgcgtgacaacttttcgaagactgttgcctgaacaatatctgtgtgtttatccctagactctaatgtacaaacagagtcttatacagtactatgcattaacgtcaagtttcagagttc

SEQ ID NO: 868 - protein, 69 aa, Zea mays subsp. mays
  peptide (1)..(69): Ceres Seq. ID no. 13589175
GHRHRRRPVHGRARGSVHRVRDQVHRLIPPSRDRFASRRAFLDGLFVHYYCESAIKDQRRHLMYRSLFT

SEQ ID NO: 869 - protein, 54 aa, Zea mays subsp. mays
  peptide (1)..(54): Ceres Seq. ID no. 13589176
PPSPPSSRPRPSPWIRPPGSRSSSPSDPPVPRQVRVSPRVLGRSIRALLLRICD

SEQ ID NO: 870 - protein, 47 aa, Zea mays subsp. mays
  peptide (1)..(47): Ceres Seq. ID no. 13589177
MPDCGCKPVSLLPSVQVGILISYARIQIEIFLSLRDVLRDNFSKTVA

SEQ ID NO: 871 - DNA, 496 bp, Zea mays subsp. mays
  misc_feature (1)..(496): Ceres Seq. ID no. 7113972
  misc_feature: MA Experiment ID: 108522 Result: Up-regulated in Transcription
  misc_feature: MA Experiment 108522 PARAMETER Experiment Name: Zm_42deg_Heat_P Parameter: Age (day) Value: 8
  misc_feature: MA Experiment 108522 PARAMETER Experiment Name: Zm_42deg_Heat_P Parameter: Organism Value: Zea mays
  misc_feature: MA Experiment 108522 PARAMETER Experiment Name: Zm_42deg_Heat_P Parameter: Plant Line Value: 35A19
  misc_feature: MA Experiment 108522 PARAMETER Experiment Name: Zm_42deg_Heat_P Parameter: Temperature (deg C) Value: 42 vs. 22
  misc_feature: MA Experiment 108522 PARAMETER Experiment Name: Zm_42deg_Heat_P Parameter: Timepoint (hr) Value: 1
  misc_feature: MA Experiment 108522 PARAMETER Experiment Name: Zm_42deg_Heat_P Parameter: Tissue Value: Aerial
  misc_feature: MA Experiment ID: 108523 Result: Up-regulated in Transcription
  misc_feature: MA Experiment 108523 PARAMETER Experiment Name: Zm_42deg_Heat_P Parameter: Age (day) Value: 8
  misc_feature: MA Experiment 108523 PARAMETER Experiment Name: Zm_42deg_Heat_P Parameter: Organism Value: Zea mays
  misc_feature: MA Experiment 108523 PARAMETER Experiment Name: Zm_42deg_Heat_P Parameter: Plant Line Value: 35A19
  misc_feature: MA Experiment 108523 PARAMETER Experiment Name: Zm_42deg_Heat_P Parameter: Temperature (deg C) Value: 42 vs. 22
  misc_feature: MA Experiment 108523 PARAMETER Experiment Name: Zm_42deg_Heat_P Parameter: Timepoint (hr) Value: 6
  misc_feature: MA Experiment 108523 PARAMETER Experiment Name: Zm_42deg_Heat_P Parameter: Tissue Value: Aerial
  misc_feature: MA Experiment ID: 108547 Result: Up-regulated in Transcription
  misc_feature: MA Experiment 108547 PARAMETER Experiment Name: Zm_Imbibed_Seeds_P Parameter: Age (day) Value: 4 vs. 2
  misc_feature: MA Experiment 108547 PARAMETER Experiment Name: Zm_Imbibed_Seeds_P Parameter: Organism Value: Zea mays
  misc_feature: MA Experiment 108547 PARAMETER Experiment Name: Zm_Imbibed_Seeds_P Parameter: Plant Line Value: 35A19
  misc_feature: MA Experiment 108547 PARAMETER Experiment Name: Zm_Imbibed_Seeds_P Parameter: Tissue Value: Aerial vs. Embryo
  misc_feature: MA Experiment ID: 108597 Result: Up-regulated in Transcription
  misc_feature: MA Experiment 108597 PARAMETER Experiment Name: Zm_100uM_ABA_P Parameter: Age (day) Value: 9
  misc_feature: MA Experiment 108597 PARAMETER Experiment Name: Zm_100uM_ABA_P Parameter: Organism Value: Zea mays
  misc_feature: MA Experiment 108597 PARAMETER Experiment Name: Zm_100uM_ABA_P Parameter: Plant Line Value: 35A19
  misc_feature: MA Experiment 108597 PARAMETER Experiment Name: Zm_100uM_ABA_P Parameter: Timepoint (hr) Value: 24
  misc_feature: MA Experiment 108597 PARAMETER Experiment Name: Zm_100uM_ABA_P Parameter: Tissue Value: Aerial
  misc_feature: MA Experiment 108597 PARAMETER Experiment Name: Zm_100uM_ABA_P Parameter: Treatment Value: 100uM ABA vs. No Treatment
  misc_feature: MA Experiment ID: 20000487 Result: Up-regulated in Transcription
  misc_feature: MA Experiment 20000487 PARAMETER Experiment Name: Zm_50mM_NH4NO3_L_to_H_P Parameter: Organism Value: Zea mays
  misc_feature: MA Experiment 20000487 PARAMETER Experiment Name: Zm_50mM_NH4NO3_L_to_H_P Parameter: Timepoint (hr) Value: 4
  misc_feature: MA Experiment 20000487 PARAMETER Experiment Name: Zm_50mM_NH4NO3_L_to_H_P Parameter: Tissue Value: Leaves
  misc_feature: MA Experiment 20000487 PARAMETER Experiment Name: Zm_50mM_NH4NO3_L_to_H_P Parameter: Treatment Value: 50mM NH4NO3 vs. 100mM Mannitol
atcctcgcatcgtccgcaccttatcctctcgactttacagtacctgctctcagctcctccctatctcaatggcatccgcgaatgccatctccaccgcctcccccttccggcccctctctcagggcagggcgacgaggtcacagcggttcgtggtgcgtgcgaacgccaaagacattgcctttgacagaaatccagggcagcgctgcaggccggcgtcgagaagctcgcaaacgccgncggtgtcaccctcgggccacgagggaggaatgtggcgctcgatgagtacggnaaccccaaagttgcgaatgatggagtcactattgcccgcgctattgagctgcatganccaatggaaaatgctggtgcantattgattcgngaggttgctagtaagaccaangattcagctggtgatgggactacaactgcatgcgtccttgctcgtgaaaataancaagtctaggcccttctgaggcgcaacatcctggcggcaaac

SEQ ID NO: 872 - protein, 123 aa, Zea mays subsp. mays
  peptide (1)..(123): Ceres Seq. ID no. 7113973
  misc_feature (79)..(79): Xaa is any aa, unknown or other
  misc_feature (96)..(96): Xaa is any aa, unknown or other
  misc_feature (115)..(115): Xaa is any aa, unknown or other
  misc_feature (122)..(122): Xaa is any aa, unknown or other
PRIVRTLSSRLYSTCSQLLPISMASANAISTASPFRPLSQGRATRSQRFVVRANAKDIAFDRNPGQRCRPASRSSQTPXVSPSGHEGGMWRSMSTXTPKLRMMESLLPALLSCMXQWKMLVXY

SEQ ID NO: 873 - protein, 101 aa, Zea mays subsp. mays
  peptide (1)..(101): Ceres Seq. ID no. 7113974
  misc_feature (57)..(57): Xaa is any aa, unknown or other
  misc_feature (74)..(74): Xaa is any aa, unknown or other
  misc_feature (93)..(93): Xaa is any aa, unknown or other
  misc_feature (100)..(100): Xaa is any aa, unknown or other
MASANAISTASPFRPLSQGRATRSQRFVVRANAKDIAFDRNPGQRCRPASRSSQTPXVSPSGHEGGMWRSMSTXTPKLRMMESLLPALLSCMXQWKMLVXY

SEQ ID NO: 874 - protein, 93 aa, Zea mays subsp. mays
  peptide (1)..(93): Ceres Seq. ID no. 7113975
  misc_feature (79)..(79): Xaa is any aa, unknown or other
ILASSAPYPLDFTVPALSSSLSQWHPRMPSPPPPPSGPSLRAGRRGHSGSWCVRTPKTLPLTEIQGSAAGRRREARKRXRCHPRATREECGAR

SEQ ID NO: 875 - DNA, 850 bp, Zea mays subsp. mays
  misc_feature (1)..(850): Ceres Seq. ID no. 12423719
  misc_feature: MA Experiment ID: 108504 Result: Up-regulated in Transcription
  misc_feature: MA Experiment 108504 PARAMETER Experiment Name: Zm_Drought_P Parameter: Age (day) Value: 8
  misc_feature: MA Experiment 108504 PARAMETER Experiment Name: Zm_Drought_P Parameter: Organism Value: Zea mays
  misc_feature: MA Experiment 108504 PARAMETER Experiment Name: Zm_Drought_P Parameter: Plant Line Value: 35A19
  misc_feature: MA Experiment 108504 PARAMETER Experiment Name: Zm_Drought_P Parameter: Timepoint (hr) Value: 12
  misc_feature: MA Experiment 108504 PARAMETER Experiment Name: Zm_Drought_P Parameter: Tissue Value: Aerial
  misc_feature: MA Experiment 108504 PARAMETER Experiment Name: Zm_Drought_P Parameter: Treatment Value: Drought vs. No Drought
  misc_feature: MA Experiment ID: 108513 Result: Up-regulated in Transcription
  misc_feature: MA Experiment 108513 PARAMETER Experiment Name: Zm_100uM_ABA_P Parameter: Age (day) Value: 8
  misc_feature: MA Experiment 108513 PARAMETER Experiment Name: Zm_100uM_ABA_P Parameter: Organism Value: Zea mays
  misc_feature: MA Experiment 108513 PARAMETER Experiment Name: Zm_100uM_ABA_P Parameter: Plant Line Value: 35A19
  misc_feature: MA Experiment 108513 PARAMETER Experiment Name: Zm_100uM_ABA_P Parameter: Timepoint (hr) Value: 6
  misc_feature: MA Experiment 108513 PARAMETER Experiment Name: Zm_100uM_ABA_P Parameter: Tissue Value: Aerial
  misc_feature: MA Experiment 108513 PARAMETER Experiment Name: Zm_100uM_ABA_P Parameter: Treatment Value: 100uM ABA vs. No Treatment
  misc_feature: MA Experiment ID: 108527 Result: Up-regulated in Transcription
  misc_feature: MA Experiment 108527 PARAMETER Experiment Name: Zm_5mM_NO_P Parameter: Age (day) Value: 8
  misc_feature: MA Experiment 108527 PARAMETER Experiment Name: Zm_5mM_NO_P Parameter: Organism Value: Zea mays
  misc_feature: MA Experiment 108527 PARAMETER Experiment Name: Zm_5mM_NO_P Parameter: Plant Line Value: 35A19
  misc_feature: MA Experiment 108527 PARAMETER Experiment Name: Zm_5mM_NO_P Parameter: Timepoint (hr) Value: 6
  misc_feature: MA Experiment 108527 PARAMETER Experiment Name: Zm_5mM_NO_P Parameter: Tissue Value: Aerial
  misc_feature: MA Experiment 108527 PARAMETER Experiment Name: Zm_5mM_NO_P Parameter: Treatment Value: 5mM NO vs. No Treatment
  misc_feature: MA Experiment ID: 108528 Result: Up-regulated in Transcription
  misc_feature: MA Experiment 108528 PARAMETER Experiment Name: Zm_Imbibed_Seeds_P Parameter: Age (day) Value: 5 vs. 2
  misc_feature: MA Experiment 108528 PARAMETER Experiment Name: Zm_Imbibed_Seeds_P Parameter: Organism Value: Zea mays
  misc_feature: MA Experiment 108528 PARAMETER Experiment Name: Zm_Imbibed_Seeds_P Parameter: Plant Line Value: 35A19
  misc_feature: MA Experiment 108528 PARAMETER Experiment Name: Zm_Imbibed_Seeds_P Parameter: Tissue Value: Aerial vs. Embryo
  misc_feature: MA Experiment ID: 108530 Result: Up-regulated in Transcription
  misc_feature: MA Experiment 108530 PARAMETER Experiment Name: Zm_Imbibed_Seeds_P Parameter: Age (day) Value: 6 vs. 2
  misc_feature: MA Experiment 108530 PARAMETER Experiment Name: Zm_Imbibed_Seeds_P Parameter: Organism Value: Zea mays
  misc_feature: MA Experiment 108530 PARAMETER Experiment Name: Zm_Imbibed_Seeds_P Parameter: Plant Line Value: 35A19
  misc_feature: MA Experiment 108530 PARAMETER Experiment Name: Zm_Imbibed_Seeds_P Parameter: Tissue Value: Aerial vs. Embryo
  misc_feature: MA Experiment ID: 108535 Result: Down-regulated in Transcription
  misc_feature: MA Experiment 108535 PARAMETER Experiment Name: Zm_Meristem_P Parameter: Age (day) Value: 8
  misc_feature: MA Experiment 108535 PARAMETER Experiment Name: Zm_Meristem_P Parameter: Organism Value: Zea mays
  misc_feature: MA Experiment 108535 PARAMETER Experiment Name: Zm_Meristem_P Parameter: Plant Line Value: 35A19
  misc_feature: MA Experiment 108535 PARAMETER Experiment Name: Zm_Meristem_P Parameter: Tissue Value: Root Meristem vs. Above Root Meristem
  misc_feature: MA Experiment ID: 108536 Result: Up-regulated in Transcription
  misc_feature: MA Experiment 108536 PARAMETER Experiment Name: Zm_Meristem_P Parameter: Age (day) Value: 8
  misc_feature: MA Experiment 108536 PARAMETER Experiment Name: Zm_Meristem_P Parameter: Organism Value: Zea mays
  misc_feature: MA Experiment 108536 PARAMETER Experiment Name: Zm_Meristem_P Parameter: Plant Line Value: 35A19
  misc_feature: MA Experiment 108536 PARAMETER Experiment Name: Zm_Meristem_P Parameter: Tissue Value: Shoot Meristem vs. Above Shoot Meristem
  misc_feature: MA Experiment ID: 108540 Result: Up-regulated in Transcription
  misc_feature: MA Experiment 108540 PARAMETER Experiment Name: Zm_20percent_PEG_P Parameter: Age (day) Value: 8
  misc_feature: MA Experiment 108540 PARAMETER Experiment Name: Zm_20percent_PEG_P Parameter: Organism Value: Zea mays
  misc_feature: MA Experiment 108540 PARAMETER Experiment Name: Zm_20percent_PEG_P Parameter: Plant Line Value: 35A19
  misc_feature: MA Experiment 108540 PARAMETER Experiment Name: Zm_20percent_PEG_P Parameter: Timepoint (hr) Value: 6
  misc_feature: MA Experiment 108540 PARAMETER Experiment Name: Zm_20percent_PEG_P Parameter: Tissue Value: Aerial
  misc_feature: MA Experiment 108540 PARAMETER Experiment Name: Zm_20percent_PEG_P Parameter: Treatment Value: 20percent PEG vs. No Treatment
  misc_feature: MA Experiment ID: 108544 Result: Down-regulated in Transcription
  misc_feature: MA Experiment ID: 108545 Result: Up-regulated in Transcription
  misc_feature: MA Experiment 108545 PARAMETER Experiment Name: Zm_Imbibed_Seeds_P Parameter: Age (day) Value: 3 vs. 2
  misc_feature: MA Experiment 108545 PARAMETER Experiment Name: Zm_Imbibed_Seeds_P Parameter: Organism Value: Zea mays
  misc_feature: MA Experiment 108545 PARAMETER Experiment Name: Zm_Imbibed_Seeds_P Parameter: Plant Line Value: 35A19
  misc_feature: MA Experiment 108545 PARAMETER Experiment Name: Zm_Imbibed_Seeds_P Parameter: Tissue Value: Aerial vs. Embryo
  misc_feature: MA Experiment ID: 108559 Result: Up-regulated in Transcription
  misc_feature: MA Experiment 108559 PARAMETER Experiment Name: Zm_5mM_NO_P Parameter: Age (day) Value: 8
  misc_feature: MA Experiment 108559 PARAMETER Experiment Name: Zm_5mM_NO_P Parameter: Organism Value: Zea mays
  misc_feature: MA Experiment 108559 PARAMETER Experiment Name: Zm_5mM_NO_P Parameter: Plant Line Value: 35A19
  misc_feature: MA Experiment 108559 PARAMETER Experiment Name: Zm_5mM_NO_P Parameter: Timepoint (hr) Value: 12
  misc_feature: MA Experiment 108559 PARAMETER Experiment Name: Zm_5mM_NO_P Parameter: Tissue Value: Aerial
  misc_feature: MA Experiment 108559 PARAMETER Experiment Name: Zm_5mM_NO_P Parameter: Treatment Value: 5mM NO vs. No Treatment
  misc_feature: MA Experiment ID: 20000480 Result: Up-regulated in Transcription
  misc_feature: MA Experiment 20000480 PARAMETER Experiment Name: Zm_Drought_P Parameter: Age (day) Value: 11
  misc_feature: MA Experiment 20000480 PARAMETER Experiment Name: Zm_Drought_P Parameter: Organism Value: Zea mays
  misc_feature: MA Experiment 20000480 PARAMETER Experiment Name: Zm_Drought_P Parameter: Plant Line Value: 35A19
  misc_feature: MA Experiment 20000480 PARAMETER Experiment Name: Zm_Drought_P Parameter: Timepoint (hr) Value: 72
  misc_feature: MA Experiment 20000480 PARAMETER Experiment Name: Zm_Drought_P Parameter: Tissue Value: Aerial
  misc_feature: MA Experiment 20000480 PARAMETER Experiment Name: Zm_Drought_P Parameter: Treatment Value: Drought vs. No Drought
  misc_feature: MA Experiment ID: 20000487 Result: Down-regulated in Transcription
  misc_feature: MA Experiment 20000487 PARAMETER Experiment Name: Zm_50mM_NH4NO3_L_to_H_P Parameter: Organism Value: Zea mays
  misc_feature: MA Experiment 20000487 PARAMETER Experiment Name: Zm_50mM_NH4NO3_L_to_H_P Parameter: Timepoint (hr) Value: 4
  misc_feature: MA Experiment 20000487 PARAMETER Experiment Name: Zm_50mM_NH4NO3_L_to_H_P Parameter: Tissue Value: Leaves
  misc_feature: MA Experiment 20000487 PARAMETER Experiment Name: Zm_50mM_NH4NO3_L_to_H_P Parameter: Treatment Value: 50mM NH4NO3 vs. 100mM Mannitol
  misc_feature: MA Experiment ID: 20000492 Result: Down-regulated in Transcription
  misc_feature: MA Experiment 20000492 PARAMETER Experiment Name: Zm_Hybrid_Seed_Dev_P Parameter: DAP Value: 12
  misc_feature: MA Experiment 20000492 PARAMETER Experiment Name: Zm_Hybrid_Seed_Dev_P Parameter: Organism Value: Zea mays
  misc_feature: MA Experiment 20000492 PARAMETER Experiment Name: Zm_Hybrid_Seed_Dev_P Parameter: Plant Line Value: 35A19
  misc_feature: MA Experiment 20000492 PARAMETER Experiment Name: Zm_Hybrid_Seed_Dev_P Parameter: Tissue Value: Fert Kernel vs. Unfert Floret
  misc_feature: MA Experiment ID: 20000535 Result: Up-regulated in Transcription
  misc_feature: MA Experiment 20000535 PARAMETER Experiment Name: Zm_Hybrid_Seed_Dev_P Parameter: DAP Value: 30 vs. 12
  misc_feature: MA Experiment 20000535 PARAMETER Experiment Name: Zm_Hybrid_Seed_Dev_P Parameter: Organism Value: Zea mays
  misc_feature: MA Experiment 20000535 PARAMETER Experiment Name: Zm_Hybrid_Seed_Dev_P Parameter: Plant Line Value: 35A19
  misc_feature: MA Experiment 20000535 PARAMETER Experiment Name: Zm_Hybrid_Seed_Dev_P Parameter: Tissue Value: Embryo vs. Unfert Floret
aaaaaaatctatgtactgaagacctggcgtcgacggcggcctcctcggcggcgggcgcgggctggtctccttccgcttcccggacagcttctgggcgggccgcgtggtggcgcgcacgggatgcagctccgggcattcccggtgcgagacgggaagcgttgcgccggcgacggtggtgcagctggtggtgcacgcggaggggcaagacctggcgtcgtacagcgtgagcctggtggacgggttcaacgtgcccgctgtggtgagcccgcaggcggtgggcggcgggcagtgcccggccctggggtgcgcggcggacctcaacgccgggtgcccgccctcgcagcgcgtgctgggggccgggggcggcgtggtggcgtgcaagggccccgcgggctacttcaaggagcggtgcccgctgacgcgcaccacgcccaccgacgtggagcccgtgccgcagcggtgcttggcgcccggcgagctcaaggtcgtcttctgccagtccgccatggtgaacgccgccgccgccgccgagaccgagcgcatccgcaccgtcgtcgcggacaactagagctactagctgtctagctgcctgtggtaacgccggccggtggtcactggtcagttgaacggaggagatgccggctctctgattagtgcgtaataaaggtacgtacgttaactaggcaattaagcgcgtgtgttactgttgaacttgaacggggccgctattaaagctgtgtgtgtgtgtgtggtactagtagttgtcattggcttcgttgccatgtgttcggccggcagtgccaagtgaatagttgcgtccatccaggagaatgtatgtttttgagttgcg

SEQ ID NO: 876 - protein, 194 aa, Zea mays subsp. mays
  peptide (1)..(194): Ceres Seq. ID no. 12423720
KKIYVLKTWRRRRPPRRRARAGLLPLPGQLLGGPRGGAHGMQLRAFPVRDGKRCAGDGGAAGGARGGARPGVVQREPGGRVQRARCGEPAGGGRRAVPGPGVRGGPQRRVPALAARAGGRGRRGGVQGPRGLLQGAVPADAHHAHRRGARAAAVLGARRAQGRLLPVRHGERRRRRRDRAHPHRRRGQLELLAV

SEQ ID NO: 877 - protein, 154 aa, Zea mays subsp. mays
  peptide (1)..(154): Ceres Seq. ID no. 12423721
MQLRAFPVRDGKRCAGDGGAAGGARGGARPGVVQREPGGRVQRARCGEPAGGGRRAVPGPGVRGGPQRRVPALAARAGGRGRRGGVQGPRGLLQGAVPADAHHAHRRGARAAAVLGARRAQGRLLPVRHGERRRRRRDRAHPHRRRGQLELLAV

SEQ ID NO: 878 - DNA, 790 bp, Zea mays subsp. mays
  misc_feature (1)..(790): Ceres Seq. ID no. 12408009
  misc_feature: MA Experiment ID: 108529 Result: Down-regulated in Transcription
  misc_feature: MA Experiment 108529 PARAMETER Experiment Name: Zm_Imbibed_Seeds_P Parameter: Age (day) Value: 5 vs. 2
  misc_feature: MA Experiment 108529 PARAMETER Experiment Name: Zm_Imbibed_Seeds_P Parameter: Organism Value: Zea mays
  misc_feature: MA Experiment 108529 PARAMETER Experiment Name: Zm_Imbibed_Seeds_P Parameter: Plant Line Value: 35A19
  misc_feature: MA Experiment 108529 PARAMETER Experiment Name: Zm_Imbibed_Seeds_P Parameter: Tissue Value: Roots vs. Embryo
  misc_feature: MA Experiment ID: 108543 Result: Up-regulated in Transcription
aaaacacactctagtctctagctgctgctctctcccactgtctcgccgtcttgctcacacgcagtgcccggtggtctggtcggtcgctcggtcgacgtggccgtgggcgttggcaggggttcctgctccagccactgaagacgcagcggcggcggcggctcctgctcatggcaggagctcaatgcgccacaggaccgcgcgccgggccgctcctcctcgtcctcgtcctcgtcctgtgcggcttccttgtgctgctcgtgcctgcggctcggcgcggggacgacgacgagacggaggagttccccgtcgcgtcttccgcttcttcgtcgtggtggcactggcacgccgctgatgggcgccgccgtgccctcccgcggccggccgccgcgacgtggccgtggcgccccgcccagccccgggcgcgcgggaggtggaactccgcggggcaggacagcaagcacgaggtccccagtggccccaacccggactccaatcggtagccgtagccagagaggtgggtggtcgtgaactccgatccgccgtctgtgtttgtttcggcgaacggcgaccaagctccctccctgtcccctgctcctgctcctggaggccggtcgtctagctaggcctggccgtcgtatcgctcctccatgcttcttgctgctccgtgctggagccagtacgtgcgtcgtttgcttgctgtgttgtatcttcttcttcgccgttctcttcgttagagaatgaacatgaccatcatctgacgcatgcattgctcaattctcgtccaaccgac

SEQ ID NO: 879 - protein, 116 aa, Zea mays subsp. mays
  peptide (1)..(116): Ceres Seq. ID no. 12408010
KHTLVSSCCSLPLSRRLAHTQCPVVWSVARSTWPWALAGVPAPATEDAAAAAAPAHGRSSMRHRTARRAAPPRPRPRPVRLPCAARACGSARGRRRDGGVPRRVFRFFVVVALARR

SEQ ID NO: 880 - protein, 110 aa, Zea mays subsp. mays
  peptide (1)..(110): Ceres Seq. ID no. 12408011
MAGAQCATGPRAGPLLLVLVLVLCGFLVLLVPAARRGDDDETEEFPVASSASSSWWHWHAADGRRRALPRPAAATWPWRPAQPRARGRWNSAGQDSKHEVPSGPNPDSNR

SEQ ID NO: 881 - protein, 58 aa, Zea mays subsp. mays
  peptide (1)..(58): Ceres Seq. ID no. 12408012
MGAAVPSRGRPPRRGRGAPPSPGRAGGGTPRGRTASTRSPVAPTRTPIGSRSQRGGWS

SEQ ID NO: 882 - DNA, 1259 bp, Zea mays subsp. mays
  misc_feature (1)..(1259): Ceres Seq. ID no. 12354552
  misc_feature: MA Experiment ID: 108536 Result: Up-regulated in Transcription
  misc_feature: MA Experiment 108536 PARAMETER Experiment Name: Zm_Meristem_P Parameter: Age (day) Value: 8
  misc_feature: MA Experiment 108536 PARAMETER Experiment Name: Zm_Meristem_P Parameter: Organism Value: Zea mays
  misc_feature: MA Experiment 108536 PARAMETER Experiment Name: Zm_Meristem_P Parameter: Plant Line Value: 35A19
  misc_feature: MA Experiment 108536 PARAMETER Experiment Name: Zm_Meristem_P Parameter: Tissue Value: Shoot Meristem vs. Above Shoot Meristem
  misc_feature: MA Experiment ID: 20001613 Result: Down-regulated in Transcription
  misc_feature: MA Experiment 20001613 PARAMETER Experiment Name: Zm_50ppm_KNO3_L-to-H_P Parameter: Age (day) Value: 20
  misc_feature: MA Experiment 20001613 PARAMETER Experiment Name: Zm_50ppm_KNO3_L-to-H_P Parameter: Organism Value: Zea mays
  misc_feature: MA Experiment 20001613 PARAMETER Experiment Name: Zm_50ppm_KNO3_L-to-H_P Parameter: Plant Line Value: 35A19
  misc_feature: MA Experiment 20001613 PARAMETER Experiment Name: Zm_50ppm_KNO3_L-to-H_P Parameter: Timepoint (hr) Value: 24
  misc_feature: MA Experiment 20001613 PARAMETER Experiment Name: Zm_50ppm_KNO3_L-to-H_P Parameter: Tissue Value: Roots
  misc_feature: MA Experiment 20001613 PARAMETER Experiment Name: Zm_50ppm_KNO3_L-to-H_P Parameter: Treatment Value: 50ppm KNO3 vs. 50ppm KCl
  misc_feature: MA Experiment ID: 20001614 Result: Down-regulated in Transcription
  misc_feature: MA Experiment 20001614 PARAMETER Experiment Name: Zm_50ppm_KNO3_L-to-H_P Parameter: Age (day) Value: 21
  misc_feature: MA Experiment 20001614 PARAMETER Experiment Name: Zm_50ppm_KNO3_L-to-H_P Parameter: Organism Value: Zea mays
  misc_feature: MA Experiment 20001614 PARAMETER Experiment Name: Zm_50ppm_KNO3_L-to-H_P Parameter: Plant Line Value: 35A19
  misc_feature: MA Experiment 20001614 PARAMETER Experiment Name: Zm_50ppm_KNO3_L-to-H_P Parameter: Timepoint (hr) Value: 48
  misc_feature: MA Experiment 20001614 PARAMETER Experiment Name: Zm_50ppm_KNO3_L-to-H_P Parameter: Tissue Value: Roots
  misc_feature: MA Experiment 20001614 PARAMETER Experiment Name: Zm_50ppm_KNO3_L-to-H_P Parameter: Treatment Value: 50ppm KNO3 vs. 50ppm KCl
aaagggcaaaggcccaaacccagccggccagtcccccaccccccagcagccatggagttcggcttccgcgcaggaaaccgcacgcagcgccgcccttcccccgatcgacgcttcacagcacagcaagccggacccttccacggcgaccacccgcagccctcgccgttgcagtgggaggatgcggcccggcgcgagcggatcaaacgcgaggtggagcgccggctcatcgaggaggaggtccgcctggagctcgcccttgagcgcgcccgcctccacggtggttttggccccgccccgttcctcgggaccgacggctccgtcgtgccggtgcagccaccacctccacctccaggccggttctccagggccgacggcccatcgatgacgccggcaatgtcgtgggacgacagccctcggcggctcgcgagatttgagcaaccgatgctcctcagcgagacgggaacgtggtccctgctgccgaagccgaggcatacgctcctgctgcgcgagatcgcgcccagcgagagctccgaggttctttcatcagcaacaaaggcttctggcgtgaagaggaaagcagcagctgcgatttccgcaacaacgactgaacaacaaccaacgggagtacaagacccgagttccgggcaatggagctgcgcaatctgccaggtgagcgcgaccagcgaggccaacctgaacgagcacctccaagggaaaaagcacagggcaaagctggcccgatgcggagcgacgaccaaggcgacgacggatcctcctcctaacagaagcggcgatggcgcagtagcactagcagcaggcccgagcgacgcgccgaagaggatccagatcctggtcgacggggaggcgcaccaggtcgtccagaggagcagctgcgtgtggtgcgagcgctgcagggtcggctgcaccaacgccgccgccatggtcgaccatctgcggggcaagaggcacagcctgtcgaacaaggtctggacggcgataaaggccgtgaggaggagcagctaatacggcgataaaggccgtgaccgtgaggaggaggccgtggtgaggtgaggaggcacaatcttgtcgaatacggttgagcagggcctgtgttgagctttggaaagaaagggcacagatactagttgtttgacaactaatgaagtgtgggttttcatagatcctcttaatttagcagcggaaagaaagacggtatattccttgcttgttatcacttatcagacaatcacttattcccc

SEQ ID NO: 883 - protein, 340 aa, Zea mays subsp. mays
  peptide (1)..(340): Ceres Seq. ID no. 12354553
KGQRPKPSRPVPHPPAAMEFGFRAGNRTQRRPSPDRRFTAQQAGPFHGDHPQPSPLQWEDAARRERIKREVERRLIEEEVRLELALERARLHGGFGPAPFLGTDGSVVPVQPPPPPPGRFSRADGPSMTPAMSWDDSPRRLARFEQPMLLSETGTWSLLPKPRHTLLLREIAPSESSEVLSSATKASGVKRKAAAAISATTTEQQPTGVQDPSSGQWSCAICQVSATSEANLNEHLQGKKHRAKLARCGATTKATTDPPPNRSGDGAVALAAGPSDAPKRIQILVDGEAHQVVQRSSCVWCERCRVGCTNAAAMVDHLRGKRHSLSNKVWTAIKAVRRSS

SEQ ID NO: 884 - protein, 323 aa, Zea mays subsp. mays
  peptide (1)..(323): Ceres Seq. ID no. 12354554
MEFGFRAGNRTQRRPSPDRRFTAQQAGPFHGDHPQPSPLQWEDAARRERIKREVERRLIEEEVRLELALERARLHGGFGPAPFLGTDGSVVPVQPPPPPPGRFSRADGPSMTPAMSWDDSPRRLARFEQPMLLSETGTWSLLPKPRHTLLLREIAPSESSEVLSSATKASGVKRKAAAAISATTTEQQPTGVQDPSSGQWSCAICQVSATSEANLNEHLQGKKHRAKLARCGATTKATTDPPPNRSGDGAVALAAGPSDAPKRIQILVDGEAHQVVQRSSCVWCERCRVGCTNAAAMVDHLRGKRHSLSNKVWTAIKAVRRSS

SEQ ID NO: 885 - protein, 213 aa, Zea mays subsp. mays
  peptide (1)..(213): Ceres Seq. ID no. 12354555
MTPAMSWDDSPRRLARFEQPMLLSETGTWSLLPKPRHTLLLREIAPSESSEVLSSATKASGVKRKAAAAISATTTEQQPTGVQDPSSGQWSCAICQVSATSEANLNEHLQGKKHRAKLARCGATTKATTDPPPNRSGDGAVALAAGPSDAPKRIQILVDGEAHQVVQRSSCVWCERCRVGCTNAAAMVDHLRGKRHSLSNKVWTAIKAVRRSS

SEQ ID NO: 886 - DNA, 670 bp, Zea mays subsp. mays; identical to SEQ ID NO: 724
  misc_feature (1)..(670): Ceres Seq. ID no. 13565500
  misc_feature: MA Experiment ID: 108528 Result: Up-regulated in Transcription
  misc_feature: MA Experiment 108528 PARAMETER Experiment Name: Zm_Imbibed_Seeds_P Parameter: Age (day) Value: 5 vs. 2
  misc_feature: MA Experiment 108528 PARAMETER Experiment Name: Zm_Imbibed_Seeds_P Parameter: Organism Value: Zea mays
  misc_feature: MA Experiment 108528 PARAMETER Experiment Name: Zm_Imbibed_Seeds_P Parameter: Plant Line Value: 35A19
  misc_feature: MA Experiment 108528 PARAMETER Experiment Name: Zm_Imbibed_Seeds_P Parameter: Tissue Value: Aerial vs. Embryo
  misc_feature: MA Experiment ID: 108536 Result: Down-regulated in Transcription
  misc_feature: MA Experiment 108536 PARAMETER Experiment Name: Zm_Meristem_P Parameter: Age (day) Value: 8
  misc_feature: MA Experiment 108536 PARAMETER Experiment Name: Zm_Meristem_P Parameter: Organism Value: Zea mays
  misc_feature: MA Experiment 108536 PARAMETER Experiment Name: Zm_Meristem_P Parameter: Plant Line Value: 35A19
  misc_feature: MA Experiment 108536 PARAMETER Experiment Name: Zm_Meristem_P Parameter: Tissue Value: Shoot Meristem vs. Above Shoot Meristem
  misc_feature: MA Experiment ID: 108545 Result: Up-regulated in Transcription
  misc_feature: MA Experiment 108545 PARAMETER Experiment Name: Zm_Imbibed_Seeds_P Parameter: Age (day) Value: 3 vs. 2
  misc_feature: MA Experiment 108545 PARAMETER Experiment Name: Zm_Imbibed_Seeds_P Parameter: Organism Value: Zea mays
  misc_feature: MA Experiment 108545 PARAMETER Experiment Name: Zm_Imbibed_Seeds_P Parameter: Plant Line Value: 35A19
  misc_feature: MA Experiment 108545 PARAMETER Experiment Name: Zm_Imbibed_Seeds_P Parameter: Tissue Value: Aerial vs. Embryo
  misc_feature: MA Experiment ID: 108547 Result: Up-regulated in Transcription
  misc_feature: MA Experiment 108547 PARAMETER Experiment Name: Zm_Imbibed_Seeds_P Parameter: Age (day) Value: 4 vs. 2
  misc_feature: MA Experiment 108547 PARAMETER Experiment Name: Zm_Imbibed_Seeds_P Parameter: Organism Value: Zea mays
  misc_feature: MA Experiment 108547 PARAMETER Experiment Name: Zm_Imbibed_Seeds_P Parameter: Plant Line Value: 35A19
  misc_feature: MA Experiment 108547 PARAMETER Experiment Name: Zm_Imbibed_Seeds_P Parameter: Tissue Value: Aerial vs. Embryo
  misc_feature: MA Experiment ID: 108556 Result: Down-regulated in Transcription
  misc_feature: MA Experiment 108556 PARAMETER Experiment Name: Zm_Drought_P Parameter: Age (day) Value: 9
  misc_feature: MA Experiment 108556 PARAMETER Experiment Name: Zm_Drought_P Parameter: Organism Value: Zea mays
  misc_feature: MA Experiment 108556 PARAMETER Experiment Name: Zm_Drought_P Parameter: Plant Line Value: 35A19
  misc_feature: MA Experiment 108556 PARAMETER Experiment Name: Zm_Drought_P Parameter: Timepoint (hr) Value: 24
  misc_feature: MA Experiment 108556 PARAMETER Experiment Name: Zm_Drought_P Parameter: Tissue Value: Aerial
  misc_feature: MA Experiment 108556 PARAMETER Experiment Name: Zm_Drought_P Parameter: Treatment Value: Drought vs. No Drought
  misc_feature: MA Experiment ID: 108597 Result: Down-regulated in Transcription
  misc_feature: MA Experiment 108597 PARAMETER Experiment Name: Zm_100uM_ABA_P Parameter: Age (day) Value: 9
  misc_feature: MA Experiment 108597 PARAMETER Experiment Name: Zm_100uM_ABA_P Parameter: Organism Value: Zea mays
  misc_feature: MA Experiment 108597 PARAMETER Experiment Name: Zm_100uM_ABA_P Parameter: Plant Line Value: 35A19
  misc_feature: MA Experiment 108597 PARAMETER Experiment Name: Zm_100uM_ABA_P Parameter: Timepoint (hr) Value: 24
  misc_feature: MA Experiment 108597 PARAMETER Experiment Name: Zm_100uM_ABA_P Parameter: Tissue Value: Aerial
  misc_feature: MA Experiment 108597 PARAMETER Experiment Name: Zm_100uM_ABA_P Parameter: Treatment Value: 100uM ABA vs. No Treatment
  misc_feature: MA Experiment ID: 20000477 Result: Down-regulated in Transcription
  misc_feature: MA Experiment 20000477 PARAMETER Experiment Name: Zm_5mM_SA_P Parameter: Age (day) Value: 10
  misc_feature: MA Experiment 20000477 PARAMETER Experiment Name: Zm_5mM_SA_P Parameter: Organism Value: Zea mays
  misc_feature: MA Experiment 20000477 PARAMETER Experiment Name: Zm_5mM_SA_P Parameter: Plant Line Value: 35A19
  misc_feature: MA Experiment 20000477 PARAMETER Experiment Name: Zm_5mM_SA_P Parameter: Timepoint (hr) Value: 48
  misc_feature: MA Experiment 20000477 PARAMETER Experiment Name: Zm_5mM_SA_P Parameter: Tissue Value: Aerial
  misc_feature: MA Experiment 20000477 PARAMETER Experiment Name: Zm_5mM_SA_P Parameter: Treatment Value: 5mM SA vs. No Treatment
  misc_feature: MA Experiment ID: 20000480 Result: Down-regulated in Transcription
  misc_feature: MA Experiment 20000480 PARAMETER Experiment Name: Zm_Drought_P Parameter: Age (day) Value: 11
  misc_feature: MA Experiment 20000480 PARAMETER Experiment Name: Zm_Drought_P Parameter: Organism Value: Zea mays
  misc_feature: MA Experiment 20000480 PARAMETER Experiment Name: Zm_Drought_P Parameter: Plant Line Value: 35A19
  misc_feature: MA Experiment 20000480 PARAMETER Experiment Name: Zm_Drought_P Parameter: Timepoint (hr) Value: 72
  misc_feature: MA Experiment 20000480 PARAMETER Experiment Name: Zm_Drought_P Parameter: Tissue Value: Aerial
  misc_feature: MA Experiment 20000480 PARAMETER Experiment Name: Zm_Drought_P Parameter: Treatment Value: Drought vs. No Drought
  misc_feature: MA Experiment ID: 20000534 Result: Up-regulated in Transcription
  misc_feature: MA Experiment 20000534 PARAMETER Experiment Name: Zm_Hybrid_Pollen_P Parameter: Age (day) Value: 8
  misc_feature: MA Experiment 20000534 PARAMETER Experiment Name: Zm_Hybrid_Pollen_P Parameter: Organism Value: Zea mays
  misc_feature: MA Experiment 20000534 PARAMETER Experiment Name: Zm_Hybrid_Pollen_P Parameter: Plant Line Value: 35A19
  misc_feature: MA Experiment 20000534 PARAMETER Experiment Name: Zm_Hybrid_Pollen_P Parameter: Tissue Value: Pollen vs. Aerial

SEQ ID NO: 887 - protein, 154 aa, Zea mays subsp. mays; identical to SEQ ID NO: 725
  peptide (1)..(154): Ceres Seq. ID no. 13565501

SEQ ID NO: 888 - protein, 119 aa, Zea mays subsp. mays; identical to SEQ ID NO: 726
  peptide (1)..(119): Ceres Seq. ID no. 13565502

SEQ ID NO: 889 - protein, 113 aa, Zea mays subsp. mays; identical to SEQ ID NO: 727
  peptide (1)..(113): Ceres Seq. ID no. 13565503

SEQ ID NO: 890 - DNA, 749 bp, Zea mays subsp. mays
  misc_feature (1)..(749): Ceres Seq. ID no. 12415361
  misc_feature: MA Experiment ID: 20000479 Result: Up-regulated in Transcription
  misc_feature: MA Experiment 20000479 PARAMETER Experiment Name: Zm_Drought_P Parameter: Age (day) Value: 10
  misc_feature: MA Experiment 20000479 PARAMETER Experiment Name: Zm_Drought_P Parameter: Organism Value: Zea mays
  misc_feature: MA Experiment 20000479 PARAMETER Experiment Name: Zm_Drought_P Parameter: Plant Line Value: 35A19
  misc_feature: MA Experiment 20000479 PARAMETER Experiment Name: Zm_Drought_P Parameter: Timepoint (hr) Value: 48
  misc_feature: MA Experiment 20000479 PARAMETER Experiment Name: Zm_Drought_P Parameter: Tissue Value: Aerial
  misc_feature: MA Experiment 20000479 PARAMETER Experiment Name: Zm_Drought_P Parameter: Treatment Value: Drought vs. No Drought
  misc_feature: MA Experiment ID: 20000480 Result: Up-regulated in Transcription
  misc_feature: MA Experiment 20000480 PARAMETER Experiment Name: Zm_Drought_P Parameter: Age (day) Value: 11
  misc_feature: MA Experiment 20000480 PARAMETER Experiment Name: Zm_Drought_P Parameter: Organism Value: Zea mays
  misc_feature: MA Experiment 20000480 PARAMETER Experiment Name: Zm_Drought_P Parameter: Plant Line Value: 35A19
  misc_feature: MA Experiment 20000480 PARAMETER Experiment Name: Zm_Drought_P Parameter: Timepoint (hr) Value: 72
  misc_feature: MA Experiment 20000480 PARAMETER Experiment Name: Zm_Drought_P Parameter: Tissue Value: Aerial
  misc_feature: MA Experiment 20000480 PARAMETER Experiment Name: Zm_Drought_P Parameter: Treatment Value: Drought vs. No Drought
agattcgcagtagtagtgcacgaatagaccgttcaagaccgcgcggcgagacgcgaacctgtcgcgggacgggggggtcagacggtgaacttgatctcgaagccggtggacggatccacgggctcggccgtggacgggacgacggcggtgacggtggcggctggggggccgacggggaggcggcgggttatcatgtcttcgatcttcgcggggtctccggagaggagggcctccacactgccgtcacggcggttgcggacccagccggcgaggccgagcgactcggccgtggacgcagtccagtcgcggaaccccacccccgtgacgcgccccttcaccaccacgcggactgcctttcgtgcgggctccggctgcggcgcggatggtggcgtggcggcatcgggatcggcggaggacgccatggcgcggtggtgctggtacggttgtggacttgtggaagcagcgagactggagaccggagacggagagggacgagacgagacgagacggctgaagcaaggaactgctggaacattttggaaagtcaaggcctgccctagtaggacaacccaagcccggcccaaaaaaaatcgtgaccctgcgcggctgggtcgcactcgcggctcgtggcagaggctgtgatgggctacagttgtgggctttttaaccttcttttaaaaatgtgttattatttttctatattcgtagtgtcccttttccatggttacttctctccagcattgctacat

SEQ ID NO: 891 - protein, 185 aa, Zea mays subsp. mays
  peptide (1)..(185): Ceres Seq. ID no. 12415362
IRSSSARIDRSRPRGETRTCRGTGGSDGELDLEAGGRIHGLGRGRDDGGDGGGWGADGEAAGYHVFDLRGVSGEEGLHTAVTAVADPAGEAERLGRGRSPVAEPHPRDAPLHHHADCLSCGLRLRRGWWRGGIGIGGGRHGAVVLVRLWTCGSSETGDRRRRGTRRDETAEARNCWNILESQGLP

SEQ ID NO: 892 - protein, 149 aa, Zea mays subsp. mays
  peptide (1)..(149): Ceres Seq. ID no. 12415363
MSSIFAGSPERRASTLPSRRLRTQPARPSDSAVDAVQSRNPTPVTRPFTTTRTAFRAGSGCGADGGVAASGSAEDAMARWCWYGCGLVEAARLETGDGEGRDETRRLKQGTAGTFWKVKACPSRTTQARPKKNRDPARLGRTRGSWQRL

SEQ ID NO: 893 - DNA, 1566 bp, Zea mays subsp. mays
  misc_feature (1)..(1566): Ceres Seq. ID no. 12360046
  misc_feature: MA Experiment ID: 108543 Result: Down-regulated in Transcription
ctcgtagggcaccgatgcctcataggagggaacgcgcgcttgccaccgttgtttgctccgcgcaatcgctcggactttcacaggagtcctgagatcaccaccggatcaccaggaggatgctcgtgacctcaaccagcggaatcaatggccgaggagcccgaaattgctcgccgtatttggatttggaccgcatcacggtatggccgagctcctccacaaatcggcggcagatggctcgtcttagacacactgcacgtaagtcggtgattcctttcctgccgtctcgacttgcggagcgtcctctgcaccgcaccgtgtccggtcagtcgagtcacctggagagactgcaccaccgcctgcgtgaggagcaggaacgccggcgtcagcacagagagcagcaggactcttcctccccaccccagcaagaggtggagtccgtgaggccccgttcctctgttgctcagctggaggcaccccctgcaccaccgcgggacgccccggatgttggaggagctactggaggaggttctggaggagaccccgacgatgacgactcagaccacagcacggagtcttctgagccgcaggaggtggaaggatgggtcgcccgacccatcacccgtgacgccgctcgcggttgtcacttccacgacgcactcgacaccttgctgcgccaggctttcgaccggcacacctggtcgatcgagtatcgttgtgtagtctaccagcacagtcgcgggaggtacccggaccgctgggaggctacctgcctagttcgccgtccggaggatgacctccggggtgcggaggccgtttcagagcactattccatctccgagagggacactgtagaggcggctatgcaggatgcagcacggcgtgcactctcccagtactgttctttgttcggtggcgtggccgacggtcttaaccttcggtactacccccgccaccctactggcagcacagagagtgtggttgtctcacctgttggtgaggctaatcctaggttgagcagcacagtcaacctagtcgcagtgcttaacactgagctggatcactctctggacgagctaagcagggctcgaacggagattgcggagttgcgtgctgagttggcagagcgccatcaccaggagggtggttcccctgctcctgttgggactcagcacccataccgctcaccgccacgtggtcatcacacttatggttcccctgtctgtaagaccaggatagatctggatccttagatcgttagcgtcggagtttgtaataattcttaagtcagatgtctcagtcttaggtagtcagtttagtttgcttatcagttgcttccatttagtttagtttgcttatcagttgctttcatgcttgttatgatgaacttgtgcttgatttgaatctttgtaatgattgtagtcaacatgtgggtttcccctgcagtttggcttagctagtaatgttaataaagtcagttgtttagttgggaaaccctttacttctactttcctttcttatctgaggagctgtgttgaatcataaatgaggatcagtgaagccctttgt

SEQ ID NO: 894 - protein, 377 aa, Zea mays subsp. mays
  peptide (1)..(377): Ceres Seq. ID no. 12360047
MLVTSTSGINGRGARNCSPYLDLDRITVWPSSSTNRRQMARLRHTARKSVIPFLPSRLAERPLHRTVSGQSSHLERLHHRLREEQERRRQHREQQDSSSPPQQEVESVRPRSSVAQLEAPPAPPRDAPDVGGATGGGSGGDPDDDDSDHSTESSEPQEVEGWVARPITRDAARGCHFHDALDTLLRQAFDRHTWSIEYRCVVYQHSRGRYPDRWEATCLVRRPEDDLRGAEAVSEHYSISERDTVEAAMQDAARRALSQYCSLFGGVADGLNLRYYPRHPTGSTESVVVSPVGEANPRLSSTVNLVAVLNTELDHSLDELSRARTEIAELRAELAERHHQEGGSPAPVGTQHPYRSPPRGHHTYGSPVCKTRIDLDP

SEQ ID NO: 895 - protein, 339 aa, Zea mays subsp. mays
  peptide (1)..(339): Ceres Seq. ID no. 12360048
MARLRHTARKSVIPFLPSRLAERPLHRTVSGQSSHLERLHHRLREEQERRRQHREQQDSSSPPQQEVESVRPRSSVAQLEAPPAPPRDAPDVGGATGGGSGGDPDDDDSDHSTESSEPQEVEGWVARPITRDAARGCHFHDALDTLLRQAFDRHTWSIEYRCVVYQHSRGRYPDRWEATCLVRRPEDDLRGAEAVSEHYSISERDTVEAAMQDAARRALSQYCSLFGGVADGLNLRYYPRHPTGSTESVVVSPVGEANPRLSSTVNLVAVLNTELDHSLDELSRARTEIAELRAELAERHHQEGGSPAPVGTQHPYRSPPRGHHTYGSPVCKTRIDLDP

SEQ ID NO: 896 - DNA, 960 bp, Zea mays subsp. mays
  misc_feature (1)..(960): Ceres Seq. ID no. 12376701
  misc_feature: MA Experiment ID: 108534 Result: Up-regulated in Transcription
  misc_feature: MA Experiment 108534 PARAMETER Experiment Name: Zm_4deg_Cold_P Parameter: Age (hr) Value: 8
  misc_feature: MA Experiment 108534 PARAMETER Experiment Name: Zm_4deg_Cold_P Parameter: Organism Value: Zea mays
  misc_feature: MA Experiment 108534 PARAMETER Experiment Name: Zm_4deg_Cold_P Parameter: Plant Line Value: 35A19
  misc_feature: MA Experiment 108534 PARAMETER Experiment Name: Zm_4deg_Cold_P Parameter: Temperature (deg C) Value: 4 vs. 22
  misc_feature: MA Experiment 108534 PARAMETER Experiment Name: Zm_4deg_Cold_P Parameter: Timepoint (hr) Value: 6
  misc_feature: MA Experiment 108534 PARAMETER Experiment Name: Zm_4deg_Cold_P Parameter: Tissue Value: Aerial
gcacgagaccattacctagaacatcctaatcgaaaagaaactcgaaagggaagcatgcagcgttcttatatgagatgtgcaagttctacagagattggcatgccaagtctgatggttttcatggtatttgaaattaataatatactactgttatatgcttttgccaattaccatcaaatatgagaagaaacacgcttctgacagaaaatcgctttctgttcaggaattttccttcatgatcctgtgagcttcactgccgtacttcatccagagtacttcacattcaagaagggtgtggtgagagtagagacccagggcatttgcactggccacactttgatggatcagggattgaaaaagtatgtttttttttctctctgagtaactcataaaagattgacccgtctgatgttttttagtttcagcattcttacatacaccacattgatatgacataaatctcaccaaattactttataacttttggagtaagcaaaccaaggcaaaagttaccccacatgatctatatgtttcagcagatttcacacttgtttcttcttgttcctcctatgctgcaggtggaattcagagaacccatggtcagggtataaaccgatttcagttgcatggacggttgatgtgccaaaggtcatcagctttataaagaagctgctcatggcaccatgagcaaagtacaaccatttaacgacgtgtcgacatcagcgctctctgatgtccaagaaaatttgacgagtacagatgctctttctcagttgcactgtaattagttcctggacctaggatgattcctattcctccaatagtaagaggaacctttcattgtgaaaggtcatgcagcagtctcgaataccatgaagcaaattctggcatacgacatcatgtctcacacatttgtatcaatacatttcgaatcaataaagtttccctcactctttactc

SEQ ID NO: 897 - protein, 60 aa, Zea mays subsp. mays
  peptide (1)..(60): Ceres Seq. ID no. 12376702
ARDHYLEHPNRKETRKGSMQRSYMRCASSTEIGMPSLMVFMVFEINNILLLYAFANYHQI

SEQ ID NO: 898 - protein, 52 aa, Zea mays subsp. mays
  peptide (1)..(52): Ceres Seq. ID no. 12376703
MIPIPPIVRGTFHCERSCSSLEYHEANSGIRHHVSHICINTFRINKVSLTLY

SEQ ID NO: 899 - protein, 42 aa, Zea mays subsp. mays
  peptide (1)..(42): Ceres Seq. ID no. 12376704
MQRSYMRCASSTEIGMPSLMVFMVFEINNILLLYAFANYHQI

SEQ ID NO: 900 - DNA, 978 bp, Zea mays subsp. mays
  misc_feature (1)..(978): Ceres Seq. ID no. 12354728
  misc_feature: MA Experiment ID: 108522 Result: Up-regulated in Transcription
  misc_feature: MA Experiment 108522 PARAMETER Experiment Name: Zm_42deg_Heat_P Parameter: Age (day) Value: 8
  misc_feature: MA Experiment 108522 PARAMETER Experiment Name: Zm_42deg_Heat_P Parameter: Organism Value: Zea mays
  misc_feature: MA Experiment 108522 PARAMETER Experiment Name: Zm_42deg_Heat_P Parameter: Plant Line Value: 35A19
  misc_feature: MA Experiment 108522 PARAMETER Experiment Name: Zm_42deg_Heat_P Parameter: Temperature (deg C) Value: 42 vs. 22
  misc_feature: MA Experiment 108522 PARAMETER Experiment Name: Zm_42deg_Heat_P Parameter: Timepoint (hr) Value: 1
  misc_feature: MA Experiment 108522 PARAMETER Experiment Name: Zm_42deg_Heat_P Parameter: Tissue Value: Aerial
  misc_feature: MA Experiment ID: 108543 Result: Down-regulated in Transcription
  misc_feature: MA Experiment ID: 108689 Result: Up-regulated in Transcription
  misc_feature: MA Experiment 108689 PARAMETER Experiment Name: Zm_Drought_Roots_P Parameter: Age (day) Value: 9
  misc_feature: MA Experiment 108689 PARAMETER Experiment Name: Zm_Drought_Roots_P Parameter: Organism Value: Zea mays
  misc_feature: MA Experiment 108689 PARAMETER Experiment Name: Zm_Drought_Roots_P Parameter: Plant Line Value: 35A19
  misc_feature: MA Experiment 108689 PARAMETER Experiment Name: Zm_Drought_Roots_P Parameter: Timepoint (hr) Value: 24
  misc_feature: MA Experiment 108689 PARAMETER Experiment Name: Zm_Drought_Roots_P Parameter: Tissue Value: Roots
  misc_feature: MA Experiment 108689 PARAMETER Experiment Name: Zm_Drought_Roots_P Parameter: Treatment Value: Drought vs. No Drought
agtattagcatatatatacacgtagtaatgcagaacagatgggagtaccttaagcaagacacaatctgcagccgggatagactcgaacatgtcgccggcgatgaacttcaccgtgccatcatcaggtgccccgctgaccacctgctcgaggtccaacacgctgcaccggatgtgcgggaaggccctagcgatggccatcgcagcggcgccgtggccgccgccgacgtcgacgagcgagccgagcccgcggaatatacccgcggcccggggctctctcaggagcgtgtccatggcgaagttgctgtccgccgcgcacccgtcgttcaaggtcttgttgtacagggcgtcgttcttcgtcaagctccacggggacatgccgtgcgccacctcgaagagcgtggcggtggcgccggcgtccttgaaccactcttccaggctgaagtaggtggcgaccgacgtagtggggcgcatcagaaggtccagcatcggcgatatgtcgcacgaggtcggtgcccccgcgccgcttacgaggaggcgggacgccggagtgagcttgtaaacagtactgtcgtcgctctcatctgtgcctgtggtgcccaagatgctggagacggtaagcacgcgcatgagccgtcggagatacgggagcttcgacgggtcgacgccggtctcggtgatgatgtccgagattgttgctgccccacctcggcggtggatggcgctagggatgcctagctggatcgcgcacccgatcgccatggtcttcacgtaggagagactgtaattgtagagctccacgtaaccttggagcatgtcctgtgtgttattaagctcctcctggacagaggacatggtggtgttgtaaatggcaggggcgcagggcttgttgcattggctgcgctgggatgctacttttataagggaatggggaggcaaagaagatatcgacgacaaaggaagggcctgcactttttatgc

SEQ ID NO: 901 - protein, 244 aa, Zea mays subsp. mays
  peptide (1)..(244): Ceres Seq. ID no. 12354729
SISIYIHVVMQNRWEYLKQDTICSRDRLEHVAGDELHRAIIRCPADHLLEVQHAAPDVREGPSDGHRSGAVAAADVDERAEPAEYTRGPGLSQERVHGEVAVRRAPVVQGLVVQGVVLRQAPRGHAVRHLEERGGGAGVLEPLFQAEVGGDRRSGAHQKVQHRRYVARGRCPRAAYEEAGRRSELVNSTVVALICACGAQDAGDGKHAHEPSEIRELRRVDAGLGDDVRDCCCPTSAVDGARDA

SEQ ID NO: 902 - protein, 235 aa, Zea mays subsp. mays
  peptide (1)..(235): Ceres Seq. ID no. 12354730
MQNRWEYLKQDTICSRDRLEHVAGDELHRAIIRCPADHLLEVQHAAPDVREGPSDGHRSGAVAAADVDERAEPAEYTRGPGLSQERVHGEVAVRRAPVVQGLVVQGVVLRQAPRGHAVRHLEERGGGAGVLEPLFQAEVGGDRRSGAHQKVQHRRYVARGRCPRAAYEEAGRRSELVNSTVVALICACGAQDAGDGKHAHEPSEIRELRRVDAGLGDDVRDCCCPTSAVDGARDA

SEQ ID NO: 903 - DNA, 2271 bp, Zea mays subsp. mays
  misc_feature (1)..(2271): Ceres Seq. ID no. 12361733
  misc_feature: MA Experiment ID: 108529 Result: Down-regulated in Transcription
  misc_feature: MA Experiment 108529 PARAMETER Experiment Name: Zm_Imbibed_Seeds_P Parameter: Age (day) Value: 5 vs. 2
  misc_feature: MA Experiment 108529 PARAMETER Experiment Name: Zm_Imbibed_Seeds_P Parameter: Organism Value: Zea mays
  misc_feature: MA Experiment 108529 PARAMETER Experiment Name: Zm_Imbibed_Seeds_P Parameter: Plant Line Value: 35A19
  misc_feature: MA Experiment 108529 PARAMETER Experiment Name: Zm_Imbibed_Seeds_P Parameter: Tissue Value: Roots vs. Embryo
  misc_feature: MA Experiment ID: 108543 Result: Up-regulated in Transcription
  misc_feature: MA Experiment ID: 108546 Result: Down-regulated in Transcription
  misc_feature: MA Experiment 108546 PARAMETER Experiment Name: Zm_Imbibed_Seeds_P Parameter: Age (day) Value: 3 vs. 2
  misc_feature: MA Experiment 108546 PARAMETER Experiment Name: Zm_Imbibed_Seeds_P Parameter: Organism Value: Zea mays
  misc_feature: MA Experiment 108546 PARAMETER Experiment Name: Zm_Imbibed_Seeds_P Parameter: Plant Line Value: 35A19
  misc_feature: MA Experiment 108546 PARAMETER Experiment Name: Zm_Imbibed_Seeds_P Parameter: Tissue Value: Roots vs. Embryo
  misc_feature: MA Experiment ID: 20000478 Result: Down-regulated in Transcription
  misc_feature: MA Experiment 20000478 PARAMETER Experiment Name: Zm_5mM_SA_P Parameter: Age (day) Value: 11
  misc_feature: MA Experiment 20000478 PARAMETER Experiment Name: Zm_5mM_SA_P Parameter: Organism Value: Zea mays
  misc_feature: MA Experiment 20000478 PARAMETER Experiment Name: Zm_5mM_SA_P Parameter: Plant Line Value: 35A19
  misc_feature: MA Experiment 20000478 PARAMETER Experiment Name: Zm_5mM_SA_P Parameter: Timepoint (hr) Value: 72
  misc_feature: MA Experiment 20000478 PARAMETER Experiment Name: Zm_5mM_SA_P Parameter: Tissue Value: Aerial
  misc_feature: MA Experiment 20000478 PARAMETER Experiment Name: Zm_5mM_SA_P Parameter: Treatment Value: 5mM SA vs. No Treatment
  misc_feature: MA Experiment ID: 20000480 Result: Down-regulated in Transcription
  misc_feature: MA Experiment 20000480 PARAMETER Experiment Name: Zm_Drought_P Parameter: Age (day) Value: 11
  misc_feature: MA Experiment 20000480 PARAMETER Experiment Name: Zm_Drought_P Parameter: Organism Value: Zea mays
  misc_feature: MA Experiment 20000480 PARAMETER Experiment Name: Zm_Drought_P Parameter: Plant Line Value: 35A19
  misc_feature: MA Experiment 20000480 PARAMETER Experiment Name: Zm_Drought_P Parameter: Timepoint (hr) Value: 72
  misc_feature: MA Experiment 20000480 PARAMETER Experiment Name: Zm_Drought_P Parameter: Tissue Value: Aerial
  misc_feature: MA Experiment 20000480 PARAMETER Experiment Name: Zm_Drought_P Parameter: Treatment Value: Drought vs. No Drought
  misc_feature: MA Experiment ID: 20000487 Result: Down-regulated in Transcription
  misc_feature: MA Experiment 20000487 PARAMETER Experiment Name: Zm_50mM_NH4NO3_L_to_H_P Parameter: Organism Value: Zea mays
  misc_feature: MA Experiment 20000487 PARAMETER Experiment Name: Zm_50mM_NH4NO3_L_to_H_P Parameter: Timepoint (hr) Value: 4
  misc_feature: MA Experiment 20000487 PARAMETER Experiment Name: Zm_50mM_NH4NO3_L_to_H_P Parameter: Tissue Value: Leaves
  misc_feature: MA Experiment 20000487 PARAMETER Experiment Name: Zm_50mM_NH4NO3_L_to_H_P Parameter: Treatment Value: 50mM NH4NO3 vs. 100mM Mannitol
  misc_feature: MA Experiment ID: 20000535 Result: Up-regulated in Transcription
  misc_feature: MA Experiment 20000535 PARAMETER Experiment Name: Zm_Hybrid_Seed_Dev_P Parameter: DAP Value: 30 vs. 12
  misc_feature: MA Experiment 20000535 PARAMETER Experiment Name: Zm_Hybrid_Seed_Dev_P Parameter: Organism Value: Zea mays
  misc_feature: MA Experiment 20000535 PARAMETER Experiment Name: Zm_Hybrid_Seed_Dev_P Parameter: Plant Line Value: 35A19
  misc_feature: MA Experiment 20000535 PARAMETER Experiment Name: Zm_Hybrid_Seed_Dev_P Parameter: Tissue Value: Embryo vs. Unfert Floret
  misc_feature: MA Experiment ID: 20000626 Result: Down-regulated in Transcription
  misc_feature: MA Experiment 20000626 PARAMETER Experiment Name: Zm_Herbicide-Treatments_P Parameter: Timepoint (hr) Value: 12
  misc_feature: MA Experiment 20000626 PARAMETER Experiment Name: Zm_Herbicide-Treatments_P Parameter: Tissue Value: Aerial
  misc_feature: MA Experiment 20000626 PARAMETER Experiment Name: Zm_Herbicide-Treatments_P Parameter: Treatment Value: Roundup vs. No Treatment
  misc_feature: MA Experiment ID: 20000632 Result: Down-regulated in Transcription
  misc_feature: MA Experiment 20000632 PARAMETER Experiment Name: Zm_Herbicide-Treatments_P Parameter: Timepoint (hr) Value: 4
  misc_feature: MA Experiment 20000632 PARAMETER Experiment Name: Zm_Herbicide-Treatments_P Parameter: Tissue Value: Aerial
  misc_feature: MA Experiment 20000632 PARAMETER Experiment Name: Zm_Herbicide-Treatments_P Parameter: Treatment Value: Glean vs. No Treatment
gcacgagaccattacctagaacatcctaatcgaaaagtttgttttcgtcgtaaatctccgtcccgctgggcgcgctgccggagtcgccgtcgcccagcccccagccgattattcttattctctttgcttcgcctcgcctcctgtcgtcgtcgtcatcatcatcgcccccggctgctaaacaccaacaagtgcccttgccccacatggccacccggccacattaccccacaaccggcagggcacgggcaacttgacatgcatggcaacgacgcacagcagcttgctcgatcgctcggtgtcactgcgtgtgttcgtgtggtgcttgcctctgtactactgcactgcacgcacacacgcagggatgcagagggccactcccactcgcatcgcatgcgtgtgtgtggccttcttttttcccctgctgtgctgggtgctgctgccacccaaaagcaaagctaagaacggccatgccatgcgtatatatataacccaaatagcacattagcagaaccgtcaaagcacatatatacatgcctgccgtcgtgctacagtactacaccgcagtggggcatggtggcgctggcgcgcgagggagagtgagggccagcgcgccatgcccgcgcgacacgcactggcactgccggcagtggcacaggcacaccccggccccacgatctccccacctgggtcctgggctccacagctgcctcgctcgccagtcgccaccaccatggaacggacggctacggtggtcttgtttgctctctttgactcggtgcctgcctcgggaaacgtggtcctggatgctcgtcggtggcgtatggagcgtcggaggagatcggcccgttccggatcaaaccaaacgggacaggcctgttcctcaacaagtactcatggaacagagaggcaaaccttctgttcctcgagtcgcccgcgggagtcggcttctcctacgccaacaccacctcggacctcaagacgtcgggcgacgagaggaccgctcaagacgcgctgcagttcctggtcagctggatgtcacggttcccgcagtaccggcaccgagatttctacatcgccggagaaagctacgcgggccactacgtcccccagttggcaaggaagatcgtcgagtacaacgaggcctcgcctcaccccttcatcaacctcaagggaatccttgtgagtatcgtatctatgcatgctgctgccaaacacgagcaggccgccggccggccggctccagtctaatcttaacccctccaaaaaaaaaacaccgatcaggtgggcaacgcggtgaccgacaactactacgacaacatcggcacggtcacctactggtggacgcacgccatgatctccgaccgcacctacaaggccatcctcaggtggtgcaacttcagcagcagcagcatctcgcgcccctgcaaccgcgccatgagctacgccatgaaccacgagttcggggacatcgaccagtacagcatctacacgccgtcgtgcgccgccgccgcggccagggccaacgccaccgtgctcaggttcaagaacaccctcgtccgccgccgccgctcctccggctacgacccctgcacggagacctacgccgagaggtactacaacaggatggacgtgcagagggcgatgcacgccaacaccacggggatcccctacagatggactgcctgcagtgatgtgctgatcaagacatggcaagattcagagttctccatgctgccgacgtacaagaagctgatgaaagcaggactgaggatatgggtgttcagcggcgacacagattcagtcgtcccggtgaccgcgacgaggttcgccatcagtcatctcggtctgaagatcaagacccgctggtatccgtggtactcagctggacaggtaggaggatggtctgaggtgtacgaagggctcacgtttgcgtcggtgagaggcgcagggcatgaggtgccgttgttccagccccggagggcgttcaggatgttccggtcgttcttggccggggagccattgcccaagtcctgaaggttcctcacatgtgactgaggccatgcatgcctacctgatcatgtctagctacggtcctgacgggtgagaaggtgacgttccccaggtagagaatgacttgttgataggcgcgcagttcatagctgaggagtgattgattggtctcgggagaaggatgtagagaataataaggatggctatgttatgccatggaaacccatgagcattgcaatgattagcgaataattttcagtt

SEQ ID NO: 904 - protein, 386 aa, Zea mays subsp. mays
  peptide (1)..(386): Ceres Seq. ID no. 12361734
MPAVVLQYYTAVGHGGAGARGRVRASAPCPRDTHWHCRQWHRHTPAPRSPHLGPGLHSCLARQSPPPWNGRLRWSCLLSLTRCLPRETWSWMLVGGVWSVGGDRPVPDQTKRDRPVPQQVLMEQRGKPSVPRVARGSRLLLRQHHLGPQDVGRREDRSRRAAVPGQLDVTVPAVPAPRFLHRRRKLRGPLRPPVGKEDRRVQRGLASPLHQPQGNPCEYRIYACCCQTRAGRRPAGSSLILTPPKKKHRSGGQRGDRQLLRQHRHGHLLVDARHDLRPHLQGHPQVVQLQQQQHLAPLQPRHELRHEPRVRGHRPVQHLHAVVRRRRGQGQRHRAQVQEHPRPPPPLLRLRPLHGDLRREVLQQDGRAEGDARQHHGDPLQMDCLQ

SEQ ID NO: 905 - protein, 295 aa, Zea mays subsp. mays
  peptide (1)..(295): Ceres Seq. ID no. 12361735
MLVGGVWSVGGDRPVPDQTKRDRPVPQQVLMEQRGKPSVPRVARGSRLLLRQHHLGPQDVGRREDRSRRAAVPGQLDVTVPAVPAPRFLHRRRKLRGPLRPPVGKEDRRVQRGLASPLHQPQGNPCEYRIYACCCQTRAGRRPAGSSLILTPPKKKHRSGGQRGDRQLLRQHRHGHLLVDARHDLRPHLQGHPQVVQLQQQQHLAPLQPRHELRHEPRVRGHRPVQHLHAVVRRRRGQGQRHRAQVQEHPRPPPPLLRLRPLHGDLRREVLQQDGRAEGDARQHHGDPLQMDCLQ

SEQ ID NO: 906 - protein, 265 aa, Zea mays subsp. mays
  peptide (1)..(265): Ceres Seq. ID no. 12361736
MEQRGKPSVPRVARGSRLLLRQHHLGPQDVGRREDRSRRAAVPGQLDVTVPAVPAPRFLHRRRKLRGPLRPPVGKEDRRVQRGLASPLHQPQGNPCEYRIYACCCQTRAGRRPAGSSLILTPPKKKHRSGGQRGDRQLLRQHRHGHLLVDARHDLRPHLQGHPQVVQLQQQQHLAPLQPRHELRHEPRVRGHRPVQHLHAVVRRRRGQGQRHRAQVQEHPRPPPPLLRLRPLHGDLRREVLQQDGRAEGDARQHHGDPLQMDCLQ

SEQ ID NO: 907 - DNA, 665 bp, Zea mays subsp. mays
  misc_feature (1)..(665): Ceres Seq. ID no. 12354772
  misc_feature: MA Experiment ID: 108504 Result: Up-regulated in Transcription
  misc_feature: MA Experiment 108504 PARAMETER Experiment Name: Zm_Drought_P Parameter: Age (day) Value: 8
  misc_feature: MA Experiment 108504 PARAMETER Experiment Name: Zm_Drought_P Parameter: Organism Value: Zea mays
  misc_feature: MA Experiment 108504 PARAMETER Experiment Name: Zm_Drought_P Parameter: Plant Line Value: 35A19
  misc_feature: MA Experiment 108504 PARAMETER Experiment Name: Zm_Drought_P Parameter: Timepoint (hr) Value: 12
  misc_feature: MA Experiment 108504 PARAMETER Experiment Name: Zm_Drought_P Parameter: Tissue Value: Aerial
  misc_feature: MA Experiment 108504 PARAMETER Experiment Name: Zm_Drought_P Parameter: Treatment Value: Drought vs. No Drought
  misc_feature: MA Experiment ID: 108527 Result: Up-regulated in Transcription
  misc_feature: MA Experiment 108527 PARAMETER Experiment Name: Zm_5mM_NO_P Parameter: Age (day) Value: 8
  misc_feature: MA Experiment 108527 PARAMETER Experiment Name: Zm_5mM_NO_P Parameter: Organism Value: Zea mays
  misc_feature: MA Experiment 108527 PARAMETER Experiment Name: Zm_5mM_NO_P Parameter: Plant Line Value: 35A19
  misc_feature: MA Experiment 108527 PARAMETER Experiment Name: Zm_5mM_NO_P Parameter: Timepoint (hr) Value: 6
  misc_feature: MA Experiment 108527 PARAMETER Experiment Name: Zm_5mM_NO_P Parameter: Tissue Value: Aerial
  misc_feature: MA Experiment 108527 PARAMETER Experiment Name: Zm_5mM_NO_P Parameter: Treatment Value: 5mM NO vs. No Treatment
  misc_feature: MA Experiment ID: 108528 Result: Down-regulated in Transcription
  misc_feature: MA Experiment 108528 PARAMETER Experiment Name: Zm_Imbibed_Seeds_P Parameter: Age (day) Value: 5 vs. 2
  misc_feature: MA Experiment 108528 PARAMETER Experiment Name: Zm_Imbibed_Seeds_P Parameter: Organism Value: Zea mays
  misc_feature: MA Experiment 108528 PARAMETER Experiment Name: Zm_Imbibed_Seeds_P Parameter: Plant Line Value: 35A19
  misc_feature: MA Experiment 108528 PARAMETER Experiment Name: Zm_Imbibed_Seeds_P Parameter: Tissue Value: Aerial vs. Embryo
  misc_feature: MA Experiment ID: 108530 Result: Down-regulated in Transcription
  misc_feature: MA Experiment 108530 PARAMETER Experiment Name: Zm_Imbibed_Seeds_P Parameter: Age (day) Value: 6 vs. 2
  misc_feature: MA Experiment 108530 PARAMETER Experiment Name: Zm_Imbibed_Seeds_P Parameter: Organism Value: Zea mays
  misc_feature: MA Experiment 108530 PARAMETER Experiment Name: Zm_Imbibed_Seeds_P Parameter: Plant Line Value: 35A19
  misc_feature: MA Experiment 108530 PARAMETER Experiment Name: Zm_Imbibed_Seeds_P Parameter: Tissue Value: Aerial vs. Embryo
  misc_feature: MA Experiment ID: 108543 Result: Up-regulated in Transcription
  misc_feature: MA Experiment ID: 108547 Result: Down-regulated in Transcription
  misc_feature: MA Experiment 108547 PARAMETER Experiment Name: Zm_Imbibed_Seeds_P Parameter: Age (day) Value: 4 vs. 2
  misc_feature: MA Experiment 108547 PARAMETER Experiment Name: Zm_Imbibed_Seeds_P Parameter: Organism Value: Zea mays
  misc_feature: MA Experiment 108547 PARAMETER Experiment Name: Zm_Imbibed_Seeds_P Parameter: Plant Line Value: 35A19
  misc_feature: MA Experiment 108547 PARAMETER Experiment Name: Zm_Imbibed_Seeds_P Parameter: Tissue Value: Aerial vs. Embryo
  misc_feature: MA Experiment ID: 108689 Result: Up-regulated in Transcription
  misc_feature: MA Experiment 108689 PARAMETER Experiment Name: Zm_Drought_Roots_P Parameter: Age (day) Value: 9
  misc_feature: MA Experiment 108689 PARAMETER Experiment Name: Zm_Drought_Roots_P Parameter: Organism Value: Zea mays
  misc_feature: MA Experiment 108689 PARAMETER Experiment Name: Zm_Drought_Roots_P Parameter: Plant Line Value: 35A19
  misc_feature: MA Experiment 108689 PARAMETER Experiment Name: Zm_Drought_Roots_P Parameter: Timepoint (hr) Value: 24
  misc_feature: MA Experiment 108689 PARAMETER Experiment Name: Zm_Drought_Roots_P Parameter: Tissue Value: Roots
  misc_feature: MA Experiment 108689 PARAMETER Experiment Name: Zm_Drought_Roots_P Parameter: Treatment Value: Drought vs. No Drought
  misc_feature: MA Experiment ID: 20000478 Result: Up-regulated in Transcription
  misc_feature: MA Experiment 20000478 PARAMETER Experiment Name: Zm_5mM_SA_P Parameter: Age (day) Value: 11
  misc_feature: MA Experiment 20000478 PARAMETER Experiment Name: Zm_5mM_SA_P Parameter: Organism Value: Zea mays
  misc_feature: MA Experiment 20000478 PARAMETER Experiment Name: Zm_5mM_SA_P Parameter: Plant Line Value: 35A19
  misc_feature: MA Experiment 20000478 PARAMETER Experiment Name: Zm_5mM_SA_P Parameter: Timepoint (hr) Value: 72
  misc_feature: MA Experiment 20000478 PARAMETER Experiment Name: Zm_5mM_SA_P Parameter: Tissue Value: Aerial
  misc_feature: MA Experiment 20000478 PARAMETER Experiment Name: Zm_5mM_SA_P Parameter: Treatment Value: 5mM SA vs. No Treatment
  misc_feature: MA Experiment ID: 20000487 Result: Up-regulated in Transcription
  misc_feature: MA Experiment 20000487 PARAMETER Experiment Name: Zm_50mM_NH4NO3_L_to_H_P Parameter: Organism Value: Zea mays
  misc_feature: MA Experiment 20000487 PARAMETER Experiment Name: Zm_50mM_NH4NO3_L_to_H_P Parameter: Timepoint (hr) Value: 4
  misc_feature: MA Experiment 20000487 PARAMETER Experiment Name: Zm_50mM_NH4NO3_L_to_H_P Parameter: Tissue Value: Leaves
  misc_feature: MA Experiment 20000487 PARAMETER Experiment Name: Zm_50mM_NH4NO3_L_to_H_P Parameter: Treatment Value: 50mM NH4NO3 vs. 100mM Mannitol
  misc_feature: MA Experiment ID: 20000488 Result: Up-regulated in Transcription
  misc_feature: MA Experiment 20000488 PARAMETER Experiment Name: Zm_50mM_NH4NO3_L_to_H_P Parameter: Organism Value: Zea mays
  misc_feature: MA Experiment 20000488 PARAMETER Experiment Name: Zm_50mM_NH4NO3_L_to_H_P Parameter: Timepoint (hr) Value: 8
  misc_feature: MA Experiment 20000488 PARAMETER Experiment Name: Zm_50mM_NH4NO3_L_to_H_P Parameter: Tissue Value: Leaves
  misc_feature: MA Experiment 20000488 PARAMETER Experiment Name: Zm_50mM_NH4NO3_L_to_H_P Parameter: Treatment Value: 50mM NH4NO3 vs. 100mM Mannitol
  misc_feature: MA Experiment ID: 20000626 Result: Up-regulated in Transcription
  misc_feature: MA Experiment 20000626 PARAMETER Experiment Name: Zm_Herbicide-Treatments_P Parameter: Timepoint (hr) Value: 12
  misc_feature: MA Experiment 20000626 PARAMETER Experiment Name: Zm_Herbicide-Treatments_P Parameter: Tissue Value: Aerial
  misc_feature: MA Experiment 20000626 PARAMETER Experiment Name: Zm_Herbicide-Treatments_P Parameter: Treatment Value: Roundup vs. No Treatment
  misc_feature: MA Experiment ID: 20000630 Result: Up-regulated in Transcription
  misc_feature: MA Experiment 20000630 PARAMETER Experiment Name: Zm_Herbicide-Treatments_P Parameter: Timepoint (hr) Value: 4
  misc_feature: MA Experiment 20000630 PARAMETER Experiment Name: Zm_Herbicide-Treatments_P Parameter: Tissue Value: Aerial
  misc_feature: MA Experiment 20000630 PARAMETER Experiment Name: Zm_Herbicide-Treatments_P Parameter: Treatment Value: Roundup vs. No Treatment
actacagttcttattccaagctcacctatccctgttaatatgaaattggttgaccaataccatggaagcagctccaacgctgactactactacatgtcagcaaggtccttgtccaggagtccagtgccaactgctggtatatggtccggcagtaatcgtcaatcatcaagaagtcctccacaaatgaatgatcaaaggggatctttaattggtgagatcgctccggaacattctgcaccatctactgttacaaaaaatgccctctcagtggcaccatggatgggtcttctattgggtacgtgcctcttgcacattttgattggaaacaaacatagggagatggcaagtggcactgtcataccaattggaagaaggcttttactgtttgtggatgatcatggaaattcatcgcttagccagagcagtggaagtgaaattggatgttcactggatctgtagttgtaccaggtagatcaacaaggtgcgtttatggcgcactgtgtaacagtagctatgcctatgaagctgcacaatttagtgacagcagtgcgtatgaatcggattgctatgatgtgaccatggtctcagtcatgttcaagatgctattgtactattctctgctaataactaaacagcttagctcaaggaccggtggcttggattcg

SEQ ID NO: 908 - protein, 152 aa, Zea mays subsp. mays
  peptide (1)..(152): Ceres Seq. ID no. 12354773
TTVLIPSSPIPVNMKLVDQYHGSSSNADYYYMSARSLSRSPVPTAGIWSGSNRQSSRSPPQMNDQRGSLIGEIAPEHSAPSTVTKNALSVAPWMGLLLGTCLLHILIGNKHREMASGTVIPIGRRLLLFVDDHGNSSLSQSSGSEIGCSLDL

SEQ ID NO: 909 - protein, 139 aa, Zea mays subsp. mays
  peptide (1)..(139): Ceres Seq. ID no. 12354774
MKLVDQYHGSSSNADYYYMSARSLSRSPVPTAGIWSGSNRQSSRSPPQMNDQRGSLIGEIAPEHSAPSTVTKNALSVAPWMGLLLGTCLLHILIGNKHREMASGTVIPIGRRLLLFVDDHGNSSLSQSSGSEIGCSLDL

SEQ ID NO: 910 - protein, 121 aa, Zea mays subsp. mays
  peptide (1)..(121): Ceres Seq. ID no. 12354775
MSARSLSRSPVPTAGIWSGSNRQSSRSPPQMNDQRGSLIGEIAPEHSAPSTVTKNALSVAPWMGLLLGTCLLHILIGNKHREMASGTVIPIGRRLLLFVDDHGNSSLSQSSGSEIGCSLDL

SEQ ID NO: 911 - DNA, 540 bp, Zea mays subsp. mays
  misc_feature (1)..(540): Ceres Seq. ID no. 12417242
  misc_feature: MA Experiment ID: 108535 Result: Up-regulated in Transcription
  misc_feature: MA Experiment 108535 PARAMETER Experiment Name: Zm_Meristem_P Parameter: Age (day) Value: 8
  misc_feature: MA Experiment 108535 PARAMETER Experiment Name: Zm_Meristem_P Parameter: Organism Value: Zea mays
  misc_feature: MA Experiment 108535 PARAMETER Experiment Name: Zm_Meristem_P Parameter: Plant Line Value: 35A19
  misc_feature: MA Experiment 108535 PARAMETER Experiment Name: Zm_Meristem_P Parameter: Tissue Value: Root Meristem vs. Above Root Meristem
  misc_feature: MA Experiment ID: 20000492 Result: Up-regulated in Transcription
  misc_feature: MA Experiment 20000492 PARAMETER Experiment Name: Zm_Hybrid_Seed_Dev_P Parameter: DAP Value: 12
  misc_feature: MA Experiment 20000492 PARAMETER Experiment Name: Zm_Hybrid_Seed_Dev_P Parameter: Organism Value: Zea mays
  misc_feature: MA Experiment 20000492 PARAMETER Experiment Name: Zm_Hybrid_Seed_Dev_P Parameter: Plant Line Value: 35A19
  misc_feature: MA Experiment 20000492 PARAMETER Experiment Name: Zm_Hybrid_Seed_Dev_P Parameter: Tissue Value: Fert Kernel vs. Unfert Floret
aagcacaaacacgcgcgatccgatctgggccggccaagcagccacccatccatggcgactagggtttggctcaccgccctcctgcttggtttcctcgtcgccgcctcccccttcaccagccgagttgctagagctgaatccgaggaagatgctgctgctgctgaggtggaaccggggagaccggggttggactatgcctgtttgttgctgcgcccagggccacggattgggttggacaggtggtggtaccgcaggtttccagtgatggacctttaagtcctgctcctggtgtagagacagtagttgtcttcccaaaaaatgctggcaaaattgtactagcaggtgaagaaactgaattactagttggtctgcaaaatgacggtgaatcaattttgaatgttgttgctgttcattcaactctccatcttccttttgaccacaatatgtatggncagaaccttactgttcagaatttcttcaattcatcagttcctgtttctgtgcaagcaaaccttncnctacaagttcgttgtgagcaag

SEQ ID NO: 912 - protein, 91 aa, Zea mays subsp. mays
  peptide (1)..(91): Ceres Seq. ID no. 12417243
KHKHARSDLGRPSSHPSMATRVWLTALLLGFLVAASPFTSRVARAESEEDAAAAEVEPGRPGLDYACLLLRPGPRIGLDRWWYRRFPVMDL

SEQ ID NO: 913 - protein, 87 aa, Zea mays subsp. mays
  peptide (1)..(87): Ceres Seq. ID no. 12417244
STNTRDPIWAGQAATHPWRLGFGSPPSCLVSSSPPPPSPAELLELNPRKMLLLLRWNRGDRGWTMPVCCCAQGHGLGWTGGGTAGFQ

SEQ ID NO: 914 - protein, 74 aa, Zea mays subsp. mays
  peptide (1)..(74): Ceres Seq. ID no. 12417245
MATRVWLTALLLGFLVAASPFTSRVARAESEEDAAAAEVEPGRPGLDYACLLLRPGPRIGLDRWWYRRFPVMDL

SEQ ID NO: 915 - DNA, 887 bp, Zea mays subsp. mays
  misc_feature (1)..(887): Ceres Seq. ID no. 12416261
  misc_feature: MA Experiment ID: 108535 Result: Down-regulated in Transcription
  misc_feature: MA Experiment 108535 PARAMETER Experiment Name: Zm_Meristem_P Parameter: Age (day) Value: 8
  misc_feature: MA Experiment 108535 PARAMETER Experiment Name: Zm_Meristem_P Parameter: Organism Value: Zea mays
  misc_feature: MA Experiment 108535 PARAMETER Experiment Name: Zm_Meristem_P Parameter: Plant Line Value: 35A19
  misc_feature: MA Experiment 108535 PARAMETER Experiment Name: Zm_Meristem_P Parameter: Tissue Value: Root Meristem vs. Above Root Meristem
  misc_feature: MA Experiment ID: 20000535 Result: Down-regulated in Transcription
  misc_feature: MA Experiment 20000535 PARAMETER Experiment Name: Zm_Hybrid_Seed_Dev_P Parameter: DAP Value: 30 vs. 12
  misc_feature: MA Experiment 20000535 PARAMETER Experiment Name: Zm_Hybrid_Seed_Dev_P Parameter: Organism Value: Zea mays
  misc_feature: MA Experiment 20000535 PARAMETER Experiment Name: Zm_Hybrid_Seed_Dev_P Parameter: Plant Line Value: 35A19
  misc_feature: MA Experiment 20000535 PARAMETER Experiment Name: Zm_Hybrid_Seed_Dev_P Parameter: Tissue Value: Embryo vs. Unfert Floret
gggtcatttgacatagttggattgggagctgaaaatcaatattttgataccgataacagtggaattcaaaaccagggatatcaaaatacaaccgaagtaaggacatataatcaggctgctcttactgtgcggagccatatgaagcatgatcatgtagtcttatcctcgcatgcatcaggcactctgaatatccatgcggcaaatgagctacataaccagagctccacatcttcacaatcatggttcaatgcggctctatcagccttgttggactctgtacctagtagtccagcattagctgctgaaatcgaaaacactgttatcaacagaacactccagcgcatctctagcttccgaccacagcaaactgcaggtgaagaaaacacttttatcaacagaacacttcagcacatctctagcttcaggtcacagcaagcaacaggggaagaaccaggcacccctagtattcaggttaccagaggtggcaggctgatgttcatatctctactggttatacttgcttctgttatatggacctttacttcaggctccgccctcaacttttgcaagggtttatggaaatcctnttntacgtgacagattaagtgggaacctggtgaccttgccctctgtaaattttttggtcctcggtaccatttatggtttgaatatcctttcgctttcaaaagggtgaagaggtagaaacattttgagggtggtaatatgattataggttgtagagcctatttaaaacggtaaaacgcaaggggaaaaagcatatctgatggtaatatttgaaactaatgggttactgttctcatttgtattttgacagatatatgtactgaatgtaattaacctattaatatagcttcagtttctgtgct

SEQ ID NO: 916 - protein, 198 aa, Zea mays subsp. mays
  peptide (1)..(198): Ceres Seq. ID no. 12416262
  misc_feature (196)..(196): Xaa is any aa, unknown or other
  misc_feature (197)..(197): Xaa is any aa, unknown or other
GSFDIVGLGAENQYFDTDNSGIQNQGYQNTTEVRTYNQAALTVRSHMKHDHVVLSSHASGTLNIHAANELHNQSSTSSQSWFNAALSALLDSVPSSPALAAEIENTVINRTLQRISSFRPQQTAGEENTFINRTLQHISSFRSQQATGEEPGTPSIQVTRGGRLMFISLLVILASVIWTFTSGSALNFCKGLWKSXXT

SEQ ID NO: 917 - protein, 152 aa, Zea mays subsp. mays
  peptide (1)..(152): Ceres Seq. ID no. 12416263
  misc_feature (150)..(150): Xaa is any aa, unknown or other
  misc_feature (151)..(151): Xaa is any aa, unknown or other
MKHDHVVLSSHASGTLNIHAANELHNQSSTSSQSWFNAALSALLDSVPSSPALAAEIENTVINRTLQRISSFRPQQTAGEENTFINRTLQHISSFRSQQATGEEPGTPSIQVTRGGRLMFISLLVILASVIWTFTSGSALNFCKGLWKSXXT

SEQ ID NO: 918 - DNA, 680 bp, Zea mays subsp. mays
  misc_feature (1)..(680): Ceres Seq. ID no. 12366342
  misc_feature: MA Experiment ID: 20000487 Result: Up-regulated in Transcription
  misc_feature: MA Experiment 20000487 PARAMETER Experiment Name: Zm_50mM_NH4NO3_L_to_H_P Parameter: Organism Value: Zea mays
  misc_feature: MA Experiment 20000487 PARAMETER Experiment Name: Zm_50mM_NH4NO3_L_to_H_P Parameter: Timepoint (hr) Value: 4
  misc_feature: MA Experiment 20000487 PARAMETER Experiment Name: Zm_50mM_NH4NO3_L_to_H_P Parameter: Tissue Value: Leaves
  misc_feature: MA Experiment 20000487 PARAMETER Experiment Name: Zm_50mM_NH4NO3_L_to_H_P Parameter: Treatment Value: 50mM NH4NO3 vs. 100mM Mannitol
tcactgatatcaatgtgtaaaacatcacttatttgcagctaaatggagtatatcattactatacctttgtctttttatatttatataaaaacacaatcgaatggagtccattcgtttcattgaacttgtctttgatgctatgaatgtttagtcacatgtagcagtttatgccctggtgtattaagagggtgcactaactgtgcttgttgattccctgttttctattaagtctaagttctgtttatatggatttttgtatgtatgattgcattgttctttgtatgaggctgcatatggcgaggcgatgtctagtcagcacggaccatactatgactagaggacctcacctattgatccccaggctgtgtatgcaagtggtggaaaagctcatggaaggtacacaatgtttgctaacgtcatcgacttgagccaggtgagggttcagcgtggaggtttgtcgaggtctgctgctcgtagctcccgtcgctccactcaagatccagcaaaagtggagcaactgcgcgaagaacttaggcgaaatcctcttcgctagtggaggtatcgaccatcactcgtcactgtaacccgatggtgatcgacgaccatgagcttccatgttattgtgttctgatacttgagaattttattatgagtatgatgatgagatgtgtcttattatg

SEQ ID NO: 919 - protein, 60 aa, Zea mays subsp. mays
  peptide (1)..(60): Ceres Seq. ID no. 12366343
MDFCMYDCIVLCMRLHMARRCLVSTDHTMTRGPHLLIPRLCMQVVEKLMEGTQCLLTSST

SEQ ID NO: 920 - protein, 56 aa, Zea mays subsp. mays
  peptide (1)..(56): Ceres Seq. ID no. 12366344
MYDCIVLCMRLHMARRCLVSTDHTMTRGPHLLIPRLCMQVVEKLMEGTQCLLTSST

SEQ ID NO: 921 - protein, 49 aa, Zea mays subsp. mays
  peptide (1)..(49): Ceres Seq. ID no. 12366345
MFANVIDLSQVRVQRGGLSRSAARSSRRSTQDPAKVEQLREELRRNPLR

SEQ ID NO: 922 - DNA, 840 bp, Zea mays subsp. mays
  misc_feature (1)..(840): Ceres Seq. ID no. 12416571
  misc_feature: MA Experiment ID: 108529 Result: Down-regulated in Transcription
  misc_feature: MA Experiment 108529 PARAMETER Experiment Name: Zm_Imbibed_Seeds_P Parameter: Age (day) Value: 5 vs. 2
  misc_feature: MA Experiment 108529 PARAMETER Experiment Name: Zm_Imbibed_Seeds_P Parameter: Organism Value: Zea mays
  misc_feature: MA Experiment 108529 PARAMETER Experiment Name: Zm_Imbibed_Seeds_P Parameter: Plant Line Value: 35A19
  misc_feature: MA Experiment 108529 PARAMETER Experiment Name: Zm_Imbibed_Seeds_P Parameter: Tissue Value: Roots vs. Embryo
  misc_feature: MA Experiment ID: 108530 Result: Down-regulated in Transcription
  misc_feature: MA Experiment 108530 PARAMETER Experiment Name: Zm_Imbibed_Seeds_P Parameter: Age (day) Value: 6 vs. 2
  misc_feature: MA Experiment 108530 PARAMETER Experiment Name: Zm_Imbibed_Seeds_P Parameter: Organism Value: Zea mays
  misc_feature: MA Experiment 108530 PARAMETER Experiment Name: Zm_Imbibed_Seeds_P Parameter: Plant Line Value: 35A19
  misc_feature: MA Experiment 108530 PARAMETER Experiment Name: Zm_Imbibed_Seeds_P Parameter: Tissue Value: Aerial vs. Embryo
  misc_feature: MA Experiment ID: 108533 Result: Down-regulated in Transcription
  misc_feature: MA Experiment 108533 PARAMETER Experiment Name: Zm_4deg_Cold_P Parameter: Age (hr) Value: 8
  misc_feature: MA Experiment 108533 PARAMETER Experiment Name: Zm_4deg_Cold_P Parameter: Organism Value: Zea mays
  misc_feature: MA Experiment 108533 PARAMETER Experiment Name: Zm_4deg_Cold_P Parameter: Plant Line Value: 35A19
  misc_feature: MA Experiment 108533 PARAMETER Experiment Name: Zm_4deg_Cold_P Parameter: Temperature (deg C) Value: 4 vs. 22
  misc_feature: MA Experiment 108533 PARAMETER Experiment Name: Zm_4deg_Cold_P Parameter: Timepoint (hr) Value: 1
  misc_feature: MA Experiment 108533 PARAMETER Experiment Name: Zm_4deg_Cold_P Parameter: Tissue Value: Aerial
  misc_feature: MA Experiment ID: 108534 Result: Down-regulated in Transcription
  misc_feature: MA Experiment 108534 PARAMETER Experiment Name: Zm_4deg_Cold_P Parameter: Age (hr) Value: 8
  misc_feature: MA Experiment 108534 PARAMETER Experiment Name: Zm_4deg_Cold_P Parameter: Organism Value: Zea mays
  misc_feature: MA Experiment 108534 PARAMETER Experiment Name: Zm_4deg_Cold_P Parameter: Plant Line Value: 35A19
  misc_feature: MA Experiment 108534 PARAMETER Experiment Name: Zm_4deg_Cold_P Parameter: Temperature (deg C) Value: 4 vs. 22
  misc_feature: MA Experiment 108534 PARAMETER Experiment Name: Zm_4deg_Cold_P Parameter: Timepoint (hr) Value: 6
  misc_feature: MA Experiment 108534 PARAMETER Experiment Name: Zm_4deg_Cold_P Parameter: Tissue Value: Aerial
  misc_feature: MA Experiment ID: 108535 Result: Up-regulated in Transcription
  misc_feature: MA Experiment 108535 PARAMETER Experiment Name: Zm_Meristem_P Parameter: Age (day) Value: 8
  misc_feature: MA Experiment 108535 PARAMETER Experiment Name: Zm_Meristem_P Parameter: Organism Value: Zea mays
  misc_feature: MA Experiment 108535 PARAMETER Experiment Name: Zm_Meristem_P Parameter: Plant Line Value: 35A19
  misc_feature: MA Experiment 108535 PARAMETER Experiment Name: Zm_Meristem_P Parameter: Tissue Value: Root Meristem vs. Above Root Meristem
  misc_feature: MA Experiment ID: 108544 Result: Down-regulated in Transcription
  misc_feature: MA Experiment ID: 108556 Result: Down-regulated in Transcription
  misc_feature: MA Experiment 108556 PARAMETER Experiment Name: Zm_Drought_P Parameter: Age (day) Value: 9
  misc_feature: MA Experiment 108556 PARAMETER Experiment Name: Zm_Drought_P Parameter: Organism Value: Zea mays
  misc_feature: MA Experiment 108556 PARAMETER Experiment Name: Zm_Drought_P Parameter: Plant Line Value: 35A19
  misc_feature: MA Experiment 108556 PARAMETER Experiment Name: Zm_Drought_P Parameter: Timepoint (hr) Value: 24
  misc_feature: MA Experiment 108556 PARAMETER Experiment Name: Zm_Drought_P Parameter: Tissue Value: Aerial
  misc_feature: MA Experiment 108556 PARAMETER Experiment Name: Zm_Drought_P Parameter: Treatment Value: Drought vs. No Drought
  misc_feature: MA Experiment ID: 20000487 Result: Up-regulated in Transcription
  misc_feature: MA Experiment 20000487 PARAMETER Experiment Name: Zm_50mM_NH4NO3_L_to_H_P Parameter: Organism Value: Zea mays
  misc_feature: MA Experiment 20000487 PARAMETER Experiment Name: Zm_50mM_NH4NO3_L_to_H_P Parameter: Timepoint (hr) Value: 4
  misc_feature: MA Experiment 20000487 PARAMETER Experiment Name: Zm_50mM_NH4NO3_L_to_H_P Parameter: Tissue Value: Leaves
  misc_feature: MA Experiment 20000487 PARAMETER Experiment Name: Zm_50mM_NH4NO3_L_to_H_P Parameter: Treatment Value: 50mM NH4NO3 vs. 100mM Mannitol
  misc_feature: MA Experiment ID: 20000488 Result: Up-regulated in Transcription
  misc_feature: MA Experiment 20000488 PARAMETER Experiment Name: Zm_50mM_NH4NO3_L_to_H_P Parameter: Organism Value: Zea mays
  misc_feature: MA Experiment 20000488 PARAMETER Experiment Name: Zm_50mM_NH4NO3_L_to_H_P Parameter: Timepoint (hr) Value: 8
  misc_feature: MA Experiment 20000488 PARAMETER Experiment Name: Zm_50mM_NH4NO3_L_to_H_P Parameter: Tissue Value: Leaves
  misc_feature: MA Experiment 20000488 PARAMETER Experiment Name: Zm_50mM_NH4NO3_L_to_H_P Parameter: Treatment Value: 50mM NH4NO3 vs. 100mM Mannitol
  misc_feature: MA Experiment ID: 20000626 Result: Up-regulated in Transcription
  misc_feature: MA Experiment 20000626 PARAMETER Experiment Name: Zm_Herbicide-Treatments_P Parameter: Timepoint (hr) Value: 12
  misc_feature: MA Experiment 20000626 PARAMETER Experiment Name: Zm_Herbicide-Treatments_P Parameter: Tissue Value: Aerial
  misc_feature: MA Experiment 20000626 PARAMETER Experiment Name: Zm_Herbicide-Treatments_P Parameter: Treatment Value: Roundup vs. No Treatment
  misc_feature: MA Experiment ID: 20001605 Result: Up-regulated in Transcription
  misc_feature: MA Experiment 20001605 PARAMETER Experiment Name: Zm_50ppm_KNO3_L-to-H_P Parameter: Age (day) Value: 19
  misc_feature: MA Experiment 20001605 PARAMETER Experiment Name: Zm_50ppm_KNO3_L-to-H_P Parameter: Organism Value: Zea mays
  misc_feature: MA Experiment 20001605 PARAMETER Experiment Name: Zm_50ppm_KNO3_L-to-H_P Parameter: Plant Line Value: 35A19
  misc_feature: MA Experiment 20001605 PARAMETER Experiment Name: Zm_50ppm_KNO3_L-to-H_P Parameter: Timepoint (hr) Value: 4
  misc_feature: MA Experiment 20001605 PARAMETER Experiment Name: Zm_50ppm_KNO3_L-to-H_P Parameter: Tissue Value: Shoots
  misc_feature: MA Experiment 20001605 PARAMETER Experiment Name: Zm_50ppm_KNO3_L-to-H_P Parameter: Treatment Value: 50ppm KNO3 vs. 50ppm KCl
aaaaaggcaactgctcgccgccgtttcttttagtcacggcgccgcagcaggaaaccagaagccttgcattgctggccatggcgtcgatctccctccctcctttatcttcgcatgcgtcggctagttgcgggggaggcgttccactcccggggagtcgtctccgcccagggcacgcccaaggccattcgggatgaagacgccgttagattctcctgcattcgtgtggagtcccgccgcggccgacgcgaaggaaggaggagccggagttggagacctccatcgcagcactggctctgtacttggagtgggggtcggcagcggtggctgactcgcccagttggttggcggaacgactgccaacggcaccgcgtcgaggatgtctggcgactgcggtcctcctcgtattgggatccagatgcggagcggtggtgcccaacggcgaggcgggttccggcgtcgaggtgggatccagcgtcgaggcggtccccaacggcgaggacccaccgggatgcggcggggcggtgctatccgccccgtcaacaagatcttgcattgctcggtcgagtgcacggcgcagagaagaaatgttgaagatgccatggcgagaggcttcaatccagtcgtcgttcactgcggcgacaaggtggttcaccacaaattcacgctggtacagaggcattttcttaccgttcttctttccctgttcgtctgttcttcttctggcgagagcgggtggcgagagcgggtgctgataacgtgttagaaaaagaagggactgaagcaaatgatgcgtaactttttcattcaatgatggtgtgtatttatacatagtgaaacgac

SEQ ID NO: 923 - protein, 159 aa, Zea mays subsp. mays
  peptide (1)..(159): Ceres Seq. ID no. 12416572
MRRLVAGEAFHSRGVVSAQGTPKAIRDEDAVRFSCIRVESRRGRREGRRSRSWRPPSQHWLCTWSGGRQRWLTRPVGWRNDCQRHRVEDVWRLRSSSYWDPDAERWCPTARRVPASRWDPASRRSPTARTHRDAAGRCYPPRQQDLALLGRVHGAEKKC

SEQ ID NO: 924 - protein, 128 aa, Zea mays subsp. mays
  peptide (1)..(128): Ceres Seq. ID no. 12416573
MSGDCGPPRIGIQMRSGGAQRRGGFRRRGGIQRRGGPQRRGPTGMRRGGAIRPVNKILHCSVECTAQRRNVEDAMARGFNPVVVHCGDKVVHHKFTLVQRHFLTVLLSLFVCSSSGESGWRERVLITC

SEQ ID NO: 925 - protein, 115 aa, Zea mays subsp. mays
  peptide (1)..(115): Ceres Seq. ID no. 12416574
MRSGGAQRRGGFRRRGGIQRRGGPQRRGPTGMRRGGAIRPVNKILHCSVECTAQRRNVEDAMARGFNPVVVHCGDKVVHHKFTLVQRHFLTVLLSLFVCSSSGESGWRERVLITC

SEQ ID NO: 926 - DNA, 793 bp, Zea mays subsp. mays
  misc_feature (1)..(793): Ceres Seq. ID no. 12416305
  misc_feature: MA Experiment ID: 108522 Result: Up-regulated in Transcription
  misc_feature: MA Experiment 108522 PARAMETER Experiment Name: Zm_42deg_Heat_P Parameter: Age (day) Value: 8
  misc_feature: MA Experiment 108522 PARAMETER Experiment Name: Zm_42deg_Heat_P Parameter: Organism Value: Zea mays
  misc_feature: MA Experiment 108522 PARAMETER Experiment Name: Zm_42deg_Heat_P Parameter: Plant Line Value: 35A19
  misc_feature: MA Experiment 108522 PARAMETER Experiment Name: Zm_42deg_Heat_P Parameter: Temperature (deg C) Value: 42 vs. 22
  misc_feature: MA Experiment 108522 PARAMETER Experiment Name: Zm_42deg_Heat_P Parameter: Timepoint (hr) Value: 1
  misc_feature: MA Experiment 108522 PARAMETER Experiment Name: Zm_42deg_Heat_P Parameter: Tissue Value: Aerial
aagtggcaacagacggagcaaacgcagtcctctcgtcactgctcggaccaggtgatgtccaccatgccgacgttctggtcgagtcccagggcgtcccacaccgccggcgaggcgtcgacgatgttgttgtcgcacggcggctcgaaggtgtgctcgtcgtcgcagccgtgcacggagtcgcactcgtccaccaccttggcgtacacggagttgccgttggcggcgctgatcttgatccggtggccgcagcgcgccatgttgctgaaccagcccgtggagagcgccaccaccttctcctggtcgctgtggtacgcgttgtcgcactccgagggggccgccgccgtccttgcccttctcgaagctgttgagcgtcagcacggccctggtgctcgccgtgaccggcggcgagcagcggtactgcgggtacatcttgccgtcctcgcagcagtccgggtcgttgctcttctcgcagttgccggagcggcccgggaggtacccgctggcgcggcacgtgccgaggctggcgccagggcggagagaggacnccgtgtggggtgcggagagcgcgaccaggaggaacatgaacatggcggcggctacagctcctacaccggccatctttgcttgcctgcagattttgtgctcgaggatcgagccccttctcactctgttctttttccttccttccttcctttctttctttctttctttctttcttgtgctctgctttgcttgatggttttgttagattacttgtgcatgggattatatatagtggccgtgccctcttgtt

SEQ ID NO: 927 - protein, 264 aa, Zea mays subsp. mays
  peptide (1)..(264): Ceres Seq. ID no. 12416306
  misc_feature (182)..(182): Xaa is any aa, unknown or other
KWQQTEQTQSSRHCSDQVMSTMPTFWSSPRASHTAGEASTMLLSHGGSKVCSSSQPCTESHSSTTLAYTELPLAALILIRWPQRAMLLNQPVESATTFSWSLWYALSHSEGAAAVLALLEAVERQHGPGARRDRRRAAVLRVHLAVLAAVRVVALLAVAGAAREVPAGAARAEAGARAERGXRVGCGERDQEEHEHGGGYSSYTGHLCLPADFVLEDRAPSHSVLFPSFLPFFLSFFLSCALLCLMVLLDYLCMGLYIVAVPSC

SEQ ID NO: 928 - protein, 246 aa, Zea mays subsp. mays
  peptide (1)..(246): Ceres Seq. ID no. 12416307
  misc_feature (164)..(164): Xaa is any aa, unknown or other
MSTMPTFWSSPRASHTAGEASTMLLSHGGSKVCSSSQPCTESHSSTTLAYTELPLAALILIRWPQRAMLLNQPVESATTFSWSLWYALSHSEGAAAVLALLEAVERQHGPGARRDRRRAAVLRVHLAVLAAVRVVALLAVAGAAREVPAGAARAEAGARAERGXRVGCGERDQEEHEHGGGYSSYTGHLCLPADFVLEDRAPSHSVLFPSFLPFFLSFFLSCALLCLMVLLDYLCMGLYIVAVPSC

SEQ ID NO: 929 - protein, 243 aa, Zea mays subsp. mays
  peptide (1)..(243): Ceres Seq. ID no. 12416308
  misc_feature (161)..(161): Xaa is any aa, unknown or other
MPTFWSSPRASHTAGEASTMLLSHGGSKVCSSSQPCTESHSSTTLAYTELPLAALILIRWPQRAMLLNQPVESATTFSWSLWYALSHSEGAAAVLALLEAVERQHGPGARRDRRRAAVLRVHLAVLAAVRVVALLAVAGAAREVPAGAARAEAGARAERGXRVGCGERDQEEHEHGGGYSSYTGHLCLPADFVLEDRAPSHSVLFPSFLPFFLSFFLSCALLCLMVLLDYLCMGLYIVAVPSC

SEQ ID NO: 930 - DNA, 1012 bp, Zea mays subsp. mays
  misc_feature (1)..(1012): Ceres Seq. ID no. 12369675
  misc_feature: MA Experiment ID: 108523 Result: Down-regulated in Transcription
  misc_feature: MA Experiment 108523 PARAMETER Experiment Name: Zm_42deg_Heat_P Parameter: Age (day) Value: 8
  misc_feature: MA Experiment 108523 PARAMETER Experiment Name: Zm_42deg_Heat_P Parameter: Organism Value: Zea mays
  misc_feature: MA Experiment 108523 PARAMETER Experiment Name: Zm_42deg_Heat_P Parameter: Plant Line Value: 35A19
  misc_feature: MA Experiment 108523 PARAMETER Experiment Name: Zm_42deg_Heat_P Parameter: Temperature (deg C) Value: 42 vs. 22
  misc_feature: MA Experiment 108523 PARAMETER Experiment Name: Zm_42deg_Heat_P Parameter: Timepoint (hr) Value: 6
  misc_feature: MA Experiment 108523 PARAMETER Experiment Name: Zm_42deg_Heat_P Parameter: Tissue Value: Aerial
  misc_feature: MA Experiment ID: 108528 Result: Up-regulated in Transcription
  misc_feature: MA Experiment 108528 PARAMETER Experiment Name: Zm_Imbibed_Seeds_P Parameter: Age (day) Value: 5 vs. 2
  misc_feature: MA Experiment 108528 PARAMETER Experiment Name: Zm_Imbibed_Seeds_P Parameter: Organism Value: Zea mays
  misc_feature: MA Experiment 108528 PARAMETER Experiment Name: Zm_Imbibed_Seeds_P Parameter: Plant Line Value: 35A19
  misc_feature: MA Experiment 108528 PARAMETER Experiment Name: Zm_Imbibed_Seeds_P Parameter: Tissue Value: Aerial vs. Embryo
  misc_feature: MA Experiment ID: 108530 Result: Up-regulated in Transcription
  misc_feature: MA Experiment 108530 PARAMETER Experiment Name: Zm_Imbibed_Seeds_P Parameter: Age (day) Value: 6 vs. 2
  misc_feature: MA Experiment 108530 PARAMETER Experiment Name: Zm_Imbibed_Seeds_P Parameter: Organism Value: Zea mays
  misc_feature: MA Experiment 108530 PARAMETER Experiment Name: Zm_Imbibed_Seeds_P Parameter: Plant Line Value: 35A19
  misc_feature: MA Experiment 108530 PARAMETER Experiment Name: Zm_Imbibed_Seeds_P Parameter: Tissue Value: Aerial vs. Embryo
  misc_feature: MA Experiment ID: 108536 Result: Down-regulated in Transcription
  misc_feature: MA Experiment 108536 PARAMETER Experiment Name: Zm_Meristem_P Parameter: Age (day) Value: 8
  misc_feature: MA Experiment 108536 PARAMETER Experiment Name: Zm_Meristem_P Parameter: Organism Value: Zea mays
  misc_feature: MA Experiment 108536 PARAMETER Experiment Name: Zm_Meristem_P Parameter: Plant Line Value: 35A19
  misc_feature: MA Experiment 108536 PARAMETER Experiment Name: Zm_Meristem_P Parameter: Tissue Value: Shoot Meristem vs. Above Shoot Meristem
  misc_feature: MA Experiment ID: 108545 Result: Up-regulated in Transcription
  misc_feature: MA Experiment 108545 PARAMETER Experiment Name: Zm_Imbibed_Seeds_P Parameter: Age (day) Value: 3 vs. 2
  misc_feature: MA Experiment 108545 PARAMETER Experiment Name: Zm_Imbibed_Seeds_P Parameter: Organism Value: Zea mays
  misc_feature: MA Experiment 108545 PARAMETER Experiment Name: Zm_Imbibed_Seeds_P Parameter: Plant Line Value: 35A19
  misc_feature: MA Experiment 108545 PARAMETER Experiment Name: Zm_Imbibed_Seeds_P Parameter: Tissue Value: Aerial vs. Embryo
  misc_feature: MA Experiment ID: 108547 Result: Up-regulated in Transcription
  misc_feature: MA Experiment 108547 PARAMETER Experiment Name: Zm_Imbibed_Seeds_P Parameter: Age (day) Value: 4 vs. 2
  misc_feature: MA Experiment 108547 PARAMETER Experiment Name: Zm_Imbibed_Seeds_P Parameter: Organism Value: Zea mays
  misc_feature: MA Experiment 108547 PARAMETER Experiment Name: Zm_Imbibed_Seeds_P Parameter: Plant Line Value: 35A19
  misc_feature: MA Experiment 108547 PARAMETER Experiment Name: Zm_Imbibed_Seeds_P Parameter: Tissue Value: Aerial vs. Embryo
  misc_feature: MA Experiment ID: 108559 Result: Down-regulated in Transcription
  misc_feature: MA Experiment 108559 PARAMETER Experiment Name: Zm_5mM_NO_P Parameter: Age (day) Value: 8
  misc_feature: MA Experiment 108559 PARAMETER Experiment Name: Zm_5mM_NO_P Parameter: Organism Value: Zea mays
  misc_feature: MA Experiment 108559 PARAMETER Experiment Name: Zm_5mM_NO_P Parameter: Plant Line Value: 35A19
  misc_feature: MA Experiment 108559 PARAMETER Experiment Name: Zm_5mM_NO_P Parameter: Timepoint (hr) Value: 12
  misc_feature: MA Experiment 108559 PARAMETER Experiment Name: Zm_5mM_NO_P Parameter: Tissue Value: Aerial
  misc_feature: MA Experiment 108559 PARAMETER Experiment Name: Zm_5mM_NO_P Parameter: Treatment Value: 5mM NO vs. No Treatment
  misc_feature: MA Experiment ID: 108687 Result: Down-regulated in Transcription
  misc_feature: MA Experiment 108687 PARAMETER Experiment Name: Zm_Embryos-Flowers__P Parameter: Tissue Value: Embryo vs. Aerial+
  misc_feature: MA Experiment ID: 108688 Result: Down-regulated in Transcription
  misc_feature: MA Experiment 108688 PARAMETER Experiment Name: Zm_Embryos-Flowers__P Parameter: Tissue Value: Immature Flowers vs. Aerial+
  misc_feature: MA Experiment ID: 20000492 Result: Down-regulated in Transcription
  misc_feature: MA Experiment 20000492 PARAMETER Experiment Name: Zm_Hybrid_Seed_Dev_P Parameter: DAP Value: 12
  misc_feature: MA Experiment 20000492 PARAMETER Experiment Name: Zm_Hybrid_Seed_Dev_P Parameter: Organism Value: Zea mays
  misc_feature: MA Experiment 20000492 PARAMETER Experiment Name: Zm_Hybrid_Seed_Dev_P Parameter: Plant Line Value: 35A19
  misc_feature: MA Experiment 20000492 PARAMETER Experiment Name: Zm_Hybrid_Seed_Dev_P Parameter: Tissue Value: Fert Kernel vs. Unfert Floret
gagctccccgcggcagcaatggagaccctcctctccccctccacattgttcacgctaccactccgtggctccagcaggagaccgtctctggctgctagcgtctcgtccaggcccaccgtgtcctgctccagcgcgctcaagaggccacaggccggcgccgtcgctgcctcctcccatggagacggcgtcggcaggaactggatgtcgttcctgcaccacggcctggcggcggccgcgctgtcgctggccatcggcctgaccccggcgcccgcgcgcggcggtggcgtcggagttcgacgtgctgaacgacggggcccccgtggactcctacgtggtggacgacgccggcgtgctgagccgcgtcaccaagtccgacgtcaagcggcttgcccgcgacctcgaggcccgcaagaacatccgcctcaacttcatcaccgtccgcaagctcacgagcaaggctgacgcgttcgagtacgcggaccaagtcctggagaagtggtaccccacgattgaggagggcaacaacaagggcatcgtggtgctcgtcacaagccagaaggagggcgccgtcaccggggggcccgccttcatccaggccgtcggcgaccagattctcgacgccaccgtgtctgagaacctcccagtcctcgcgaccgacgagaagtacaacgaggcgatcttgagcacggcgaagcggctggcggcggcgatcgacgggctgccggacactggtggcccgtcgttcaaggagaacaagcgggagtccaacttcaagaccaaggaggagacggagganaagcgcgggcagttcacgctcgtcgtcggcggcctgctcgtcatcgccgtcgtcgtgcccatggcgcagtactacgcctacgtgtccaagaagtgagcgaaccatgaatatggcgtgctgtgtacagtaaatcagtaatgttataccgaagagggtttttttttaatctcccaggttgaagttcttcggtctgttggaattcttagaaatggacgg

SEQ ID NO: 931 - protein, 153 aa, Zea mays subsp. mays
  peptide (1)..(153): Ceres Seq. ID no. 12369676
ELPAAAMETLLSPSTLFTLPLRGSSRRPSLAASVSSRPTVSCSSALKRPQAGAVAASSHGDGVGRNWMSFLHHGLAAAALSLAIGLTPAPARGGGVGVRRAERRGPRGLLRGGRRRRAEPRHQVRRQAACPRPRGPQEHPPQLHHRPQAHEQG

SEQ ID NO: 932 - protein, 147 aa, Zea mays subsp. mays
  peptide (1)..(147): Ceres Seq. ID no. 12369677
METLLSPSTLFTLPLRGSSRRPSLAASVSSRPTVSCSSALKRPQAGAVAASSHGDGVGRNWMSFLHHGLAAAALSLAIGLTPAPARGGGVGVRRAERRGPRGLLRGGRRRRAEPRHQVRRQAACPRPRGPQEHPPQLHHRPQAHEQG

SEQ ID NO: 933 - protein, 86 aa, Zea mays subsp. mays
  peptide (1)..(86): Ceres Seq. ID no. 12369678
MSFLHHGLAAAALSLAIGLTPAPARGGGVGVRRAERRGPRGLLRGGRRRRAEPRHQVRRQAACPRPRGPQEHPPQLHHRPQAHEQG

SEQ ID NO: 934 - DNA, 1231 bp, Zea mays subsp. mays
  misc_feature (1)..(1231): Ceres Seq. ID no. 12364668
  misc_feature: MA Experiment ID: 108534 Result: Up-regulated in Transcription
  misc_feature: MA Experiment 108534 PARAMETER Experiment Name: Zm_4deg_Cold_P Parameter: Age (hr) Value: 8
  misc_feature: MA Experiment 108534 PARAMETER Experiment Name: Zm_4deg_Cold_P Parameter: Organism Value: Zea mays
  misc_feature: MA Experiment 108534 PARAMETER Experiment Name: Zm_4deg_Cold_P Parameter: Plant Line Value: 35A19
  misc_feature: MA Experiment 108534 PARAMETER Experiment Name: Zm_4deg_Cold_P Parameter: Temperature (deg C) Value: 4 vs. 22
  misc_feature: MA Experiment 108534 PARAMETER Experiment Name: Zm_4deg_Cold_P Parameter: Timepoint (hr) Value: 6
  misc_feature: MA Experiment 108534 PARAMETER Experiment Name: Zm_4deg_Cold_P Parameter: Tissue Value: Aerial
  misc_feature: MA Experiment ID: 20000492 Result: Down-regulated in Transcription
  misc_feature: MA Experiment 20000492 PARAMETER Experiment Name: Zm_Hybrid_Seed_Dev_P Parameter: DAP Value: 12
  misc_feature: MA Experiment 20000492 PARAMETER Experiment Name: Zm_Hybrid_Seed_Dev_P Parameter: Organism Value: Zea mays
  misc_feature: MA Experiment 20000492 PARAMETER Experiment Name: Zm_Hybrid_Seed_Dev_P Parameter: Plant Line Value: 35A19
  misc_feature: MA Experiment 20000492 PARAMETER Experiment Name: Zm_Hybrid_Seed_Dev_P Parameter: Tissue Value: Fert Kernel vs. Unfert Floret
  misc_feature: MA Experiment ID: 20000626 Result: Down-regulated in Transcription
  misc_feature: MA Experiment 20000626 PARAMETER Experiment Name: Zm_Herbicide-Treatments_P Parameter: Timepoint (hr) Value: 12
  misc_feature: MA Experiment 20000626 PARAMETER Experiment Name: Zm_Herbicide-Treatments_P Parameter: Tissue Value: Aerial
  misc_feature: MA Experiment 20000626 PARAMETER Experiment Name: Zm_Herbicide-Treatments_P Parameter: Treatment Value: Roundup vs. No Treatment
  misc_feature: MA Experiment ID: 20000629 Result: Down-regulated in Transcription
  misc_feature: MA Experiment 20000629 PARAMETER Experiment Name: Zm_Herbicide-Treatments_P Parameter: Timepoint (hr) Value: 12
  misc_feature: MA Experiment 20000629 PARAMETER Experiment Name: Zm_Herbicide-Treatments_P Parameter: Tissue Value: Aerial
  misc_feature: MA Experiment 20000629 PARAMETER Experiment Name: Zm_Herbicide-Treatments_P Parameter: Treatment Value: Trimec vs. No Treatment
gcacgagaccattacctagaacatcctaatcgaaaatgtttttttctacaggtgttttatgaattgcttttttacttcttgtttgatgtgaaatgaaatgccatgtggtatctgatgcctggtctcgtttcagtggcctcgcgtctcgtaagagtggcagacagtgatcggcgggttctttgcgacacgggctgctcttcgaccatgagcttcttgttactattcccccgcgacatttgtttggcatttctgttaacgattttctttgtttatattacactaaagtcaaagcctgaagccacgtcggcaactggatctaccattatgacataagcagaaatctaaataacacaaaaaaatcaggattactatatatttgtgcacaaagccacgaagaattgcatgaattgtggacaaagctgaaattcaaggatgctgaaagcctgcagcagacttctgacatggagagtgtgaatcttctccaaagtggggggccatgagatcaatgttgcctcggatcaatcacaaacaaggttgtctggatacacttcagttccatatacaagcttccctgcccaggcagagctaactgttgtaggttgcagcaaaggattggatgcaaaagggcgctggacacgtgctcgtgtggcccaagtgagcatgctaatcagccccttttggttccttgcacagcttacgttcaatctgtctctaagatacaccactgtcacggtaagtgttactaagaactgaatgatacttccatattttaaagccaaacctggcccaggcaccacccaggcaccagaggcctccaaacggtcaaggatacaccactgtcacggtcaagtcctgcagaagctgaaactgatcatggataagactttgccttgtgtcacaatgggtgcatttgctggtggtccttggatcaggttgctcatgggtggtgaatgatctgacgacttcagaagaggatagatctgagattacctttcatgcatgtcaaggaagttaagtagctgatgccatcaaagaaatggagaaacgtcaggtgaaccgcgagcagaattccgtggcgcatttgttagcgcagttagttaggactctgttcatacagctgttcgattaagccaaatacctgatttagttttatattggttgttgtcaaagaatttgtgaaatattgaggttgataatatatgtggcgttcgtttttatgtaatcattgtcc

SEQ ID NO: 935 - protein, 76 aa, Zea mays subsp. mays
  peptide (1)..(76): Ceres Seq. ID no. 12364669
MWYLMPGLVSVASRLVRVADSDRRVLCDTGCSSTMSFLLLFPRDICLAFLLTIFFVYITLKSKPEATSATGSTIMT

SEQ ID NO: 936 - protein, 72 aa, Zea mays subsp. mays
  peptide (1)..(72): Ceres Seq. ID no. 12364670
MPGLVSVASRLVRVADSDRRVLCDTGCSSTMSFLLLFPRDICLAFLLTIFFVYITLKSKPEATSATGSTIMT

SEQ ID NO: 937 - protein, 66 aa, Zea mays subsp. mays
  peptide (1)..(66): Ceres Seq. ID no. 12364671
MILPYFKAKPGPGTTQAPEASKRSRIHHCHGQVLQKLKLIMDKTLPCVTMGAFAGGPWIRLLMGGE

SEQ ID NO: 938 - DNA, 931 bp, Zea mays subsp. mays
  misc_feature (1)..(931): Ceres Seq. ID no. 12418204
  misc_feature: MA Experiment ID: 108522 Result: Up-regulated in Transcription
  misc_feature: MA Experiment 108522 PARAMETER Experiment Name: Zm_42deg_Heat_P Parameter: Age (day) Value: 8
  misc_feature: MA Experiment 108522 PARAMETER Experiment Name: Zm_42deg_Heat_P Parameter: Organism Value: Zea mays
  misc_feature: MA Experiment 108522 PARAMETER Experiment Name: Zm_42deg_Heat_P Parameter: Plant Line Value: 35A19
  misc_feature: MA Experiment 108522 PARAMETER Experiment Name: Zm_42deg_Heat_P Parameter: Temperature (deg C) Value: 42 vs. 22
  misc_feature: MA Experiment 108522 PARAMETER Experiment Name: Zm_42deg_Heat_P Parameter: Timepoint (hr) Value: 1
  misc_feature: MA Experiment 108522 PARAMETER Experiment Name: Zm_42deg_Heat_P Parameter: Tissue Value: Aerial
  misc_feature: MA Experiment ID: 20000480 Result: Down-regulated in Transcription
  misc_feature: MA Experiment 20000480 PARAMETER Experiment Name: Zm_Drought_P Parameter: Age (day) Value: 11
  misc_feature: MA Experiment 20000480 PARAMETER Experiment Name: Zm_Drought_P Parameter: Organism Value: Zea mays
  misc_feature: MA Experiment 20000480 PARAMETER Experiment Name: Zm_Drought_P Parameter: Plant Line Value: 35A19
  misc_feature: MA Experiment 20000480 PARAMETER Experiment Name: Zm_Drought_P Parameter: Timepoint (hr) Value: 72
  misc_feature: MA Experiment 20000480 PARAMETER Experiment Name: Zm_Drought_P Parameter: Tissue Value: Aerial
  misc_feature: MA Experiment 20000480 PARAMETER Experiment Name: Zm_Drought_P Parameter: Treatment Value: Drought vs. No Drought
  misc_feature: MA Experiment ID: 20000632 Result: Up-regulated in Transcription
  misc_feature: MA Experiment 20000632 PARAMETER Experiment Name: Zm_Herbicide-Treatments_P Parameter: Timepoint (hr) Value: 4
  misc_feature: MA Experiment 20000632 PARAMETER Experiment Name: Zm_Herbicide-Treatments_P Parameter: Tissue Value: Aerial
  misc_feature: MA Experiment 20000632 PARAMETER Experiment Name: Zm_Herbicide-Treatments_P Parameter: Treatment Value: Glean vs. No Treatment
ctcttcgtcctcgtgctctgccgctccgtgctacagggtttcctcgccttcgtggttttagggttcatgttcttcaccagaatccatcgggaaaaaagtcttttccccctacattttcgaccggaggctgtgtattgaagaaccttatccagttcgacgtcagtgccgccaatgctttcctcgatgcccacgccgcacataggcatcggtagctccgctgtgagccactacaacccctcgcacccaggttgtgattgaaggacatcttcacgctgctactttggatgacaaaaaatgccaattgttgttcacaaaatcacgctgggaactctgggacaacttcacgctaccaagtgattccattggttgtcgttgaaggacatctttatgctgctacctctacgaactcatctgtgaaaaagcaattgttcttcacgctggggactttaagaactctgtgacatcttcacgttgccaactctggtaacacaggtcatattcgtcctctgctgcagacaaagttcgtgagcaagaaacgagctattggaatttttccatacacaagacgttgataaacagatttcagctgaactcaataaagacagcctcgcgtcacctcctaagaagatcaagactgccctgctaggttntacacaccctgataaccttaatcattagatcatcaacggtctcatgatgttctcatgaaggtagtatgacctcgtcacttttagagcatggatgcttttgtgtatatataaccaaaccactgaaactttcgcagtgttgtatatattgaacagatctccagctgttgaatcttgctaatgatgtaatatataagtttgtacaaacccacgaacatgtatgttgactatgcagctaccgtaactgctataattatcacctctgcacaatgtgcaactctttc

SEQ ID NO: 939 - protein, 69 aa, Zea mays subsp. mays
  peptide (1)..(69): Ceres Seq. ID no. 12418205
LRPRALPLRATGFPRLRGFRVHVLHQNPSGKKSFPPTFSTGGCVLKNLIQFDVSAANAFLDAHAAHRHR

SEQ ID NO: 940 - protein, 58 aa, Zea mays subsp. mays
  peptide (1)..(58): Ceres Seq. ID no. 12418206
MTKNANCCSQNHAGNSGTTSRYQVIPLVVVEGHLYAATSTNSSVKKQLFFTLGTLRTL

SEQ ID NO: 941 - protein, 45 aa, Zea mays subsp. mays
  peptide (1)..(45): Ceres Seq. ID no. 12418207
LFVLVLCRSVLQGFLAFVVLGFMFFTRIHREKSLFPLHFRPEAVY

SEQ ID NO: 942 - DNA, 1004 bp, Zea mays subsp. mays
  misc_feature (1)..(1004): Ceres Seq. ID no. 12363503
  misc_feature: MA Experiment ID: 108689 Result: Down-regulated in Transcription
  misc_feature: MA Experiment 108689 PARAMETER Experiment Name: Zm_Drought_Roots_P Parameter: Age (day) Value: 9
  misc_feature: MA Experiment 108689 PARAMETER Experiment Name: Zm_Drought_Roots_P Parameter: Organism Value: Zea mays
  misc_feature: MA Experiment 108689 PARAMETER Experiment Name: Zm_Drought_Roots_P Parameter: Plant Line Value: 35A19
  misc_feature: MA Experiment 108689 PARAMETER Experiment Name: Zm_Drought_Roots_P Parameter: Timepoint (hr) Value: 24
  misc_feature: MA Experiment 108689 PARAMETER Experiment Name: Zm_Drought_Roots_P Parameter: Tissue Value: Roots
  misc_feature: MA Experiment 108689 PARAMETER Experiment Name: Zm_Drought_Roots_P Parameter: Treatment Value: Drought vs. No Drought
  misc_feature: MA Experiment ID: 20000479 Result: Down-regulated in Transcription
  misc_feature: MA Experiment 20000479 PARAMETER Experiment Name: Zm_Drought_P Parameter: Age (day) Value: 10
  misc_feature: MA Experiment 20000479 PARAMETER Experiment Name: Zm_Drought_P Parameter: Organism Value: Zea mays
  misc_feature: MA Experiment 20000479 PARAMETER Experiment Name: Zm_Drought_P Parameter: Plant Line Value: 35A19
  misc_feature: MA Experiment 20000479 PARAMETER Experiment Name: Zm_Drought_P Parameter: Timepoint (hr) Value: 48
  misc_feature: MA Experiment 20000479 PARAMETER Experiment Name: Zm_Drought_P Parameter: Tissue Value: Aerial
  misc_feature: MA Experiment 20000479 PARAMETER Experiment Name: Zm_Drought_P Parameter: Treatment Value: Drought vs. No Drought
gcacgagaccattacctagaacatcctaatcgaaaactgtgcacccccccagtcgccgcctcatcctcccatcgccatccacctagatcctcccatcacctcctcctcgtagggcgcccataggtagttcacagagcacggccggcgagcgtcgaggcagagccacgacttacccttgccgctccagtgaaggaggttgatatggccctgatggagaccccgacagcggccctcgacgttgtcgccgccgagcccgtgctggttccaccagtggtccaccacccagatgtggcccgcaaagacgagcaggaacggcggcagcgaggcgaggtggtagatccagcaccgctttggcacggccatccattcctccacccagagcgtgtacccaggcctgcctctcctcgaggaacgccgtcgaggtcgttcggctggagcagaaggcggcgtcgctcagcaagctggtcgaggagcagtgcgagagcatagacgatctcaagtccaaggctagtgctgatctccttccccgatttatgaactgcattgagtcgcgtgcgagtttcagttgttgataatttattcatggtggtaactagtgttggaaaactaaagtttacccccaccttttctgctgcatctacggacgaaaggatgaatctgcgacgcggagaaacagttactgcaggccacatcaataaaactgacaagcaaatataaggtggtgaaagtctctgctactttacaaggttcagtatgtaattaaaaaaagaatgatctggatatggatgtactgtctgtacataaactgctcgtcttggttccttcaggaatcataaaagcatatggaggaactatgtataggctacaaagaagcataagaagcatttttatagcagaagccaagtgttttgatgattttgtttttttcaattgtgttttctgttattggttcagcatgcacatatattgacatgatttatggcatggcatctgccatctttgtc

SEQ ID NO: 943 - protein, 95 aa, Zea mays subsp. mays
  peptide (1)..(95): Ceres Seq. ID no. 12363504
MALMETPTAALDVVAAEPVLVPPVVHHPDVARKDEQERRQRGEVVDPAPLWHGHPFLHPERVPRPASPRGTPSRSFGWSRRRRRSASWSRSSARA

SEQ ID NO: 944 - protein, 92 aa, Zea mays subsp. mays
  peptide (1)..(92): Ceres Seq. ID no. 12363505
METPTAALDVVAAEPVLVPPVVHHPDVARKDEQERRQRGEVVDPAPLWHGHPFLHPERVPRPASPRGTPSRSFGWSRRRRRSASWSRSSARA

SEQ ID NO: 945 - protein, 62 aa, Zea mays subsp. mays
  peptide (1)..(62): Ceres Seq. ID no. 12363506
MDVLSVHKLLVLVPSGIIKAYGGTMYRLQRSIRSIFIAEAKCFDDFVFFNCVFCYWFSMHIY

SEQ ID NO: 946 - DNA, 2056 bp, Zea mays subsp. mays
  misc_feature (1)..(2056): Ceres Seq. ID no. 12418187
  misc_feature: MA Experiment ID: 108523 Result: Up-regulated in Transcription
  misc_feature: MA Experiment 108523 PARAMETER Experiment Name: Zm_42deg_Heat_P Parameter: Age (day) Value: 8
  misc_feature: MA Experiment 108523 PARAMETER Experiment Name: Zm_42deg_Heat_P Parameter: Organism Value: Zea mays
  misc_feature: MA Experiment 108523 PARAMETER Experiment Name: Zm_42deg_Heat_P Parameter: Plant Line Value: 35A19
  misc_feature: MA Experiment 108523 PARAMETER Experiment Name: Zm_42deg_Heat_P Parameter: Temperature (deg C) Value: 42 vs. 22
  misc_feature: MA Experiment 108523 PARAMETER Experiment Name: Zm_42deg_Heat_P Parameter: Timepoint (hr) Value: 6
  misc_feature: MA Experiment 108523 PARAMETER Experiment Name: Zm_42deg_Heat_P Parameter: Tissue Value: Aerial
gcacgagaccattacctagaacatcctaatcgaaaaatgtggatgacgaggagggcctactcaatttactttattgcttggccggcgccggcgacgtcgcacgccaccgatggatcctatacagcgcactcactgctgcgctccggcggcggctgctgcctgcgccacgctcggcgacgcctggcgcttgacgagcttggtgaaggaggtgccctccacctcgaagtcgtcgtagcgccggaacagctcggccagcagcatgcacgccgtgtccaccaccacctccttggcggcgcactgcttgttcccgggcccgggctgcgccgtctccggcccgttggaccagaagaggtgctgcagcagcctggcgccgtcgtcgccgaggaagcgttccggcacgaactcctcgggccgctcgaacacctcggggtcccgcatcgccagcggctggtacccgcacagcacctcgcccgcggacacctggtacgcggcgccgccgtgggagcgcagcacgaagtccctgcgcgcgcgcccgaactgcagcggcacgggcggctgcatccgcagcatctcgtacaccgtcgaccgcaccagcggcatgccctcgcggacggtggcgaacccgaactcgccgtctttgcccaccatggcgcgccgcacctcgtcacgcaggcgctcgcgcagcgccgacgcgccgccgaccttggccacgaggaagggcaggaacacggagaagccgccgaaggcgttgaagccgagcacgaacaggatgttgttgatggcgtccttcttgccgatgccgtgctgcgcctcggcgtaggccacggcctcggcgccgtgcttctcgatgaagcggtagagcacgtagtagcccggccagatgaggaaggagggcagcgggaaggagtggatgagcagctcctccagcggctggacgaggccgatcttctgcgtgggcaggatctgcagcgccagccagatgtccaggatggtgaagccgaagttgtccaccagccagtcggcggacgggtcggcgcccacgaacgccttgcagaggaaccggaagatgcactgctgcagggggacgaggtagctggcggagggcttcttgtcgctgccgtcgtccttgccgaactccgcgtccacggcgtccagcatggcgccgacgctcgcgcggaagtcggcggaccaggtgcgggcggagcggtggaggaggtccatggcgaaggtcttgacgcgcgcgtgctcctcctcctgcgtgtcgaggtacacgccgacgcgcgtcccgccggtgaagccggcgcccgggttatagggcccgatgaggatgtcgcgcttgtccacgaggtccgggtcgaagagcgcggtgaaggcggcggcgtccacgatggcgaccacgcgcgggtccacgcccacgaagaaggggaaggtgggcgggatgttggtgcggaacacggtgctgcggtgtgccgccgcgcgcttccggaagaactcgtcctggctctggaaccagaagtagtcgagccggtcccgtagcgggcccagcaccggtggcccgtagctgcctggtatcggccgcggcggaggcgtcaccgaggccgcggcgctcgccgtcggcgacacgaaggacggcagcatggctagctagctgctgctaagtcgctgactggctggcttgctatgctagctatagctatctcccgtgtgtggtggtggtgagctcagctcagctcagctcacagctccatcgatggatcatcaccttccgatccgttatgtaatgtagccgggaaggagcgaggcaagagcgtgacagcgactacaacaagtgtccagcgtgtggaacgtgtgggacatccaagctaggcagcatacacaagcaacaaggagccggcacgttgccatattctgccgacgaggacagcgccaccatgctaggcagccatgtcattggtccacacctttcatatttgttttcattttaaaaaatagtggtatcacaatgctgcaagataaggtgtacttgctaggaaaaaacggcacatatttaagttgt

SEQ ID NO: 947 - protein, 511 aa, Zea mays subsp. mays
  peptide (1)..(511): Ceres Seq. ID no. 12418188
ARDHYLEHPNRKMWMTRRAYSIYFIAWPAPATSHATDGSYTAHSLLRSGGGCCLRHARRRLALDELGEGGALHLEVVVAPEQLGQQHARRVHHHLLGGALLVPGPGLRRLRPVGPEEVLQQPGAVVAEEAFRHELLGPLEHLGVPHRQRLVPAQHLARGHLVRGAAVGAQHEVPARAPELQRHGRLHPQHLVHRRPHQRHALADGGEPELAVFAHHGAPHLVTQALAQRRRAADLGHEEGQEHGEAAEGVEAEHEQDVVDGVLLADAVLRLGVGHGLGAVLLDEAVEHVVARPDEEGGQREGVDEQLLQRLDEADLLRGQDLQRQPDVQDGEAEVVHQPVGGRVGAHERLAEEPEDALLQGDEVAGGGLLVAAVVLAELRVHGVQHGADARAEVGGPGAGGAVEEVHGEGLDARVLLLLRVEVHADARPAGEAGARVIGPDEDVALVHEVRVEERGEGGGVHDGDHARVHAHEEGEGGRDVGAEHGAAVCRRALPEELVLALEPEVVEPVP

SEQ ID NO: 948 - protein, 499 aa, Zea mays subsp. mays
  peptide (1)..(499): Ceres Seq. ID no. 12418189
MWMTRRAYSIYFIAWPAPATSHATDGSYTAHSLLRSGGGCCLRHARRRLALDELGEGGALHLEVVVAPEQLGQQHARRVHHHLLGGALLVPGPGLRRLRPVGPEEVLQQPGAVVAEEAFRHELLGPLEHLGVPHRQRLVPAQHLARGHLVRGAAVGAQHEVPARAPELQRHGRLHPQHLVHRRPHQRHALADGGEPELAVFAHHGAPHLVTQALAQRRRAADLGHEEGQEHGEAAEGVEAEHEQDVVDGVLLADAVLRLGVGHGLGAVLLDEAVEHVVARPDEEGGQREGVDEQLLQRLDEADLLRGQDLQRQPDVQDGEAEVVHQPVGGRVGAHERLAEEPEDALLQGDEVAGGGLLVAAVVLAELRVHGVQHGADARAEVGGPGAGGAVEEVHGEGLDARVLLLLRVEVHADARPAGEAGARVIGPDEDVALVHEVRVEERGEGGGVHDGDHARVHAHEEGEGGRDVGAEHGAAVCRRALPEELVLALEPEVVEPVP

SEQ ID NO: 949 - protein, 497 aa, Zea mays subsp. mays
  peptide (1)..(497): Ceres Seq. ID no. 12418190
MTRRAYSIYFIAWPAPATSHATDGSYTAHSLLRSGGGCCLRHARRRLALDELGEGGALHLEVVVAPEQLGQQHARRVHHHLLGGALLVPGPGLRRLRPVGPEEVLQQPGAVVAEEAFRHELLGPLEHLGVPHRQRLVPAQHLARGHLVRGAAVGAQHEVPARAPELQRHGRLHPQHLVHRRPHQRHALADGGEPELAVFAHHGAPHLVTQALAQRRRAADLGHEEGQEHGEAAEGVEAEHEQDVVDGVLLADAVLRLGVGHGLGAVLLDEAVEHVVARPDEEGGQREGVDEQLLQRLDEADLLRGQDLQRQPDVQDGEAEVVHQPVGGRVGAHERLAEEPEDALLQGDEVAGGGLLVAAVVLAELRVHGVQHGADARAEVGGPGAGGAVEEVHGEGLDARVLLLLRVEVHADARPAGEAGARVIGPDEDVALVHEVRVEERGEGGGVHDGDHARVHAHEEGEGGRDVGAEHGAAVCRRALPEELVLALEPEVVEPVP

SEQ ID NO: 950 - DNA, 768 bp, Zea mays subsp. mays
  misc_feature (1)..(768): Ceres Seq. ID no. 12360608
  misc_feature: MA Experiment ID: 108522 Result: Up-regulated in Transcription
  misc_feature: MA Experiment 108522 PARAMETER Experiment Name: Zm_42deg_Heat_P Parameter: Age (day) Value: 8
  misc_feature: MA Experiment 108522 PARAMETER Experiment Name: Zm_42deg_Heat_P Parameter: Organism Value: Zea mays
  misc_feature: MA Experiment 108522 PARAMETER Experiment Name: Zm_42deg_Heat_P Parameter: Plant Line Value: 35A19
  misc_feature: MA Experiment 108522 PARAMETER Experiment Name: Zm_42deg_Heat_P Parameter: Temperature (deg C) Value: 42 vs. 22
  misc_feature: MA Experiment 108522 PARAMETER Experiment Name: Zm_42deg_Heat_P Parameter: Timepoint (hr) Value: 1
  misc_feature: MA Experiment 108522 PARAMETER Experiment Name: Zm_42deg_Heat_P Parameter: Tissue Value: Aerial
  misc_feature: MA Experiment ID: 20000535 Result: Up-regulated in Transcription
  misc_feature: MA Experiment 20000535 PARAMETER Experiment Name: Zm_Hybrid_Seed_Dev_P Parameter: DAP Value: 30 vs. 12
  misc_feature: MA Experiment 20000535 PARAMETER Experiment Name: Zm_Hybrid_Seed_Dev_P Parameter: Organism Value: Zea mays
  misc_feature: MA Experiment 20000535 PARAMETER Experiment Name: Zm_Hybrid_Seed_Dev_P Parameter: Plant Line Value: 35A19
  misc_feature: MA Experiment 20000535 PARAMETER Experiment Name: Zm_Hybrid_Seed_Dev_P Parameter: Tissue Value: Embryo vs. Unfert Floret
atcaatggacgacgcaaacgcaaacttctttgctgctcgctctagttttcgagctgtgtgtgcatcggtttgtgttcaaagcttaatttttcattgggaaaaacttattagagcagcagcgaacgcgcgcaccttgacgctgatggagtagaggacaagggcgtccagcgtggtgacgctgaggtggagcacggcgaggcggagcgcctggagcgcggtgaccaggcagacgagctgcccgggcctccgcgccgtcatcacgcggatgctaccgtgcgcctccaccaaggccacctcgacgtcggccacccccaaccgccggccgtcctcctcctcctccgctgccgccgccgcagcagcaccgcgcgccgagtggcaccacaggtactgcgggtacgtgaagaaccgcgcgaacggggccggccgcgcgtggcccgccgcgtcctccgtcacgctgctgctgctgctgcagttgctcgtcgacgccgccgcggaatccacgcggatcttggtgctgctgctgctggcgtgcgctggcgtcgcgtcaggcttcgccgccgccggaacgtgcagcagcttccgcttctgcgcctcgaggcactgcagctgctgctccagctccctcacgaacacgattgcccctcccacgatggaagcttggtccccctgcgaacgttttcgaaaccgttagttttgccaggatttgccgatttattatctggactatggacagacatgcagtgacattatttgccgatttaattaact

SEQ ID NO: 951 - protein, 141 aa, Zea mays subsp. mays
  peptide (1)..(141): Ceres Seq. ID no. 12360609
MLPCASTKATSTSATPNRRPSSSSSAAAAAAAPRAEWHHRYCGYVKNRANGAGRAWPAASSVTLLLLLQLLVDAAAESTRILVLLLLACAGVASGFAAAGTCSSFRFCASRHCSCCSSSLTNTIAPPTMEAWSPCERFRNR

SEQ ID NO: 952 - DNA, 1002 bp, Zea mays subsp. mays
  misc_feature (1)..(1002): Ceres Seq. ID no. 12387989
  misc_feature: MA Experiment ID: 20000492 Result: Up-regulated in Transcription
  misc_feature: MA Experiment 20000492 PARAMETER Experiment Name: Zm_Hybrid_Seed_Dev_P Parameter: DAP Value: 12
  misc_feature: MA Experiment 20000492 PARAMETER Experiment Name: Zm_Hybrid_Seed_Dev_P Parameter: Organism Value: Zea mays
  misc_feature: MA Experiment 20000492 PARAMETER Experiment Name: Zm_Hybrid_Seed_Dev_P Parameter: Plant Line Value: 35A19
  misc_feature: MA Experiment 20000492 PARAMETER Experiment Name: Zm_Hybrid_Seed_Dev_P Parameter: Tissue Value: Fert Kernel vs. Unfert Floret
aatcttttgaagcaaccttctccagcttcagatgggcaaaagctcttctcctaccagcaggatattccctactaaccgccgccgtctttgccggtcatgtcatgtgaccctgatggtccccagaaagggcgtcctctgcggcggcggcggcggcggcggcagcgatggccccatctggacctgctgctggtgctcgctctgccgggcggtcgagatcttcagctccaggtccggcgccaggccaccagcctttgccgccgtcagcgacgaagaagggtggctgtgtttcggcggcgccagggccaggctcggcgccgtgcggccaattcccgccgagcaccgcggcagctgcagggacagcaggctgctcggaggcagcgcggcgtggtcgggcctcgctggtggcctgccgacgccgagcgacagggccggcgggagctgtgccgtcgtcccggttccgggttctgcggagccagtcgcggtcgcggtcgtgatggcgtccttgagccgcaggcgctccatgcccttgatggagctcgtcgccgccctctcggcgttctccacctgaaacggaagaggttcgcgaatcagacacgcacacgccagggctggtacagcacgtctcgcatggagggagcgtggcgacggacggacgggacgggacgggacgtaacgtaccacgtcgaagaggctggacctgcgcttcttgtgcgtcaggctgctctgccggaggaagtacttctgggcgtggctggccacctgcgtcggggtccgcgtcgtcacgaagtgccgggagatgcctcgccagtcgcccttcccgagcttctccaggcccgccaggaatcgcctgtgctcgtcctccgtccatggaacgcctggtgatacccagacaagaaggcgaggagagttttttttttagaatcagacttgcttagctcaaacaagctgccgggaacaggagtattgttgttctattctgttctgttctatataaaagatttg

SEQ ID NO: 953 - protein, 261 aa, Zea mays subsp. mays
  peptide (1)..(261): Ceres Seq. ID no. 12387990
MSCDPDGPQKGRPLRRRRRRRQRWPHLDLLLVLALPGGRDLQLQVRRQATSLCRRQRRRRVAVFRRRQGQARRRAANSRRAPRQLQGQQAARRQRGVVGPRWWPADAERQGRRELCRRPGSGFCGASRGRGRDGVLEPQALHALDGARRRPLGVLHLKRKRFANQTRTRQGWYSTSRMEGAWRRTDGTGRDVTYHVEEAGPALLVRQAALPEEVLLGVAGHLRRGPRRHEVPGDASPVALPELLQARQESPVLVLRPWNAW

SEQ ID NO: 954 - protein, 178 aa, Zea mays subsp. mays
  peptide (1)..(178): Ceres Seq. ID no. 12387991
MGKSSSPTSRIFPTNRRRLCRSCHVTLMVPRKGVLCGGGGGGGSDGPIWTCCWCSLCRAVEIFSSRSGARPPAFAAVSDEEGWLCFGGARARLGAVRPIPAEHRGSCRDSRLLGGSAAWSGLAGGLPTPSDRAGGSCAVVPVPGSAEPVAVAVVMASLSRRRSMPLMELVAALSAFST

SEQ ID NO: 955 - protein, 151 aa, Zea mays subsp. mays
  peptide (1)..(151): Ceres Seq. ID no. 12387992
MVPRKGVLCGGGGGGGSDGPIWTCCWCSLCRAVEIFSSRSGARPPAFAAVSDEEGWLCFGGARARLGAVRPIPAEHRGSCRDSRLLGGSAAWSGLAGGLPTPSDRAGGSCAVVPVPGSAEPVAVAVVMASLSRRRSMPLMELVAALSAFST

SEQ ID NO: 956 - DNA, 568 bp, Zea mays subsp. mays
  misc_feature (1)..(568): Ceres Seq. ID no. 12382795
  misc_feature: MA Experiment ID: 108527 Result: Down-regulated in Transcription
  misc_feature: MA Experiment 108527 PARAMETER Experiment Name: Zm_5mM_NO_P Parameter: Age (day) Value: 8
  misc_feature: MA Experiment 108527 PARAMETER Experiment Name: Zm_5mM_NO_P Parameter: Organism Value: Zea mays
  misc_feature: MA Experiment 108527 PARAMETER Experiment Name: Zm_5mM_NO_P Parameter: Plant Line Value: 35A19
  misc_feature: MA Experiment 108527 PARAMETER Experiment Name: Zm_5mM_NO_P Parameter: Timepoint (hr) Value: 6
  misc_feature: MA Experiment 108527 PARAMETER Experiment Name: Zm_5mM_NO_P Parameter: Tissue Value: Aerial
  misc_feature: MA Experiment 108527 PARAMETER Experiment Name: Zm_5mM_NO_P Parameter: Treatment Value: 5mM NO vs. No Treatment
  misc_feature: MA Experiment ID: 108556 Result: Down-regulated in Transcription
  misc_feature: MA Experiment 108556 PARAMETER Experiment Name: Zm_Drought_P Parameter: Age (day) Value: 9
  misc_feature: MA Experiment 108556 PARAMETER Experiment Name: Zm_Drought_P Parameter: Organism Value: Zea mays
  misc_feature: MA Experiment 108556 PARAMETER Experiment Name: Zm_Drought_P Parameter: Plant Line Value: 35A19
  misc_feature: MA Experiment 108556 PARAMETER Experiment Name: Zm_Drought_P Parameter: Timepoint (hr) Value: 24
  misc_feature: MA Experiment 108556 PARAMETER Experiment Name: Zm_Drought_P Parameter: Tissue Value: Aerial
  misc_feature: MA Experiment 108556 PARAMETER Experiment Name: Zm_Drought_P Parameter: Treatment Value: Drought vs. No Drought
  misc_feature: MA Experiment ID: 20000479 Result: Down-regulated in Transcription
  misc_feature: MA Experiment 20000479 PARAMETER Experiment Name: Zm_Drought_P Parameter: Age (day) Value: 10
  misc_feature: MA Experiment 20000479 PARAMETER Experiment Name: Zm_Drought_P Parameter: Organism Value: Zea mays
  misc_feature: MA Experiment 20000479 PARAMETER Experiment Name: Zm_Drought_P Parameter: Plant Line Value: 35A19
  misc_feature: MA Experiment 20000479 PARAMETER Experiment Name: Zm_Drought_P Parameter: Timepoint (hr) Value: 48
  misc_feature: MA Experiment 20000479 PARAMETER Experiment Name: Zm_Drought_P Parameter: Tissue Value: Aerial
  misc_feature: MA Experiment 20000479 PARAMETER Experiment Name: Zm_Drought_P Parameter: Treatment Value: Drought vs. No Drought
  misc_feature: MA Experiment ID: 20000480 Result: Down-regulated in Transcription
  misc_feature: MA Experiment 20000480 PARAMETER Experiment Name: Zm_Drought_P Parameter: Age (day) Value: 11
  misc_feature: MA Experiment 20000480 PARAMETER Experiment Name: Zm_Drought_P Parameter: Organism Value: Zea mays
  misc_feature: MA Experiment 20000480 PARAMETER Experiment Name: Zm_Drought_P Parameter: Plant Line Value: 35A19
  misc_feature: MA Experiment 20000480 PARAMETER Experiment Name: Zm_Drought_P Parameter: Timepoint (hr) Value: 72
  misc_feature: MA Experiment 20000480 PARAMETER Experiment Name: Zm_Drought_P Parameter: Tissue Value: Aerial
  misc_feature: MA Experiment 20000480 PARAMETER Experiment Name: Zm_Drought_P Parameter: Treatment Value: Drought vs. No Drought
  misc_feature: MA Experiment ID: 20000492 Result: Up-regulated in Transcription
  misc_feature: MA Experiment 20000492 PARAMETER Experiment Name: Zm_Hybrid_Seed_Dev_P Parameter: DAP Value: 12
  misc_feature: MA Experiment 20000492 PARAMETER Experiment Name: Zm_Hybrid_Seed_Dev_P Parameter: Organism Value: Zea mays
  misc_feature: MA Experiment 20000492 PARAMETER Experiment Name: Zm_Hybrid_Seed_Dev_P Parameter: Plant Line Value: 35A19
  misc_feature: MA Experiment 20000492 PARAMETER Experiment Name: Zm_Hybrid_Seed_Dev_P Parameter: Tissue Value: Fert Kernel vs. Unfert Floret
agtaagtatctcctgccgggtatcaagactgaagaacaaaggtcagatctcgcgtatgctcgtttgtagcagtgtggatctgatacaggtaattgaaacctttagatggtggtagggctagtagtgagcagtagacgacaactagtcctggcagccagttgtagtgaggtgacatggctgcatacagacatccaaccaaaggaaacagagggtgtggtgtggaaagaaggggagagtggacaaaagccagaccggacagacatggctggcgctgctgctgctgcacaggcacagggaaaggtgatgagacgagaggggtggggtggtactctgctgggaccggcgcactcacgggtgcggagaatcagcttcgcctcacgagcgatgcagcagcggagacacagacacctctcgtctgcgtactgtttcgcccatgctcttgtcttgtacgcatccagcagcgttccttgtcctttggctccttcgatgtattacctgctcttcttttcaactaggagtttagcggacaaagaaatgaaaaagtaattagcagtcatttatcttggtc

SEQ ID NO: 957 - protein, 146 aa, Zea mays subsp. mays
  peptide (1)..(146): Ceres Seq. ID no. 12382796
MVVGLVVSSRRQLVLAASCSEVTWLHTDIQPKETEGVVWKEGESGQKPDRTDMAGAAAAAQAQGKVMRREGWGGTLLGPAHSRVRRISFASRAMQQRRHRHLSSAYCFAHALVLYASSSVPCPLAPSMYYLLFFSTRSLADKEMKK

SEQ ID NO: 958 - protein, 113 aa, Zea mays subsp. mays
  peptide (1)..(113): Ceres Seq. ID no. 12382797
MAAYRHPTKGNRGCGVERRGEWTKARPDRHGWRCCCCTGTGKGDETRGVGWYSAGTGALTGAENQLRLTSDAAAETQTPLVCVLFRPCSCLVRIQQRSLSFGSFDVLPALLFN

SEQ ID NO: 959 - protein, 94 aa, Zea mays subsp. mays
  peptide (1)..(94): Ceres Seq. ID no. 12382798
MAGAAAAAQAQGKVMRREGWGGTLLGPAHSRVRRISFASRAMQQRRHRHLSSAYCFAHALVLYASSSVPCPLAPSMYYLLFFSTRSLADKEMKK

SEQ ID NO: 960 - DNA, 760 bp, Zea mays subsp. mays
  misc_feature (1)..(760): Ceres Seq. ID no. 12418043
  misc_feature: MA Experiment ID: 108527 Result: Up-regulated in Transcription
  misc_feature: MA Experiment 108527 PARAMETER Experiment Name: Zm_5mM_NO_P Parameter: Age (day) Value: 8
  misc_feature: MA Experiment 108527 PARAMETER Experiment Name: Zm_5mM_NO_P Parameter: Organism Value: Zea mays
  misc_feature: MA Experiment 108527 PARAMETER Experiment Name: Zm_5mM_NO_P Parameter: Plant Line Value: 35A19
  misc_feature: MA Experiment 108527 PARAMETER Experiment Name: Zm_5mM_NO_P Parameter: Timepoint (hr) Value: 6
  misc_feature: MA Experiment 108527 PARAMETER Experiment Name: Zm_5mM_NO_P Parameter: Tissue Value: Aerial
  misc_feature: MA Experiment 108527 PARAMETER Experiment Name: Zm_5mM_NO_P Parameter: Treatment Value: 5mM NO vs. No Treatment
  misc_feature: MA Experiment ID: 108559 Result: Up-regulated in Transcription
  misc_feature: MA Experiment 108559 PARAMETER Experiment Name: Zm_5mM_NO_P Parameter: Age (day) Value: 8
  misc_feature: MA Experiment 108559 PARAMETER Experiment Name: Zm_5mM_NO_P Parameter: Organism Value: Zea mays
  misc_feature: MA Experiment 108559 PARAMETER Experiment Name: Zm_5mM_NO_P Parameter: Plant Line Value: 35A19
  misc_feature: MA Experiment 108559 PARAMETER Experiment Name: Zm_5mM_NO_P Parameter: Timepoint (hr) Value: 12
  misc_feature: MA Experiment 108559 PARAMETER Experiment Name: Zm_5mM_NO_P Parameter: Tissue Value: Aerial
  misc_feature: MA Experiment 108559 PARAMETER Experiment Name: Zm_5mM_NO_P Parameter: Treatment Value: 5mM NO vs. No Treatment
tgattaagtactgataatatttgttgattttgcagatgtgaaggacataaagtgtgtgataaattatgattttccaacaactcttgaagattatattcacaggataggtcgaactggccgtgctggtgctagcggaactgcatttacttttttcacacacgcaaatgcaaagttctcaaggaatctagtgaagattctgcgagaagctggccaagtcgtgaatcctgccttagaatccatgtccaggtcttcgaactcaacgggaggaggcaatttccggtcgagaggcagaggtgggtttggtaaccggggccatatgtctggatcaaatacctttcctttaggaggaagaaggccatattgatgtgtgcaaaagaactgtgggagtatgggactatttgtatactactcggcattaagtgcattctttgggaaatttctgagaaatttcccctactaccaggattgataacaccatcgattttcgctacagtacctggagcttcttatatgaaagaacaacacatcaactatctagcaacagcatatgcattccattcagatatttcttttggaaggaccctgtcttgttttagtggagtccctgtgatcgtttaaagtcgtctgtatacttgtactgaacttcttgtggtgttactgttaggatttatggttgctctctattggtgtgcggtgttactgaacaaatttagttaagaagttaggcatttccatatttaatttgattctgaaataaact

SEQ ID NO: 961 - protein, 84 aa, Zea mays subsp. mays
  peptide (1)..(84): Ceres Seq. ID no. 12418044
MCAKELWEYGTICILLGIKCILWEISEKFPLLPGLITPSIFATVPGASYMKEQHINYLATAYAFHSDISFGRTLSCFSGVPVIV

SEQ ID NO: 962 - DNA, 702 bp, Zea mays subsp. mays; identical to SEQ ID NO: 720
  misc_feature (1)..(702): Ceres Seq. ID no. 13492969
  misc_feature: MA Experiment ID: 108515 Result: Down-regulated in Transcription
  misc_feature: MA Experiment 108515 PARAMETER Experiment Name: Zm_2mM_SA_P Parameter: Age (day) Value: 8
  misc_feature: MA Experiment 108515 PARAMETER Experiment Name: Zm_2mM_SA_P Parameter: Organism Value: Zea mays
  misc_feature: MA Experiment 108515 PARAMETER Experiment Name: Zm_2mM_SA_P Parameter: Plant Line Value: 35A19
  misc_feature: MA Experiment 108515 PARAMETER Experiment Name: Zm_2mM_SA_P Parameter: Timepoint (hr) Value: 12
  misc_feature: MA Experiment 108515 PARAMETER Experiment Name: Zm_2mM_SA_P Parameter: Tissue Value: Aerial
  misc_feature: MA Experiment 108515 PARAMETER Experiment Name: Zm_2mM_SA_P Parameter: Treatment Value: 2mM SA vs. No Treatment
  misc_feature: MA Experiment ID: 108523 Result: Down-regulated in Transcription
  misc_feature: MA Experiment 108523 PARAMETER Experiment Name: Zm_42deg_Heat_P Parameter: Age (day) Value: 8
  misc_feature: MA Experiment 108523 PARAMETER Experiment Name: Zm_42deg_Heat_P Parameter: Organism Value: Zea mays
  misc_feature: MA Experiment 108523 PARAMETER Experiment Name: Zm_42deg_Heat_P Parameter: Plant Line Value: 35A19
  misc_feature: MA Experiment 108523 PARAMETER Experiment Name: Zm_42deg_Heat_P Parameter: Temperature (deg C) Value: 42 vs. 22
  misc_feature: MA Experiment 108523 PARAMETER Experiment Name: Zm_42deg_Heat_P Parameter: Timepoint (hr) Value: 6
  misc_feature: MA Experiment 108523 PARAMETER Experiment Name: Zm_42deg_Heat_P Parameter: Tissue Value: Aerial
  misc_feature: MA Experiment ID: 108535 Result: Up-regulated in Transcription
  misc_feature: MA Experiment 108535 PARAMETER Experiment Name: Zm_Meristem_P Parameter: Age (day) Value: 8
  misc_feature: MA Experiment 108535 PARAMETER Experiment Name: Zm_Meristem_P Parameter: Organism Value: Zea mays
  misc_feature: MA Experiment 108535 PARAMETER Experiment Name: Zm_Meristem_P Parameter: Plant Line Value: 35A19
  misc_feature: MA Experiment 108535 PARAMETER Experiment Name: Zm_Meristem_P Parameter: Tissue Value: Root Meristem vs. Above Root Meristem
  misc_feature: MA Experiment ID: 108543 Result: Up-regulated in Transcription
  misc_feature: MA Experiment ID: 108544 Result: Down-regulated in Transcription
  misc_feature: MA Experiment ID: 108556 Result: Down-regulated in Transcription
  misc_feature: MA Experiment 108556 PARAMETER Experiment Name: Zm_Drought_P Parameter: Age (day) Value: 9
  misc_feature: MA Experiment 108556 PARAMETER Experiment Name: Zm_Drought_P Parameter: Organism Value: Zea mays
  misc_feature: MA Experiment 108556 PARAMETER Experiment Name: Zm_Drought_P Parameter: Plant Line Value: 35A19
  misc_feature: MA Experiment 108556 PARAMETER Experiment Name: Zm_Drought_P Parameter: Timepoint (hr) Value: 24
  misc_feature: MA Experiment 108556 PARAMETER Experiment Name: Zm_Drought_P Parameter: Tissue Value: Aerial
  misc_feature: MA Experiment 108556 PARAMETER Experiment Name: Zm_Drought_P Parameter: Treatment Value: Drought vs. No Drought
  misc_feature: MA Experiment ID: 108597 Result: Down-regulated in Transcription
  misc_feature: MA Experiment 108597 PARAMETER Experiment Name: Zm_100uM_ABA_P Parameter: Age (day) Value: 9
  misc_feature: MA Experiment 108597 PARAMETER Experiment Name: Zm_100uM_ABA_P Parameter: Organism Value: Zea mays
  misc_feature: MA Experiment 108597 PARAMETER Experiment Name: Zm_100uM_ABA_P Parameter: Plant Line Value: 35A19
  misc_feature: MA Experiment 108597 PARAMETER Experiment Name: Zm_100uM_ABA_P Parameter: Timepoint (hr) Value: 24
  misc_feature: MA Experiment 108597 PARAMETER Experiment Name: Zm_100uM_ABA_P Parameter: Tissue Value: Aerial
  misc_feature: MA Experiment 108597 PARAMETER Experiment Name: Zm_100uM_ABA_P Parameter: Treatment Value: 100uM ABA vs. No Treatment
  misc_feature: MA Experiment ID: 20000477 Result: Down-regulated in Transcription
  misc_feature: MA Experiment 20000477 PARAMETER Experiment Name: Zm_5mM_SA_P Parameter: Age (day) Value: 10
  misc_feature: MA Experiment 20000477 PARAMETER Experiment Name: Zm_5mM_SA_P Parameter: Organism Value: Zea mays
  misc_feature: MA Experiment 20000477 PARAMETER Experiment Name: Zm_5mM_SA_P Parameter: Plant Line Value: 35A19
  misc_feature: MA Experiment 20000477 PARAMETER Experiment Name: Zm_5mM_SA_P Parameter: Timepoint (hr) Value: 48
  misc_feature: MA Experiment 20000477 PARAMETER Experiment Name: Zm_5mM_SA_P Parameter: Tissue Value: Aerial
  misc_feature: MA Experiment 20000477 PARAMETER Experiment Name: Zm_5mM_SA_P Parameter: Treatment Value: 5mM SA vs. No Treatment
  misc_feature: MA Experiment ID: 20000478 Result: Down-regulated in Transcription
  misc_feature: MA Experiment 20000478 PARAMETER Experiment Name: Zm_5mM_SA_P Parameter: Age (day) Value: 11
  misc_feature: MA Experiment 20000478 PARAMETER Experiment Name: Zm_5mM_SA_P Parameter: Organism Value: Zea mays
  misc_feature: MA Experiment 20000478 PARAMETER Experiment Name: Zm_5mM_SA_P Parameter: Plant Line Value: 35A19
  misc_feature: MA Experiment 20000478 PARAMETER Experiment Name: Zm_5mM_SA_P Parameter: Timepoint (hr) Value: 72
  misc_feature: MA Experiment 20000478 PARAMETER Experiment Name: Zm_5mM_SA_P Parameter: Tissue Value: Aerial
  misc_feature: MA Experiment 20000478 PARAMETER Experiment Name: Zm_5mM_SA_P Parameter: Treatment Value: 5mM SA vs. No Treatment
  misc_feature: MA Experiment ID: 20000480 Result: Down-regulated in Transcription
  misc_feature: MA Experiment 20000480 PARAMETER Experiment Name: Zm_Drought_P Parameter: Age (day) Value: 11
  misc_feature: MA Experiment 20000480 PARAMETER Experiment Name: Zm_Drought_P Parameter: Organism Value: Zea mays
  misc_feature: MA Experiment 20000480 PARAMETER Experiment Name: Zm_Drought_P Parameter: Plant Line Value: 35A19
  misc_feature: MA Experiment 20000480 PARAMETER Experiment Name: Zm_Drought_P Parameter: Timepoint (hr) Value: 72
  misc_feature: MA Experiment 20000480 PARAMETER Experiment Name: Zm_Drought_P Parameter: Tissue Value: Aerial
  misc_feature: MA Experiment 20000480 PARAMETER Experiment Name: Zm_Drought_P Parameter: Treatment Value: Drought vs. No Drought
  misc_feature: MA Experiment ID: 20000487 Result: Down-regulated in Transcription
  misc_feature: MA Experiment 20000487 PARAMETER Experiment Name: Zm_50mM_NH4NO3_L_to_H_P Parameter: Organism Value: Zea mays
  misc_feature: MA Experiment 20000487 PARAMETER Experiment Name: Zm_50mM_NH4NO3_L_to_H_P Parameter: Timepoint (hr) Value: 4
  misc_feature: MA Experiment 20000487 PARAMETER Experiment Name: Zm_50mM_NH4NO3_L_to_H_P Parameter: Tissue Value: Leaves
  misc_feature: MA Experiment 20000487 PARAMETER Experiment Name: Zm_50mM_NH4NO3_L_to_H_P Parameter: Treatment Value: 50mM NH4NO3 vs. 100mM Mannitol
  misc_feature: MA Experiment ID: 20000626 Result: Down-regulated in Transcription
  misc_feature: MA Experiment 20000626 PARAMETER Experiment Name: Zm_Herbicide-Treatments_P Parameter: Timepoint (hr) Value: 12
  misc_feature: MA Experiment 20000626 PARAMETER Experiment Name: Zm_Herbicide-Treatments_P Parameter: Tissue Value: Aerial
  misc_feature: MA Experiment 20000626 PARAMETER Experiment Name: Zm_Herbicide-Treatments_P Parameter: Treatment Value: Roundup vs. No Treatment
  misc_feature: MA Experiment ID: 20000629 Result: Down-regulated in Transcription
  misc_feature: MA Experiment 20000629 PARAMETER Experiment Name: Zm_Herbicide-Treatments_P Parameter: Timepoint (hr) Value: 12
  misc_feature: MA Experiment 20000629 PARAMETER Experiment Name: Zm_Herbicide-Treatments_P Parameter: Tissue Value: Aerial
  misc_feature: MA Experiment 20000629 PARAMETER Experiment Name: Zm_Herbicide-Treatments_P Parameter: Treatment Value: Trimec vs. No Treatment
  misc_feature: MA Experiment ID: 20000633 Result: Down-regulated in Transcription
  misc_feature: MA Experiment 20000633 PARAMETER Experiment Name: Zm_Herbicide-Treatments_P Parameter: Timepoint (hr) Value: 4
  misc_feature: MA Experiment 20000633 PARAMETER Experiment Name: Zm_Herbicide-Treatments_P Parameter: Tissue Value: Aerial
  misc_feature: MA Experiment 20000633 PARAMETER Experiment Name: Zm_Herbicide-Treatments_P Parameter: Treatment Value: Trimec vs. No Treatment

SEQ ID NO: 963 - protein, 179 aa, Zea mays subsp. mays; identical to SEQ ID NO: 721
  peptide (1)..(179): Ceres Seq. ID no. 13492970

SEQ ID NO: 964 - DNA, 508 bp, Zea mays subsp. mays
  misc_feature (1)..(508): Ceres Seq. ID no. 12379477
  misc_feature: MA Experiment ID: 108530 Result: Down-regulated in Transcription
  misc_feature: MA Experiment 108530 PARAMETER Experiment Name: Zm_Imbibed_Seeds_P Parameter: Age (day) Value: 6 vs. 2
  misc_feature: MA Experiment 108530 PARAMETER Experiment Name: Zm_Imbibed_Seeds_P Parameter: Organism Value: Zea mays
  misc_feature: MA Experiment 108530 PARAMETER Experiment Name: Zm_Imbibed_Seeds_P Parameter: Plant Line Value: 35A19
  misc_feature: MA Experiment 108530 PARAMETER Experiment Name: Zm_Imbibed_Seeds_P Parameter: Tissue Value: Aerial vs. Embryo
  misc_feature: MA Experiment ID: 108535 Result: Up-regulated in Transcription
  misc_feature: MA Experiment 108535 PARAMETER Experiment Name: Zm_Meristem_P Parameter: Age (day) Value: 8
  misc_feature: MA Experiment 108535 PARAMETER Experiment Name: Zm_Meristem_P Parameter: Organism Value: Zea mays
  misc_feature: MA Experiment 108535 PARAMETER Experiment Name: Zm_Meristem_P Parameter: Plant Line Value: 35A19
  misc_feature: MA Experiment 108535 PARAMETER Experiment Name: Zm_Meristem_P Parameter: Tissue Value: Root Meristem vs. Above Root Meristem
  misc_feature: MA Experiment ID: 108543 Result: Up-regulated in Transcription
  misc_feature: MA Experiment ID: 20000478 Result: Down-regulated in Transcription
  misc_feature: MA Experiment 20000478 PARAMETER Experiment Name: Zm_5mM_SA_P Parameter: Age (day) Value: 11
  misc_feature: MA Experiment 20000478 PARAMETER Experiment Name: Zm_5mM_SA_P Parameter: Organism Value: Zea mays
  misc_feature: MA Experiment 20000478 PARAMETER Experiment Name: Zm_5mM_SA_P Parameter: Plant Line Value: 35A19
  misc_feature: MA Experiment 20000478 PARAMETER Experiment Name: Zm_5mM_SA_P Parameter: Timepoint (hr) Value: 72
  misc_feature: MA Experiment 20000478 PARAMETER Experiment Name: Zm_5mM_SA_P Parameter: Tissue Value: Aerial
  misc_feature: MA Experiment 20000478 PARAMETER Experiment Name: Zm_5mM_SA_P Parameter: Treatment Value: 5mM SA vs. No Treatment
  misc_feature: MA Experiment ID: 20000480 Result: Down-regulated in Transcription
  misc_feature: MA Experiment 20000480 PARAMETER Experiment Name: Zm_Drought_P Parameter: Age (day) Value: 11
  misc_feature: MA Experiment 20000480 PARAMETER Experiment Name: Zm_Drought_P Parameter: Organism Value: Zea mays
  misc_feature: MA Experiment 20000480 PARAMETER Experiment Name: Zm_Drought_P Parameter: Plant Line Value: 35A19
  misc_feature: MA Experiment 20000480 PARAMETER Experiment Name: Zm_Drought_P Parameter: Timepoint (hr) Value: 72
  misc_feature: MA Experiment 20000480 PARAMETER Experiment Name: Zm_Drought_P Parameter: Tissue Value: Aerial
  misc_feature: MA Experiment 20000480 PARAMETER Experiment Name: Zm_Drought_P Parameter: Treatment Value: Drought vs. No Drought
  misc_feature: MA Experiment ID: 20000492 Result: Up-regulated in Transcription
  misc_feature: MA Experiment 20000492 PARAMETER Experiment Name: Zm_Hybrid_Seed_Dev_P Parameter: DAP Value: 12
  misc_feature: MA Experiment 20000492 PARAMETER Experiment Name: Zm_Hybrid_Seed_Dev_P Parameter: Organism Value: Zea mays
  misc_feature: MA Experiment 20000492 PARAMETER Experiment Name: Zm_Hybrid_Seed_Dev_P Parameter: Plant Line Value: 35A19
  misc_feature: MA Experiment 20000492 PARAMETER Experiment Name: Zm_Hybrid_Seed_Dev_P Parameter: Tissue Value: Fert Kernel vs. Unfert Floret
  misc_feature: MA Experiment ID: 20000535 Result: Up-regulated in Transcription
  misc_feature: MA Experiment 20000535 PARAMETER Experiment Name: Zm_Hybrid_Seed_Dev_P Parameter: DAP Value: 30 vs. 12
  misc_feature: MA Experiment 20000535 PARAMETER Experiment Name: Zm_Hybrid_Seed_Dev_P Parameter: Organism Value: Zea mays
  misc_feature: MA Experiment 20000535 PARAMETER Experiment Name: Zm_Hybrid_Seed_Dev_P Parameter: Plant Line Value: 35A19
  misc_feature: MA Experiment 20000535 PARAMETER Experiment Name: Zm_Hybrid_Seed_Dev_P Parameter: Tissue Value: Embryo vs. Unfert Floret
  misc_feature: MA Experiment ID: 20000626 Result: Down-regulated in Transcription
  misc_feature: MA Experiment 20000626 PARAMETER Experiment Name: Zm_Herbicide-Treatments_P Parameter: Timepoint (hr) Value: 12
  misc_feature: MA Experiment 20000626 PARAMETER Experiment Name: Zm_Herbicide-Treatments_P Parameter: Tissue Value: Aerial
  misc_feature: MA Experiment 20000626 PARAMETER Experiment Name: Zm_Herbicide-Treatments_P Parameter: Treatment Value: Roundup vs. No Treatment
  misc_feature: MA Experiment ID: 20000632 Result: Down-regulated in Transcription
  misc_feature: MA Experiment 20000632 PARAMETER Experiment Name: Zm_Herbicide-Treatments_P Parameter: Timepoint (hr) Value: 4
  misc_feature: MA Experiment 20000632 PARAMETER Experiment Name: Zm_Herbicide-Treatments_P Parameter: Tissue Value: Aerial
  misc_feature: MA Experiment 20000632 PARAMETER Experiment Name: Zm_Herbicide-Treatments_P Parameter: Treatment Value: Glean vs. No Treatment
cagaatatgtgaggaatgttctcctgtggaagagtctacagggggctacactgctactaaattgatacttgatggatctgatgacaagaatccttgtgataaggaactagttaataaggacaacctgctgcagaggaacaagataaatcaaaaataccaaggactgttcaaaggaaaaacaactaaatgccgacaccctgtacaaaagcaagaaccaggagatggagcaacgcccgcatcacccagtccggccaatcccatctcaactgtggtgcaaaaactttggtaagaaggaatactgaaggaccttccaaactagcatgaagtgcgggcaccttgcttttcttttgccttctttttgtgaaaacgtgtgcttagcgacaatgctggctaagtgttagaagcatctctggaatgcttcgtgtagtatcttttgactctcttttcttttgtcgtctcaatcatgttacatgagaaatgcctgatggactcaaataatgaaccggtg

SEQ ID NO: 965 - protein, 95 aa, Zea mays subsp. mays
  peptide (1)..(95): Ceres Seq. ID no. 12379478
RICEECSPVEESTGGYTATKLILDGSDDKNPCDKELVNKDNLLQRNKINQKYQGLFKGKTTKCRHPVQKQEPGDGATPASPSPANPISTVVQKLW

SEQ ID NO: 966 - DNA, 723 bp, Zea mays subsp. mays
  misc_feature (1)..(723): Ceres Seq. ID no. 14312743
  misc_feature: MA Experiment ID: 108534 Result: Up-regulated in Transcription
  misc_feature: MA Experiment 108534 PARAMETER Experiment Name: Zm_4deg_Cold_P Parameter: Age (hr) Value: 8
  misc_feature: MA Experiment 108534 PARAMETER Experiment Name: Zm_4deg_Cold_P Parameter: Organism Value: Zea mays
  misc_feature: MA Experiment 108534 PARAMETER Experiment Name: Zm_4deg_Cold_P Parameter: Plant Line Value: 35A19
  misc_feature: MA Experiment 108534 PARAMETER Experiment Name: Zm_4deg_Cold_P Parameter: Temperature (deg C) Value: 4 vs. 22
  misc_feature: MA Experiment 108534 PARAMETER Experiment Name: Zm_4deg_Cold_P Parameter: Timepoint (hr) Value: 6
  misc_feature: MA Experiment 108534 PARAMETER Experiment Name: Zm_4deg_Cold_P Parameter: Tissue Value: Aerial
acggctctcgtttccgcccgcgccacccgccatgtcgtccccgccgcgggggcagcccgccaccgccgccgtgccggcggtcgcggccgccacgtccccgcagttgcccgccgcgtcccacacgctcccccgcgcgttcctcgccacatcctctccccgtgccatagtggcagcaccggcgcccccgcggcggggacgacatggcaggtgggatcggcggcggagacgtgagcagtttttttccactgattctgacagccggaatctatatatacatacaaacacaagagcaaatgaaaggccaaagggacgggaaacgaacgggaagaggtggtgcgtgctaactcctatgcatcgcattcctggatgttcattggtcaatcacgatgctgcactgctgcagctcgggtagtttttgctaagctggaggtgcagcagacaagacaacaagcaagaggatgcaactatatatactgatgccactagtccatcgtggagctcggttgaggaagctcatcgatctcgttgtaccgaactatctcaaaaaaacatagtgcctgtttgtctggatagctgctcggccacaggcacagctgtctggccccgggcaccatccaaacaatcccatatagagcgtgtttggacgcagattcgtaggcctgtaaagcaaacacgtcccaattatctgaactcgggattattgacgccttggcaagattcaac

SEQ ID NO: 967 - protein, 136 aa, Zea mays subsp. mays
  peptide (1)..(136): Ceres Seq. ID no. 14312744
RLSFPPAPPAMSSPPRGQPATAAVPAVAAATSPQLPAASHTLPRAFLATSSPRAIVAAPAPPRRGRHGRWDRRRRREQFFSTDSDSRNLYIHTNTRANERPKGRETNGKRWCVLTPMHRIPGCSLVNHDAALLQLG

SEQ ID NO: 968 - protein, 126 aa, Zea mays subsp. mays
  peptide (1)..(126): Ceres Seq. ID no. 14312745
MSSPPRGQPATAAVPAVAAATSPQLPAASHTLPRAFLATSSPRAIVAAPAPPRRGRHGRWDRRRRREQFFSTDSDSRNLYIHTNTRANERPKGRETNGKRWCVLTPMHRIPGCSLVNHDAALLQLG

SEQ ID NO: 969 - protein, 76 aa, Zea mays subsp. mays
  peptide (1)..(76): Ceres Seq. ID no. 14312746
TALVSARATRHVVPAAGAARHRRRAGGRGRHVPAVARRVPHAPPRVPRHILSPCHSGSTGAPAAGTTWQVGSAAET

SEQ ID NO: 970 - DNA, 568 bp, Zea mays subsp. mays; identical to SEQ ID NO: 956
  misc_feature (1)..(568): Ceres Seq. ID no. 12382795
  misc_feature: MA Experiment ID: 108527 Result: Down-regulated in Transcription
  misc_feature: MA Experiment 108527 PARAMETER Experiment Name: Zm_5mM_NO_P Parameter: Age (day) Value: 8
  misc_feature: MA Experiment 108527 PARAMETER Experiment Name: Zm_5mM_NO_P Parameter: Organism Value: Zea mays
  misc_feature: MA Experiment 108527 PARAMETER Experiment Name: Zm_5mM_NO_P Parameter: Plant Line Value: 35A19
  misc_feature: MA Experiment 108527 PARAMETER Experiment Name: Zm_5mM_NO_P Parameter: Timepoint (hr) Value: 6
  misc_feature: MA Experiment 108527 PARAMETER Experiment Name: Zm_5mM_NO_P Parameter: Tissue Value: Aerial
  misc_feature: MA Experiment 108527 PARAMETER Experiment Name: Zm_5mM_NO_P Parameter: Treatment Value: 5mM NO vs. No Treatment
  misc_feature: MA Experiment ID: 108556 Result: Down-regulated in Transcription
  misc_feature: MA Experiment 108556 PARAMETER Experiment Name: Zm_Drought_P Parameter: Age (day) Value: 9
  misc_feature: MA Experiment 108556 PARAMETER Experiment Name: Zm_Drought_P Parameter: Organism Value: Zea mays
  misc_feature: MA Experiment 108556 PARAMETER Experiment Name: Zm_Drought_P Parameter: Plant Line Value: 35A19
  misc_feature: MA Experiment 108556 PARAMETER Experiment Name: Zm_Drought_P Parameter: Timepoint (hr) Value: 24
  misc_feature: MA Experiment 108556 PARAMETER Experiment Name: Zm_Drought_P Parameter: Tissue Value: Aerial
  misc_feature: MA Experiment 108556 PARAMETER Experiment Name: Zm_Drought_P Parameter: Treatment Value: Drought vs. No Drought
  misc_feature: MA Experiment ID: 20000479 Result: Down-regulated in Transcription
  misc_feature: MA Experiment 20000479 PARAMETER Experiment Name: Zm_Drought_P Parameter: Age (day) Value: 10
  misc_feature: MA Experiment 20000479 PARAMETER Experiment Name: Zm_Drought_P Parameter: Organism Value: Zea mays
  misc_feature: MA Experiment 20000479 PARAMETER Experiment Name: Zm_Drought_P Parameter: Plant Line Value: 35A19
  misc_feature: MA Experiment 20000479 PARAMETER Experiment Name: Zm_Drought_P Parameter: Timepoint (hr) Value: 48
  misc_feature: MA Experiment 20000479 PARAMETER Experiment Name: Zm_Drought_P Parameter: Tissue Value: Aerial
  misc_feature: MA Experiment 20000479 PARAMETER Experiment Name: Zm_Drought_P Parameter: Treatment Value: Drought vs. No Drought
  misc_feature: MA Experiment ID: 20000480 Result: Down-regulated in Transcription
  misc_feature: MA Experiment 20000480 PARAMETER Experiment Name: Zm_Drought_P Parameter: Age (day) Value: 11
  misc_feature: MA Experiment 20000480 PARAMETER Experiment Name: Zm_Drought_P Parameter: Organism Value: Zea mays
  misc_feature: MA Experiment 20000480 PARAMETER Experiment Name: Zm_Drought_P Parameter: Plant Line Value: 35A19
  misc_feature: MA Experiment 20000480 PARAMETER Experiment Name: Zm_Drought_P Parameter: Timepoint (hr) Value: 72
  misc_feature: MA Experiment 20000480 PARAMETER Experiment Name: Zm_Drought_P Parameter: Tissue Value: Aerial
  misc_feature: MA Experiment 20000480 PARAMETER Experiment Name: Zm_Drought_P Parameter: Treatment Value: Drought vs. No Drought
  misc_feature: MA Experiment ID: 20000492 Result: Up-regulated in Transcription
  misc_feature: MA Experiment 20000492 PARAMETER Experiment Name: Zm_Hybrid_Seed_Dev_P Parameter: DAP Value: 12
  misc_feature: MA Experiment 20000492 PARAMETER Experiment Name: Zm_Hybrid_Seed_Dev_P Parameter: Organism Value: Zea mays
  misc_feature: MA Experiment 20000492 PARAMETER Experiment Name: Zm_Hybrid_Seed_Dev_P Parameter: Plant Line Value: 35A19
  misc_feature: MA Experiment 20000492 PARAMETER Experiment Name: Zm_Hybrid_Seed_Dev_P Parameter: Tissue Value: Fert Kernel vs. Unfert Floret

SEQ ID NO: 971 - protein, 146 aa, Zea mays subsp. mays; identical to SEQ ID NO: 957
  peptide (1)..(146): Ceres Seq. ID no. 12382796

SEQ ID NO: 972 - protein, 113 aa, Zea mays subsp. mays; identical to SEQ ID NO: 958
  peptide (1)..(113): Ceres Seq. ID no. 12382797

SEQ ID NO: 973 - protein, 94 aa, Zea mays subsp. mays; identical to SEQ ID NO: 959
  peptide (1)..(94): Ceres Seq. ID no. 12382798

SEQ ID NO: 974 - DNA, 760 bp, Zea mays subsp. mays; identical to SEQ ID NO: 960
  misc_feature (1)..(760): Ceres Seq. ID no. 12418043
  misc_feature: MA Experiment ID: 108527 Result: Up-regulated in Transcription
  misc_feature: MA Experiment 108527 PARAMETER Experiment Name: Zm_5mM_NO_P Parameter: Age (day) Value: 8
  misc_feature: MA Experiment 108527 PARAMETER Experiment Name: Zm_5mM_NO_P Parameter: Organism Value: Zea mays
  misc_feature: MA Experiment 108527 PARAMETER Experiment Name: Zm_5mM_NO_P Parameter: Plant Line Value: 35A19
  misc_feature: MA Experiment 108527 PARAMETER Experiment Name: Zm_5mM_NO_P Parameter: Timepoint (hr) Value: 6
  misc_feature: MA Experiment 108527 PARAMETER Experiment Name: Zm_5mM_NO_P Parameter: Tissue Value: Aerial
  misc_feature: MA Experiment 108527 PARAMETER Experiment Name: Zm_5mM_NO_P Parameter: Treatment Value: 5mM NO vs. No Treatment
  misc_feature: MA Experiment ID: 108559 Result: Up-regulated in Transcription
  misc_feature: MA Experiment 108559 PARAMETER Experiment Name: Zm_5mM_NO_P Parameter: Age (day) Value: 8
  misc_feature: MA Experiment 108559 PARAMETER Experiment Name: Zm_5mM_NO_P Parameter: Organism Value: Zea mays
  misc_feature: MA Experiment 108559 PARAMETER Experiment Name: Zm_5mM_NO_P Parameter: Plant Line Value: 35A19
  misc_feature: MA Experiment 108559 PARAMETER Experiment Name: Zm_5mM_NO_P Parameter: Timepoint (hr) Value: 12
  misc_feature: MA Experiment 108559 PARAMETER Experiment Name: Zm_5mM_NO_P Parameter: Tissue Value: Aerial
  misc_feature: MA Experiment 108559 PARAMETER Experiment Name: Zm_5mM_NO_P Parameter: Treatment Value: 5mM NO vs. No Treatment

SEQ ID NO: 975 - protein, 84 aa, Zea mays subsp. mays; identical to SEQ ID NO: 961
  peptide (1)..(84): Ceres Seq. ID no. 12418044

SEQ ID NO: 976 - DNA, 702 bp, Zea mays subsp. mays; identical to SEQ ID NO: 720
  misc_feature (1)..(702): Ceres Seq. ID no. 13492969
  misc_feature: MA Experiment ID: 108515 Result: Down-regulated in Transcription
  misc_feature: MA Experiment 108515 PARAMETER Experiment Name: Zm_2mM_SA_P Parameter: Age (day) Value: 8
  misc_feature: MA Experiment 108515 PARAMETER Experiment Name: Zm_2mM_SA_P Parameter: Organism Value: Zea mays
  misc_feature: MA Experiment 108515 PARAMETER Experiment Name: Zm_2mM_SA_P Parameter: Plant Line Value: 35A19
  misc_feature: MA Experiment 108515 PARAMETER Experiment Name: Zm_2mM_SA_P Parameter: Timepoint (hr) Value: 12
  misc_feature: MA Experiment 108515 PARAMETER Experiment Name: Zm_2mM_SA_P Parameter: Tissue Value: Aerial
  misc_feature: MA Experiment 108515 PARAMETER Experiment Name: Zm_2mM_SA_P Parameter: Treatment Value: 2mM SA vs. No Treatment
  misc_feature: MA Experiment ID: 108523 Result: Down-regulated in Transcription
  misc_feature: MA Experiment 108523 PARAMETER Experiment Name: Zm_42deg_Heat_P Parameter: Age (day) Value: 8
  misc_feature: MA Experiment 108523 PARAMETER Experiment Name: Zm_42deg_Heat_P Parameter: Organism Value: Zea mays
  misc_feature: MA Experiment 108523 PARAMETER Experiment Name: Zm_42deg_Heat_P Parameter: Plant Line Value: 35A19
  misc_feature: MA Experiment 108523 PARAMETER Experiment Name: Zm_42deg_Heat_P Parameter: Temperature (deg C) Value: 42 vs. 22
  misc_feature: MA Experiment 108523 PARAMETER Experiment Name: Zm_42deg_Heat_P Parameter: Timepoint (hr) Value: 6
  misc_feature: MA Experiment 108523 PARAMETER Experiment Name: Zm_42deg_Heat_P Parameter: Tissue Value: Aerial
  misc_feature: MA Experiment ID: 108535 Result: Up-regulated in Transcription
  misc_feature: MA Experiment 108535 PARAMETER Experiment Name: Zm_Meristem_P Parameter: Age (day) Value: 8
  misc_feature: MA Experiment 108535 PARAMETER Experiment Name: Zm_Meristem_P Parameter: Organism Value: Zea mays
  misc_feature: MA Experiment 108535 PARAMETER Experiment Name: Zm_Meristem_P Parameter: Plant Line Value: 35A19
  misc_feature: MA Experiment 108535 PARAMETER Experiment Name: Zm_Meristem_P Parameter: Tissue Value: Root Meristem vs. Above Root Meristem
  misc_feature: MA Experiment ID: 108543 Result: Up-regulated in Transcription
  misc_feature: MA Experiment ID: 108544 Result: Down-regulated in Transcription
  misc_feature: MA Experiment ID: 108556 Result: Down-regulated in Transcription
  misc_feature: MA Experiment 108556 PARAMETER Experiment Name: Zm_Drought_P Parameter: Age (day) Value: 9
  misc_feature: MA Experiment 108556 PARAMETER Experiment Name: Zm_Drought_P Parameter: Organism Value: Zea mays
  misc_feature: MA Experiment 108556 PARAMETER Experiment Name: Zm_Drought_P Parameter: Plant Line Value: 35A19
  misc_feature: MA Experiment 108556 PARAMETER Experiment Name: Zm_Drought_P Parameter: Timepoint (hr) Value: 24
  misc_feature: MA Experiment 108556 PARAMETER Experiment Name: Zm_Drought_P Parameter: Tissue Value: Aerial
  misc_feature: MA Experiment 108556 PARAMETER Experiment Name: Zm_Drought_P Parameter: Treatment Value: Drought vs. No Drought
  misc_feature: MA Experiment ID: 108597 Result: Down-regulated in Transcription
  misc_feature: MA Experiment 108597 PARAMETER Experiment Name: Zm_100uM_ABA_P Parameter: Age (day) Value: 9
  misc_feature: MA Experiment 108597 PARAMETER Experiment Name: Zm_100uM_ABA_P Parameter: Organism Value: Zea mays
  misc_feature: MA Experiment 108597 PARAMETER Experiment Name: Zm_100uM_ABA_P Parameter: Plant Line Value: 35A19
  misc_feature: MA Experiment 108597 PARAMETER Experiment Name: Zm_100uM_ABA_P Parameter: Timepoint (hr) Value: 24
  misc_feature: MA Experiment 108597 PARAMETER Experiment Name: Zm_100uM_ABA_P Parameter: Tissue Value: Aerial
  misc_feature: MA Experiment 108597 PARAMETER Experiment Name: Zm_100uM_ABA_P Parameter: Treatment Value: 100uM ABA vs. No Treatment
  misc_feature: MA Experiment ID: 20000477 Result: Down-regulated in Transcription
  misc_feature: MA Experiment 20000477 PARAMETER Experiment Name: Zm_5mM_SA_P Parameter: Age (day) Value: 10
  misc_feature: MA Experiment 20000477 PARAMETER Experiment Name: Zm_5mM_SA_P Parameter: Organism Value: Zea mays
  misc_feature: MA Experiment 20000477 PARAMETER Experiment Name: Zm_5mM_SA_P Parameter: Plant Line Value: 35A19
  misc_feature: MA Experiment 20000477 PARAMETER Experiment Name: Zm_5mM_SA_P Parameter: Timepoint (hr) Value: 48
  misc_feature: MA Experiment 20000477 PARAMETER Experiment Name: Zm_5mM_SA_P Parameter: Tissue Value: Aerial
  misc_feature: MA Experiment 20000477 PARAMETER Experiment Name: Zm_5mM_SA_P Parameter: Treatment Value: 5mM SA vs. No Treatment
  misc_feature: MA Experiment ID: 20000478 Result: Down-regulated in Transcription
  misc_feature: MA Experiment 20000478 PARAMETER Experiment Name: Zm_5mM_SA_P Parameter: Age (day) Value: 11
  misc_feature: MA Experiment 20000478 PARAMETER Experiment Name: Zm_5mM_SA_P Parameter: Organism Value: Zea mays
  misc_feature: MA Experiment 20000478 PARAMETER Experiment Name: Zm_5mM_SA_P Parameter: Plant Line Value: 35A19
  misc_feature: MA Experiment 20000478 PARAMETER Experiment Name: Zm_5mM_SA_P Parameter: Timepoint (hr) Value: 72
  misc_feature: MA Experiment 20000478 PARAMETER Experiment Name: Zm_5mM_SA_P Parameter: Tissue Value: Aerial
  misc_feature: MA Experiment 20000478 PARAMETER Experiment Name: Zm_5mM_SA_P Parameter: Treatment Value: 5mM SA vs. No Treatment
  misc_feature: MA Experiment ID: 20000480 Result: Down-regulated in Transcription
  misc_feature: MA Experiment 20000480 PARAMETER Experiment Name: Zm_Drought_P Parameter: Age (day) Value: 11
  misc_feature: MA Experiment 20000480 PARAMETER Experiment Name: Zm_Drought_P Parameter: Organism Value: Zea mays
  misc_feature: MA Experiment 20000480 PARAMETER Experiment Name: Zm_Drought_P Parameter: Plant Line Value: 35A19
  misc_feature: MA Experiment 20000480 PARAMETER Experiment Name: Zm_Drought_P Parameter: Timepoint (hr) Value: 72
  misc_feature: MA Experiment 20000480 PARAMETER Experiment Name: Zm_Drought_P Parameter: Tissue Value: Aerial
  misc_feature: MA Experiment 20000480 PARAMETER Experiment Name: Zm_Drought_P Parameter: Treatment Value: Drought vs. No Drought
  misc_feature: MA Experiment ID: 20000487 Result: Down-regulated in Transcription
  misc_feature: MA Experiment 20000487 PARAMETER Experiment Name: Zm_50mM_NH4NO3_L_to_H_P Parameter: Organism Value: Zea mays
  misc_feature: MA Experiment 20000487 PARAMETER Experiment Name: Zm_50mM_NH4NO3_L_to_H_P Parameter: Timepoint (hr) Value: 4
  misc_feature: MA Experiment 20000487 PARAMETER Experiment Name: Zm_50mM_NH4NO3_L_to_H_P Parameter: Tissue Value: Leaves
  misc_feature: MA Experiment 20000487 PARAMETER Experiment Name: Zm_50mM_NH4NO3_L_to_H_P Parameter: Treatment Value: 50mM NH4NO3 vs. 100mM Mannitol
  misc_feature: MA Experiment ID: 20000626 Result: Down-regulated in Transcription
  misc_feature: MA Experiment 20000626 PARAMETER Experiment Name: Zm_Herbicide-Treatments_P Parameter: Timepoint (hr) Value: 12
  misc_feature: MA Experiment 20000626 PARAMETER Experiment Name: Zm_Herbicide-Treatments_P Parameter: Tissue Value: Aerial
  misc_feature: MA Experiment 20000626 PARAMETER Experiment Name: Zm_Herbicide-Treatments_P Parameter: Treatment Value: Roundup vs. No Treatment
  misc_feature: MA Experiment ID: 20000629 Result: Down-regulated in Transcription
  misc_feature: MA Experiment 20000629 PARAMETER Experiment Name: Zm_Herbicide-Treatments_P Parameter: Timepoint (hr) Value: 12
  misc_feature: MA Experiment 20000629 PARAMETER Experiment Name: Zm_Herbicide-Treatments_P Parameter: Tissue Value: Aerial
  misc_feature: MA Experiment 20000629 PARAMETER Experiment Name: Zm_Herbicide-Treatments_P Parameter: Treatment Value: Trimec vs. No Treatment
  misc_feature: MA Experiment ID: 20000633 Result: Down-regulated in Transcription
  misc_feature: MA Experiment 20000633 PARAMETER Experiment Name: Zm_Herbicide-Treatments_P Parameter: Timepoint (hr) Value: 4
  misc_feature: MA Experiment 20000633 PARAMETER Experiment Name: Zm_Herbicide-Treatments_P Parameter: Tissue Value: Aerial
  misc_feature: MA Experiment 20000633 PARAMETER Experiment Name: Zm_Herbicide-Treatments_P Parameter: Treatment Value: Trimec vs. No Treatment

SEQ ID NO: 977 - protein, 179 aa, Zea mays subsp. mays; identical to SEQ ID NO: 721
  peptide (1)..(179): Ceres Seq. ID no. 13492970

SEQ ID NO: 978 - DNA, 508 bp, Zea mays subsp. mays; identical to SEQ ID NO: 964
  misc_feature (1)..(508): Ceres Seq. ID no. 12379477
  misc_feature: MA Experiment ID: 108530 Result: Down-regulated in Transcription
  misc_feature: MA Experiment 108530 PARAMETER Experiment Name: Zm_Imbibed_Seeds_P Parameter: Age (day) Value: 6 vs. 2
  misc_feature: MA Experiment 108530 PARAMETER Experiment Name: Zm_Imbibed_Seeds_P Parameter: Organism Value: Zea mays
  misc_feature: MA Experiment 108530 PARAMETER Experiment Name: Zm_Imbibed_Seeds_P Parameter: Plant Line Value: 35A19
  misc_feature: MA Experiment 108530 PARAMETER Experiment Name: Zm_Imbibed_Seeds_P Parameter: Tissue Value: Aerial vs. Embryo
  misc_feature: MA Experiment ID: 108535 Result: Up-regulated in Transcription
  misc_feature: MA Experiment 108535 PARAMETER Experiment Name: Zm_Meristem_P Parameter: Age (day) Value: 8
  misc_feature: MA Experiment 108535 PARAMETER Experiment Name: Zm_Meristem_P Parameter: Organism Value: Zea mays
  misc_feature: MA Experiment 108535 PARAMETER Experiment Name: Zm_Meristem_P Parameter: Plant Line Value: 35A19
  misc_feature: MA Experiment 108535 PARAMETER Experiment Name: Zm_Meristem_P Parameter: Tissue Value: Root Meristem vs. Above Root Meristem
  misc_feature: MA Experiment ID: 108543 Result: Up-regulated in Transcription
  misc_feature: MA Experiment ID: 20000478 Result: Down-regulated in Transcription
  misc_feature: MA Experiment 20000478 PARAMETER Experiment Name: Zm_5mM_SA_P Parameter: Age (day) Value: 11
  misc_feature: MA Experiment 20000478 PARAMETER Experiment Name: Zm_5mM_SA_P Parameter: Organism Value: Zea mays
  misc_feature: MA Experiment 20000478 PARAMETER Experiment Name: Zm_5mM_SA_P Parameter: Plant Line Value: 35A19
  misc_feature: MA Experiment 20000478 PARAMETER Experiment Name: Zm_5mM_SA_P Parameter: Timepoint (hr) Value: 72
  misc_feature: MA Experiment 20000478 PARAMETER Experiment Name: Zm_5mM_SA_P Parameter: Tissue Value: Aerial
  misc_feature: MA Experiment 20000478 PARAMETER Experiment Name: Zm_5mM_SA_P Parameter: Treatment Value: 5mM SA vs. No Treatment
  misc_feature: MA Experiment ID: 20000480 Result: Down-regulated in Transcription
  misc_feature: MA Experiment 20000480 PARAMETER Experiment Name: Zm_Drought_P Parameter: Age (day) Value: 11
  misc_feature: MA Experiment 20000480 PARAMETER Experiment Name: Zm_Drought_P Parameter: Organism Value: Zea mays
  misc_feature: MA Experiment 20000480 PARAMETER Experiment Name: Zm_Drought_P Parameter: Plant Line Value: 35A19
  misc_feature: MA Experiment 20000480 PARAMETER Experiment Name: Zm_Drought_P Parameter: Timepoint (hr) Value: 72
  misc_feature: MA Experiment 20000480 PARAMETER Experiment Name: Zm_Drought_P Parameter: Tissue Value: Aerial
  misc_feature: MA Experiment 20000480 PARAMETER Experiment Name: Zm_Drought_P Parameter: Treatment Value: Drought vs. No Drought
  misc_feature: MA Experiment ID: 20000492 Result: Up-regulated in Transcription
  misc_feature: MA Experiment 20000492 PARAMETER Experiment Name: Zm_Hybrid_Seed_Dev_P Parameter: DAP Value: 12
  misc_feature: MA Experiment 20000492 PARAMETER Experiment Name: Zm_Hybrid_Seed_Dev_P Parameter: Organism Value: Zea mays
  misc_feature: MA Experiment 20000492 PARAMETER Experiment Name: Zm_Hybrid_Seed_Dev_P Parameter: Plant Line Value: 35A19
  misc_feature: MA Experiment 20000492 PARAMETER Experiment Name: Zm_Hybrid_Seed_Dev_P Parameter: Tissue Value: Fert Kernel vs. Unfert Floret
  misc_feature: MA Experiment ID: 20000535 Result: Up-regulated in Transcription
  misc_feature: MA Experiment 20000535 PARAMETER Experiment Name: Zm_Hybrid_Seed_Dev_P Parameter: DAP Value: 30 vs. 12
  misc_feature: MA Experiment 20000535 PARAMETER Experiment Name: Zm_Hybrid_Seed_Dev_P Parameter: Organism Value: Zea mays
  misc_feature: MA Experiment 20000535 PARAMETER Experiment Name: Zm_Hybrid_Seed_Dev_P Parameter: Plant Line Value: 35A19
  misc_feature: MA Experiment 20000535 PARAMETER Experiment Name: Zm_Hybrid_Seed_Dev_P Parameter: Tissue Value: Embryo vs. Unfert Floret
  misc_feature: MA Experiment ID: 20000626 Result: Down-regulated in Transcription
  misc_feature: MA Experiment 20000626 PARAMETER Experiment Name: Zm_Herbicide-Treatments_P Parameter: Timepoint (hr) Value: 12
  misc_feature: MA Experiment 20000626 PARAMETER Experiment Name: Zm_Herbicide-Treatments_P Parameter: Tissue Value: Aerial
  misc_feature: MA Experiment 20000626 PARAMETER Experiment Name: Zm_Herbicide-Treatments_P Parameter: Treatment Value: Roundup vs. No Treatment
  misc_feature: MA Experiment ID: 20000632 Result: Down-regulated in Transcription
  misc_feature: MA Experiment 20000632 PARAMETER Experiment Name: Zm_Herbicide-Treatments_P Parameter: Timepoint (hr) Value: 4
  misc_feature: MA Experiment 20000632 PARAMETER Experiment Name: Zm_Herbicide-Treatments_P Parameter: Tissue Value: Aerial
  misc_feature: MA Experiment 20000632 PARAMETER Experiment Name: Zm_Herbicide-Treatments_P Parameter: Treatment Value: Glean vs. No Treatment

SEQ ID NO: 979 - protein, 95 aa, Zea mays subsp. mays; identical to SEQ ID NO: 965
  peptide (1)..(95): Ceres Seq. ID no. 12379478

SEQ ID NO: 980 - DNA, 723 bp, Zea mays subsp. mays; identical to SEQ ID NO: 966
  misc_feature (1)..(723): Ceres Seq. ID no. 14312743
  misc_feature: MA Experiment ID: 108534 Result: Up-regulated in Transcription
  misc_feature: MA Experiment 108534 PARAMETER Experiment Name: Zm_4deg_Cold_P Parameter: Age (hr) Value: 8
  misc_feature: MA Experiment 108534 PARAMETER Experiment Name: Zm_4deg_Cold_P Parameter: Organism Value: Zea mays
  misc_feature: MA Experiment 108534 PARAMETER Experiment Name: Zm_4deg_Cold_P Parameter: Plant Line Value: 35A19
  misc_feature: MA Experiment 108534 PARAMETER Experiment Name: Zm_4deg_Cold_P Parameter: Temperature (deg C) Value: 4 vs. 22
  misc_feature: MA Experiment 108534 PARAMETER Experiment Name: Zm_4deg_Cold_P Parameter: Timepoint (hr) Value: 6
  misc_feature: MA Experiment 108534 PARAMETER Experiment Name: Zm_4deg_Cold_P Parameter: Tissue Value: Aerial

SEQ ID NO: 981 - protein, 136 aa, Zea mays subsp. mays; identical to SEQ ID NO: 967
  peptide (1)..(136): Ceres Seq. ID no. 14312744

SEQ ID NO: 982 - protein, 126 aa, Zea mays subsp. mays; identical to SEQ ID NO: 968
  peptide (1)..(126): Ceres Seq. ID no. 14312745

SEQ ID NO: 983 - protein, 76 aa, Zea mays subsp. mays; identical to SEQ ID NO: 969
  peptide (1)..(76): Ceres Seq. ID no. 14312746

SEQ ID NO: 984 - DNA, 1458 bp, Zea mays subsp. mays
  misc_feature (1)..(1458): Ceres Seq. ID no. 13599231
  misc_feature: MA Experiment ID: 108522 Result: Up-regulated in Transcription
  misc_feature: MA Experiment 108522 PARAMETER Experiment Name: Zm_42deg_Heat_P Parameter: Age (day) Value: 8
  misc_feature: MA Experiment 108522 PARAMETER Experiment Name: Zm_42deg_Heat_P Parameter: Organism Value: Zea mays
  misc_feature: MA Experiment 108522 PARAMETER Experiment Name: Zm_42deg_Heat_P Parameter: Plant Line Value: 35A19
  misc_feature: MA Experiment 108522 PARAMETER Experiment Name: Zm_42deg_Heat_P Parameter: Temperature (deg C) Value: 42 vs. 22
  misc_feature: MA Experiment 108522 PARAMETER Experiment Name: Zm_42deg_Heat_P Parameter: Timepoint (hr) Value: 1
  misc_feature: MA Experiment 108522 PARAMETER Experiment Name: Zm_42deg_Heat_P Parameter: Tissue Value: Aerial
ctaattttacgaagcccgttaatcgcgttaccagcaatccaaaaagctccacaaccccacccttcttcttcctccgccatcgttgcctccgttcaaaagatttcagaaacccacacccacctaaacccatgcagtcccttgcgaaatctcggtcgctcgagtccgtccttcccctcgccgtccacctccagtccatggcgtacgtgaatgtgacgatgcggtggaagaaggactcatcgtttgatgccatccccgagatctcccacgcgcgcgacatccgcccgctcgtctccctcgcacacatcctgtccccatcgcccacccctgtatctgcggtctccaagctcggccccttgctcgagatcccagaccgccgggtcaccgctttcctccgccgcttccccgccgccttcgtcgagtctgtggggcagcacaacatcccctggttccgtctctctgatgccgccacccgactcctgcgggaggagcgggccgtcttcgccgcccgccgtgccgatgtctgtgctcgcctgcgccgcatcgtcttgatgaccccgcgacgccgcctcccgctccacatcgcgcagggcatgctctggcatcttggcattccagagaactacttaaaggacctggatcatgacattgcacaggatggattcaggattgtaatttcaggagatggtgaccatgggagggaattggagctaattgacgatggcaagaatgaagaaatgcctctgtcagttcttcaggtaaatgctatgagaaagttggggtcggtggaagaggtgcctgtcccgctcttcccgtccaagggtcttcggttgaagcaaaagattaaggactggttggaagggttccagaggctcccttatgtatctccatatgagaatttcagccacatcaatccgggtagtgatgtttcagagaagcgggcagtcggggtgctccatgagctgcttagtctgtttgtgacatgctctgctgagaggcgacggttacgctgcctccggcagcacctagggctgccacagaagtttcatcttgtgttcgagcggcaccctcatgtgttctacttattgttaaaggagaagacatgctttgttgtcctcaaagaggcctacatagctggagaagacactgcaattgaggcgcaccccatgttggaagtgttcaagaagtatgttgagttgatggagcagtcacgggaaatcataagatgtcgacggagcgggaagcctattgaactagagtccaaggcatgcggggatagctgagaagaaggatgggaatacatgtgcaaatatgacctctataacaagaatgtggatatgtactcttggtaggagctagtttatttctcattatttgtagagaaatatttctcattatttgtagagaaatacatcaagtgctgaaacaggttggtgactatgatatttaatctgcattctt

SEQ ID NO: 985 - protein, 425 aa, Zea mays subsp. mays
  peptide (1)..(425): Ceres Seq. ID no. 15222542
  misc_feature (74)..(407): Pfam Name: Plant specific of unknown function (DUF860) Pfam Description: Plant specific of unknown function (DUF860)
  misc_feature (84)..(401): Homolog of NCBI NO: 15224649 NR Description: expressed protein [Arabidopsis thaliana]
  misc_feature (74)..(420): Homolog of NCBI NO: 34894384 NR Description: unnamed protein product [Oryza sativa (japonica
  misc_feature (68)..(424): Homolog of NCBI NO: 3413424 NR Description: hypothetical protein [Arabidopsis thaliana]
  misc_feature (68)..(424): Homolog of NCBI NO: 15217597 NR Description: hypothetical protein [Arabidopsis thaliana]
  misc_feature (63)..(424): Homolog of NCBI NO: 15233788 NR Description: hypothetical protein [Arabidopsis thaliana]
  misc_feature (70)..(412): Homolog of NCBI NO: 21536812 NR Description: unknown [Arabidopsis thaliana]
  misc_feature (66)..(412): Homolog of NCBI NO: 18410975 NR Description: expressed protein [Arabidopsis thaliana]
  misc_feature (66)..(412): Homolog of NCBI NO: 11282335 NR Description: hypothetical protein F14P22.110 - Arabidopsis
  misc_feature (63)..(401): Homolog of NCBI NO: 15238875 NR Description: hypothetical protein [Arabidopsis thaliana]
  misc_feature (46)..(411): Homolog of NCBI NO: 15225035 NR Description: hypothetical protein [Arabidopsis thaliana]
NFTKPVNRVTSNPKSSTTPPFFFLRHRCLRSKDFRNPHPPKPMQSLAKSRSLESVLPLAVHLQSMAYVNVTMRWKKDSSFDAIPEISHARDIRPLVSLAHILSPSPTPVSAVSKLGPLLEIPDRRVTAFLRRFPAAFVESVGQHNIPWFRLSDAATRLLREERAVFAARRADVCARLRRIVLMTPRRRLPLHIAQGMLWHLGIPENYLKDLDHDIAQDGFRIVISGDGDHGRELELIDDGKNEEMPLSVLQVNAMRKLGSVEEVPVPLFPSKGLRLKQKIKDWLEGFQRLPYVSPYENFSHINPGSDVSEKRAVGVLHELLSLFVTCSAERRRLRCLRQHLGLPQKFHLVFERHPHVFYLLLKEKTCFVVLKEAYIAGEDTAIEAHPMLEVFKKYVELMEQSREIIRCRRSGKPIELESKACGDS

SEQ ID NO: 986 - protein, 383 aa, Zea mays subsp. mays
  peptide (1)..(383): Ceres Seq. ID no. 15222543
  misc_feature (32)..(365): Pfam Name: Plant specific of unknown function (DUF860) Pfam Description: Plant specific of unknown function (DUF860)
  misc_feature (42)..(359): Homolog of NCBI NO: 15224649 NR Description: expressed protein [Arabidopsis thaliana]
  misc_feature (32)..(378): Homolog of NCBI NO: 34894384 NR Description: unnamed protein product [Oryza sativa (japonica
  misc_feature (26)..(382): Homolog of NCBI NO: 3413424 NR Description: hypothetical protein [Arabidopsis thaliana]
  misc_feature (26)..(382): Homolog of NCBI NO: 15217597 NR Description: hypothetical protein [Arabidopsis thaliana]
  misc_feature (21)..(382): Homolog of NCBI NO: 15233788 NR Description: hypothetical protein [Arabidopsis thaliana]
  misc_feature (28)..(370): Homolog of NCBI NO: 21536812 NR Description: unknown [Arabidopsis thaliana]
  misc_feature (24)..(370): Homolog of NCBI NO: 18410975 NR Description: expressed protein [Arabidopsis thaliana]
  misc_feature (24)..(370): Homolog of NCBI NO: 11282335 NR Description: hypothetical protein F14P22.110 - Arabidopsis
  misc_feature (21)..(359): Homolog of NCBI NO: 15238875 NR Description: hypothetical protein [Arabidopsis thaliana]
  misc_feature (4)..(369): Homolog of NCBI NO: 15225035 NR Description: hypothetical protein [Arabidopsis thaliana]
MQSLAKSRSLESVLPLAVHLQSMAYVNVTMRWKKDSSFDAIPEISHARDIRPLVSLAHILSPSPTPVSAVSKLGPLLEIPDRRVTAFLRRFPAAFVESVGQHNIPWFRLSDAATRLLREERAVFAARRADVCARLRRIVLMTPRRRLPLHIAQGMLWHLGIPENYLKDLDHDIAQDGFRIVISGDGDHGRELELIDDGKNEEMPLSVLQVNAMRKLGSVEEVPVPLFPSKGLRLKQKIKDWLEGFQRLPYVSPYENFSHINPGSDVSEKRAVGVLHELLSLFVTCSAERRRLRCLRQHLGLPQKFHLVFERHPHVFYLLLKEKTCFVVLKEAYIAGEDTAIEAHPMLEVFKKYVELMEQSREIIRCRRSGKPIELESKACGDS

SEQ ID NO: 987 - protein, 361 aa, Zea mays subsp. mays
  peptide (1)..(361): Ceres Seq. ID no. 15222544
  misc_feature (10)..(343): Pfam Name: Plant specific of unknown function (DUF860) Pfam Description: Plant specific of unknown function (DUF860)
  misc_feature (20)..(337): Homolog of NCBI NO: 15224649 NR Description: expressed protein [Arabidopsis thaliana]
  misc_feature (10)..(356): Homolog of NCBI NO: 34894384 NR Description: unnamed protein product [Oryza sativa (japonica
  misc_feature (4)..(360): Homolog of NCBI NO: 3413424 NR Description: hypothetical protein [Arabidopsis thaliana]
  misc_feature (4)..(360): Homolog of NCBI NO: 15217597 NR Description: hypothetical protein [Arabidopsis thaliana]
  misc_feature (1)..(360): Homolog of NCBI NO: 15233788 NR Description: hypothetical protein [Arabidopsis thaliana]
  misc_feature (6)..(348): Homolog of NCBI NO: 21536812 NR Description: unknown [Arabidopsis thaliana]
  misc_feature (2)..(348): Homolog of NCBI NO: 18410975 NR Description: expressed protein [Arabidopsis thaliana]
  misc_feature (2)..(348): Homolog of NCBI NO: 11282335 NR Description: hypothetical protein F14P22.110 - Arabidopsis
  misc_feature (1)..(337): Homolog of NCBI NO: 15238875 NR Description: hypothetical protein [Arabidopsis thaliana]
  misc_feature (1)..(347): Homolog of NCBI NO: 15225035 NR Description: hypothetical protein [Arabidopsis thaliana]
MAYVNVTMRWKKDSSFDAIPEISHARDIRPLVSLAHILSPSPTPVSAVSKLGPLLEIPDRRVTAFLRRFPAAFVESVGQHNIPWFRLSDAATRLLREERAVFAARRADVCARLRRIVLMTPRRRLPLHIAQGMLWHLGIPENYLKDLDHDIAQDGFRIVISGDGDHGRELELIDDGKNEEMPLSVLQVNAMRKLGSVEEVPVPLFPSKGLRLKQKIKDWLEGFQRLPYVSPYENFSHINPGSDVSEKRAVGVLHELLSLFVTCSAERRRLRCLRQHLGLPQKFHLVFERHPHVFYLLLKEKTCFVVLKEAYIAGEDTAIEAHPMLEVFKKYVELMEQSREIIRCRRSGKPIELESKACGDS

SEQ ID NO: 988 - DNA, 930 bp, Zea mays subsp. mays
  misc_feature (1)..(930): Ceres Seq. ID no. 13599585
acacattcaaactaataactctcaaaaactgagagcagaagagagtagaggagaaacaaatgtccatatccatggcgctattctctccgccgatctcttcttcagttcaaaaccccaagatctcgttccctctcctctccaccaagcgcttctctctcctctccgtcactcgcgcttcctccgattctgctgcagtctctgcaaccaccgtagagattccgaagcccgcgtcggtttctgtagaggaggtgccatctaaacctcctgcggaaagctcctccgacgagactgatctgccaaccacggcgacgggaatcaagtttcaggatgcgaagtgggttaatggaacctgggatctgaaacagttcgagaaagacgggaaaaccgattgggattctattatcgtcgctgaggcaaagaggagaaagtggcttgaagataacccagaaacaactactaacgctgagcctgttcttttcgacacctcgatcattccatggtgggcgtggatgaagagataccatctaccagaagctgaactcctcaatggtcgtgctgcgatgatagggttcttcatggcttactttgttgacagccttaccggagtaggacttgttgatcaaatgggaaacttcttctgcaaaacactcttgtttgtggctgtagctggagttcttttcatccgcaagaacgaagatttagataagctcaagggtctgatcgaagagacgacgctatatgacaagcaatggcaagcggcttggaaagagccggaatcatcatcatcgacgctttcttcaaagaagtgaacaaaatctttctcgctttttgtttcctcttttctcatgtgatgtttgtgatcagtgaaaaaagtctcaagataaacgcaaaatctatttggctttgaaaaaatctctttaaagtagtccc

SEQ ID NO: 989 - protein, 249 aa, Zea mays subsp. mays
  peptide (1)..(249): Ceres Seq. ID no. 15218600
  misc_feature (19)..(249): Homolog of NCBI NO: 18414927 NR Description: Lil3 protein [Arabidopsis thaliana]
  misc_feature (19)..(249): Homolog of NCBI NO: 7485188 NR Description: hypothetical protein - Arabidopsis thaliana
  misc_feature (19)..(249): Homolog of NCBI NO: 21555799 NR Description: Lil3 protein [Arabidopsis thaliana]
  misc_feature (5)..(249): Homolog of NCBI NO: 8978078 NR Description: Lil3 protein [Arabidopsis thaliana]
  misc_feature (1)..(249): Homolog of NCBI NO: 30695110 NR Description: Lil3 protein [Arabidopsis thaliana]
MSISMALFSPPISSSVQNPKISFPLLSTKRFSLLSVTRASSDSAAVSATTVEIPKPASVSVEEVPSKPPAESSSDETDLPTTATGIKFQDAKWVNGTWDLKQFEKDGKTDWDSIIVAEAKRRKWLEDNPETTTNAEPVLFDTSIIPWWAWMKRYHLPEAELLNGRAAMIGFFMAYFVDSLTGVGLVDQMGNFFCKTLLFVAVAGVLFIRKNEDLDKLKGLIEETTLYDKQWQAAWKEPESSSSTLSSKK

SEQ ID NO: 990 - protein, 245 aa, Zea mays subsp. mays
  peptide (1)..(245): Ceres Seq. ID no. 15218601
  misc_feature (15)..(245): Homolog of NCBI NO: 18414927 NR Description: Lil3 protein [Arabidopsis thaliana]
  misc_feature (15)..(245): Homolog of NCBI NO: 7485188 NR Description: hypothetical protein - Arabidopsis thaliana
  misc_feature (15)..(245): Homolog of NCBI NO: 21555799 NR Description: Lil3 protein [Arabidopsis thaliana]
  misc_feature (1)..(245): Homolog of NCBI NO: 8978078 NR Description: Lil3 protein [Arabidopsis thaliana]
  misc_feature (1)..(245): Homolog of NCBI NO: 30695110 NR Description: Lil3 protein [Arabidopsis thaliana]
MALFSPPISSSVQNPKISFPLLSTKRFSLLSVTRASSDSAAVSATTVEIPKPASVSVEEVPSKPPAESSSDETDLPTTATGIKFQDAKWVNGTWDLKQFEKDGKTDWDSIIVAEAKRRKWLEDNPETTTNAEPVLFDTSIIPWWAWMKRYHLPEAELLNGRAAMIGFFMAYFVDSLTGVGLVDQMGNFFCKTLLFVAVAGVLFIRKNEDLDKLKGLIEETTLYDKQWQAAWKEPESSSSTLSSKK

SEQ ID NO: 991 - DNA, 727 bp, Zea mays subsp. mays
  misc_feature (1)..(727): Ceres Seq. ID no. 13599232
agtgttttctagtgactcggaaaggaaagcgtgactcgctctgaagactcagtgagggctctgtgatcggagttgtaaaaatgtcgacggtggtagatcggagtgtatcgacgctgaatccaaacgcgccggcgttcgatccggtgggattccgtgaggtagaggatttctctcccaagtggtgggagctggtgacaacatccaagtggttccgtgacttctggctcagtgccaactcggaggagtatgagttcggcgagttctcagatatggaggacgagttcgaggagctagtcatgacgtcatccggtgagaatgagatggatggatcttcggtgagagaatcagatgttgggaggtacttgaaggtgcttctgagcatggcgaagtctacgaaagggaagctttacagatctaatgtgtcttgttctgccaagtataaccagaagaagatgaacccaaacttctactgtcgccggaaccatcacatctatcagcctcggtgaaaaggttgcagcagcgtctgggaaagaaataaaagctcatctctaaatctcttgtgttttcatgaatgagatactctcatctttacttcttgttctgtactacttgttcctctgattatgtgaatattcttctgttttgtgctttgcgtttatcaaaataatttcgcatagaaaaaaaaaaaaaaaaaagcttatcgataccgtcgacctcgagggggggc

SEQ ID NO: 992 - protein, 141 aa, Zea mays subsp. mays
  peptide (1)..(141): Ceres Seq. ID no. 13599233
  misc_feature (1)..(67): Homolog of NCBI NO: 21592689 NR Description: ERD15 protein [Arabidopsis thaliana]
  misc_feature (1)..(67): Homolog of NCBI NO: 15227351 NR Description: ERD15 protein [Arabidopsis thaliana]
  misc_feature (10)..(113): Homolog of NCBI NO: 8489786 NR Description: dehydration-induced protein ERD15 [Lycopersicon
  misc_feature (1)..(123): Homolog of NCBI NO: 7485087 NR Description: hypothetical protein - Arabidopsis thaliana
  misc_feature (1)..(141): Homolog of NCBI NO: 21592596 NR Description: unknown [Arabidopsis thaliana]
  misc_feature (1)..(141): Homolog of NCBI NO: 18414176 NR Description: expressed protein [Arabidopsis thaliana]
  misc_feature (9)..(57): Homolog of NCBI NO: 34899128 NR Description: P0496C02.30 [Oryza sativa (japonica
  misc_feature (8)..(57): Homolog of NCBI NO: 34395186 NR Description: unknown protein [Oryza sativa (japonica
MSTVVDRSVSTLNPNAPAFDPVGFREVEDFSPKWWELVTTSKWFRDFWLSANSEEYEFGEFSDMEDEFEELVMTSSGENEMDGSSVRESDVGRYLKVLLSMAKSTKGKLYRSNVSCSAKYNQKKMNPNFYCRRNHHIYQPR

SEQ ID NO: 993 - protein, 78 aa, Zea mays subsp. mays
  peptide (1)..(78): Ceres Seq. ID no. 13599234
  misc_feature (1)..(50): Homolog of NCBI NO: 8489786 NR Description: dehydration-induced protein ERD15 [Lycopersicon
  misc_feature (1)..(60): Homolog of NCBI NO: 7485087 NR Description: hypothetical protein - Arabidopsis thaliana
  misc_feature (1)..(78): Homolog of NCBI NO: 21592596 NR Description: unknown [Arabidopsis thaliana]
  misc_feature (1)..(78): Homolog of NCBI NO: 18414176 NR Description: expressed protein [Arabidopsis thaliana]
MEDEFEELVMTSSGENEMDGSSVRESDVGRYLKVLLSMAKSTKGKLYRSNVSCSAKYNQKKMNPNFYCRRNHHIYQPR

SEQ ID NO: 994 - DNA, 825 bp, Zea mays subsp. mays
  misc_feature (1)..(825): Ceres Seq. ID no. 13623012
gaaaaaaaacagaactcgcaccgttctcgtctaatctctctctcgacaatggctcgatcttcgtctccgtctctttctctctcccggtgccgattcgccgcggcttatctcctcccttcatctcgatccatcttcttccgatctcaatcctcgaatcgccgctctaacctcggggagctgattgagatcgatgtcgccgcgtcgcagtcgcagtcgcaatcggatcctctttcgcagaagctggaggacgcggtgcaccggataatggtgcgccgagccgcgcctgattggctccctttccttcccggcgcttcgtattgggtcccgcctcgtaggtcccagtcccatgggatcgctaagctcgttgagaagctggcgaatcccatcggcgatgaagagtcagtctctgtcgcgtcgggtcgtggatggccttgttctgattacttcatcaaaggtgtagagcctgaatcggtggagacggagatggcttcaggtactgctgcatctcactctgaggatgaggaaggctaaaacattaaaactcgttaaaaccattgtctggactcttcaaaagatttgttgattttaggaacgcggatcaaagaagaattgaaccaccaagagcggttttgaagaggtgacatggtttagactttaagagagggtagaggaaacaaaccttttacaacacatgagatcctatcaagttctgaaatgttaaaaaaaaaaacaataagaaaaggcgttgtagctcagccccctgttttcaatgtaatctttcttataacagtttgatgaatcctgtgtatatatatattcgccggg

SEQ ID NO: 995 - protein, 176 aa, Zea mays subsp. mays
  peptide (1)..(176): Ceres Seq. ID no. 15219384
  misc_feature (17)..(175): Homolog of NCBI NO: 38346553 NR Description: OSJNBa0035M09.14 [Oryza sativa (japonica
  misc_feature (17)..(170): Homolog of NCBI NO: 38175698 NR Description: unknown protein [Oryza sativa (japonica
  misc_feature (51)..(164): Homolog of NCBI NO: 18398961 NR Description: expressed protein [Arabidopsis thaliana]
  misc_feature (51)..(164): Homolog of NCBI NO: 14423398 NR Description: Unknown protein [Arabidopsis thaliana]
  misc_feature (17)..(152): Homolog of NCBI NO: 30685027 NR Description: expressed protein [Arabidopsis thaliana]
  misc_feature (17)..(175): Homolog of NCBI NO: 18394407 NR Description: expressed protein [Arabidopsis thaliana]
  misc_feature (17)..(175): Homolog of NCBI NO: 25364101 NR Description: hypothetical protein F9K20.6 [imported] -
  misc_feature (17)..(175): Homolog of NCBI NO: 18412160 NR Description: expressed protein [Arabidopsis thaliana]
  misc_feature (17)..(175): Homolog of NCBI NO: 21592720 NR Description: unknown [Arabidopsis thaliana]
EKKQNSHRSRLISLSTMARSSSPSLSLSRCRFAAAYLLPSSRSIFFRSQSSNRRSNLGELIEIDVAASQSQSQSDPLSQKLEDAVHRIMVRRAAPDWLPFLPGASYWVPPRRSQSHGIAKLVEKLANPIGDEESVSVASGRGWPCSDYFIKGVEPESVETEMASGTAASHSEDEEG

SEQ ID NO: 996 - protein, 160 aa, Zea mays subsp. mays
  peptide (1)..(160): Ceres Seq. ID no. 15219385
  misc_feature (1)..(159): Homolog of NCBI NO: 38346553 NR Description: OSJNBa0035M09.14 [Oryza sativa (japonica
  misc_feature (1)..(154): Homolog of NCBI NO: 38175698 NR Description: unknown protein [Oryza sativa (japonica
  misc_feature (35)..(148): Homolog of NCBI NO: 18398961 NR Description: expressed protein [Arabidopsis thaliana]
  misc_feature (35)..(148): Homolog of NCBI NO: 14423398 NR Description: Unknown protein [Arabidopsis thaliana]
  misc_feature (1)..(136): Homolog of NCBI NO: 30685027 NR Description: expressed protein [Arabidopsis thaliana]
  misc_feature (1)..(159): Homolog of NCBI NO: 18394407 NR Description: expressed protein [Arabidopsis thaliana]
  misc_feature (1)..(159): Homolog of NCBI NO: 25364101 NR Description: hypothetical protein F9K20.6 [imported] -
  misc_feature (1)..(159): Homolog of NCBI NO: 18412160 NR Description: expressed protein [Arabidopsis thaliana]
  misc_feature (1)..(159): Homolog of NCBI NO: 21592720 NR Description: unknown [Arabidopsis thaliana]
MARSSSPSLSLSRCRFAAAYLLPSSRSIFFRSQSSNRRSNLGELIEIDVAASQSQSQSDPLSQKLEDAVHRIMVRRAAPDWLPFLPGASYWVPPRRSQSHGIAKLVEKLANPIGDEESVSVASGRGWPCSDYFIKGVEPESVETEMASGTAASHSEDEEG

SEQ ID NO: 997 - protein, 88 aa, Zea mays subsp. mays
  peptide (1)..(88): Ceres Seq. ID no. 15219386
  misc_feature (1)..(87): Homolog of NCBI NO: 38346553 NR Description: OSJNBa0035M09.14 [Oryza sativa (japonica
  misc_feature (1)..(82): Homolog of NCBI NO: 38175698 NR Description: unknown protein [Oryza sativa (japonica
  misc_feature (1)..(76): Homolog of NCBI NO: 18398961 NR Description: expressed protein [Arabidopsis thaliana]
  misc_feature (1)..(76): Homolog of NCBI NO: 14423398 NR Description: Unknown protein [Arabidopsis thaliana]
  misc_feature (1)..(64): Homolog of NCBI NO: 30685027 NR Description: expressed protein [Arabidopsis thaliana]
  misc_feature (1)..(87): Homolog of NCBI NO: 18394407 NR Description: expressed protein [Arabidopsis thaliana]
  misc_feature (1)..(87): Homolog of NCBI NO: 25364101 NR Description: hypothetical protein F9K20.6 [imported] -
  misc_feature (1)..(87): Homolog of NCBI NO: 18412160 NR Description: expressed protein [Arabidopsis thaliana]
  misc_feature (1)..(87): Homolog of NCBI NO: 21592720 NR Description: unknown [Arabidopsis thaliana]
MVRRAAPDWLPFLPGASYWVPPRRSQSHGIAKLVEKLANPIGDEESVSVASGRGWPCSDYFIKGVEPESVETEMASGTAASHSEDEEG

SEQ ID NO: 998 - DNA, 899 bp, Zea mays subsp. mays
  misc_feature (1)..(899): Ceres Seq. ID no. 15226901
ctcccccagcccacaggacaactacaaacgcaaacgcactgtgtgctgctgcctgctgctccgtgctgtgccgtggtgtcctcctctcacctgctccaaccaagcaccgccgtcccagcgtccctcaccggccatccagccagccgccgcacggcccgtcgaccccaccgcagggctccctcccgcgctgtcctctccagtctccagcgatgaagcgcctgctgcggcgcctctcccgcgtggccgcggccgacgcctgcgcctgcgccgccgccgcggcgtaccagccgctccggccgggcgccaaggcggccgcgctctccggcgcgcggcggctgggcggcggcgcgcgcgcgccgggtggccacgtgcccgtctgcgtcggcgaggagggcgggcccctggagcggtacgccgtgcgcgccgagctcctcgcccgccccgccttcgccgcgctgctccgccgcgccgcgcaggagtacggctacgcccgccccggcgcgctccgcatcccctgccccgtcgccgacttccgcgacctcctcgtccagctctcctccacctccgcggaccagcccgacgacgacgcggcgctctgctgccactactgctaggcgattctctggcgccaccgctctcattccacccatccaatccggcggaaaggacaaaaaaaaaaagaaagaaagaaagaaacattcgccgcagttgccgcggagggcgtaattgcgatttgcccttgccccctcggtgactgcagcgccaagtgctgctttgcttgtacatacgggagggttagttaagttaactgtgccgtggatccttggatggatgtgggcacggcagggattttctcctgcagctcaacaacagttttttgcgcctgctgtctgtctgat

SEQ ID NO: 999 - protein, 250 aa, Zea mays subsp. mays
  peptide (1)..(250): Ceres Seq. ID no. 15226902
  misc_feature (36)..(250): Homolog of NCBI NO: 29247944 NR Description: GLP_26_54603_52153 [Giardia lamblia ATCC 50803]
  misc_feature (64)..(226): Homolog of NCBI NO: 7949115 NR Description: Ser/Arg-related nuclear matrix protein
  misc_feature (61)..(205): Homolog of NCBI NO: 29247944 NR Description: GLP_26_54603_52153 [Giardia lamblia ATCC 50803]
  misc_feature (24)..(196): Homolog of NCBI NO: 29247944 NR Description: GLP_26_54603_52153 [Giardia lamblia ATCC 50803]
  misc_feature (32)..(80): Homolog of NCBI NO: 14599404 NR Description: protease 1 [Pneumocystis carinii]
  misc_feature (88)..(248): Homolog of NCBI NO: 15600175 NR Description: probable two-component sensor [Pseudomonas
  misc_feature (34)..(192): Homolog of NCBI NO: 25989119 NR Description: unknown [Streptomyces aureofaciens]
  misc_feature (40)..(250): Homolog of NCBI NO: 23018055 NR Description: COG1205: Distinct helicase family with a unique
SPSPQDNYKRKRTVCCCLLLRAVPWCPPLTCSNQAPPSQRPSPAIQPAAARPVDPTAGLPPALSSPVSSDEAPAAAPLPRGRGRRLRLRRRRGVPAAPAGRQGGRALRRAAAGRRRARAGWPRARLRRRGGRAPGAVRRARRAPRPPRLRRAAPPRRAGVRLRPPRRAPHPLPRRRLPRPPRPALLHLRGPARRRRGALLPLLLGDSLAPPLSFHPSNPAERTKKKRKKERNIRRSCRGGRNCDLPLPPR

SEQ ID NO: 1000 - protein, 203 aa, Zea mays subsp. mays
  peptide (1)..(203): Ceres Seq. ID no. 15226903
  misc_feature (99)..(185): Pfam Name: Auxin responsive protein Pfam Description: Auxin responsive protein
  misc_feature (119)..(188): Homolog of NCBI NO: 15232400 NR Description: auxin-induced (indole-3-acetic acid induced)
  misc_feature (70)..(184): Homolog of NCBI NO: 15219275 NR Description: auxin-induced (indole-3-acetic acid induced)
  misc_feature (70)..(191): Homolog of NCBI NO: 15223462 NR Description: auxin-induced (indole-3-acetic acid induced)
  misc_feature (70)..(184): Homolog of NCBI NO: 15230601 NR Description: auxin-induced (indole-3-acetic acid induced)
  misc_feature (70)..(194): Homolog of NCBI NO: 15219296 NR Description: auxin-induced (indole-3-acetic acid induced)
  misc_feature (53)..(190): Homolog of NCBI NO: 5852079 NR Description: zwh0002.1 [Oryza sativa (indica cultivar-group)]
  misc_feature (53)..(190): Homolog of NCBI NO: 38345606 NR Description: OSJNBa0093O08.8 [Oryza sativa (japonica
PPAHRTTTNANALCAAACCSVLCRGVLLSPAPTKHRRPSVPHRPSSQPPHGPSTPPQGSLPRCPLQSPAMKRLLRRLSRVAAADACACAAAAAYQPLRPGAKAAALSGARRLGGGARAPGGHVPVCVGEEGGPLERYAVRAELLARPAFAALLRRAAQEYGYARPGALRIPCPVADFRDLLVQLSSTSADQPDDDAALCCHYC

SEQ ID NO: 1001 - protein, 134 aa, Zea mays subsp. mays
  peptide (1)..(134): Ceres Seq. ID no. 15226904
  misc_feature (30)..(116): Pfam Name: Auxin responsive protein Pfam Description: Auxin responsive protein
  misc_feature (50)..(119): Homolog of NCBI NO: 15232400 NR Description: auxin-induced (indole-3-acetic acid induced)
  misc_feature (1)..(115): Homolog of NCBI NO: 15219275 NR Description: auxin-induced (indole-3-acetic acid induced)
  misc_feature (1)..(122): Homolog of NCBI NO: 15223462 NR Description: auxin-induced (indole-3-acetic acid induced)
  misc_feature (1)..(115): Homolog of NCBI NO: 15230601 NR Description: auxin-induced (indole-3-acetic acid induced)
  misc_feature (1)..(125): Homolog of NCBI NO: 15219296 NR Description: auxin-induced (indole-3-acetic acid induced)
  misc_feature (1)..(121): Homolog of NCBI NO: 5852079 NR Description: zwh0002.1 [Oryza sativa (indica cultivar-group)]
  misc_feature (1)..(121): Homolog of NCBI NO: 38345606 NR Description: OSJNBa0093O08.8 [Oryza sativa (japonica
MKRLLRRLSRVAAADACACAAAAAYQPLRPGAKAAALSGARRLGGGARAPGGHVPVCVGEEGGPLERYAVRAELLARPAFAALLRRAAQEYGYARPGALRIPCPVADFRDLLVQLSSTSADQPDDDAALCCHYC

SEQ ID NO: 1002 - DNA, 842 bp, Zea mays subsp. mays
  misc_feature (1)..(842): Ceres Seq. ID no. 13599328
ctttttccacttcctccctcctaatcctaaatcagcatcaatggcgattaccttctcagatctacacacagaggaaggcctcaaatccgtggaggagcacctcgccggaaaaacctacatctccggagatcaattgtccgtggatgatgtgaaggtatacgctgccgtttcggtgaaacctagcgatgctttccctaatgctagcaggtggttcgattgcgtcgcttcccatctagctaaaagcttccctggaaaagccgttggagttagtatcggtggctctgctgctgctgctcctgctcaagctgaggcacctgcagcagctgcagctgatgatgatgatgacatggatctgtttggtgacgagaccgaggaggaaaagaaagcagctgaggagagggaggctgccaagaaggacaccaaaaagcccaaagagagtggaaagtcctctgtgctcatggaagttaagccatgggatgacgagactgacatgaagaaacttgaggagtgtgttcgcgctgttgagatgcctggtcttctttggggagcttcaaaactggttccagttggttacggcatcaagaagctcacgatcatgctcacaatcgttgatgacctcgtgtccccagacaacctcattgaagactacctcacctgtgaacctaacaacgagtacatccagagtgttgacatcgtcgcattcaacaagatctagagactttaaaaacctctccccctaccaaacgatacattttgatttccttccaagttttgttatcttttgttgtttgcttgagatgcttattctctagttgcaagacctatgttacatgctatcaaag

SEQ ID NO: 1003 - protein, 237 aa, Zea mays subsp. mays
  peptide (1)..(237): Ceres Seq. ID no. 13599329
  misc_feature (148)..(237): Pfam Name: EF-1 guanine nucleotide exchange domain Pfam Description: EF-1 guanine nucleotide exchange domain
  misc_feature (14)..(237): Homolog of NCBI NO: 6166140 NR Description: ELONGATION FACTOR 1-BETA (EF-1-BETA)
  misc_feature (14)..(237): Homolog of NCBI NO: 38232568 NR Description: translational elongation factor 1 subunit Bbeta
  misc_feature (14)..(237): Homolog of NCBI NO: 6015064 NR Description: ELONGATION FACTOR 1-BETA (EF-1-BETA)
  misc_feature (14)..(237): Homolog of NCBI NO: 232033 NR Description: ELONGATION FACTOR 1-BETA' (EF-1-BETA')
  misc_feature (14)..(237): Homolog of NCBI NO: 34899162 NR Description: putative translation elongation factor eEF-1
  misc_feature (14)..(237): Homolog of NCBI NO: 232031 NR Description: ELONGATION FACTOR 1-BETA' (EF-1-BETA')
  misc_feature (14)..(237): Homolog of NCBI NO: 38175744 NR Description: putative translation elongation factor eEF-1
  misc_feature (32)..(237): Homolog of NCBI NO: 27754711 NR Description: putative elongation factor 1B alpha-subunit
  misc_feature (14)..(237): Homolog of NCBI NO: 15239877 NR Description: elongation factor 1B alpha-subunit
  misc_feature (14)..(237): Homolog of NCBI NO: 30687350 NR Description: elongation factor 1B alpha-subunit [Arabidopsis
FFHFLPPNPKSASMAITFSDLHTEEGLKSVEEHLAGKTYISGDQLSVDDVKVYAAVSVKPSDAFPNASRWFDCVASHLAKSFPGKAVGVSIGGSAAAAPAQAEAPAAAAADDDDDMDLFGDETEEEKKAAEEREAAKKDTKKPKESGKSSVLMEVKPWDDETDMKKLEECVRAVEMPGLLWGASKLVPVGYGIKKLTIMLTIVDDLVSPDNLIEDYLTCEPNNEYIQSVDIVAFNKI

SEQ ID NO: 1004 - protein, 224 aa, Zea mays subsp. mays
  peptide (1)..(224): Ceres Seq. ID no. 13599330
  misc_feature (135)..(224): Pfam Name: EF-1 guanine nucleotide exchange domain Pfam Description: EF-1 guanine nucleotide exchange domain
  misc_feature (1)..(224): Homolog of NCBI NO: 6166140 NR Description: ELONGATION FACTOR 1-BETA (EF-1-BETA)
  misc_feature (1)..(224): Homolog of NCBI NO: 38232568 NR Description: translational elongation factor 1 subunit Bbeta
  misc_feature (1)..(224): Homolog of NCBI NO: 6015064 NR Description: ELONGATION FACTOR 1-BETA (EF-1-BETA)
  misc_feature (1)..(224): Homolog of NCBI NO: 232033 NR Description: ELONGATION FACTOR 1-BETA' (EF-1-BETA')
  misc_feature (1)..(224): Homolog of NCBI NO: 34899162 NR Description: putative translation elongation factor eEF-1
  misc_feature (1)..(224): Homolog of NCBI NO: 232031 NR Description: ELONGATION FACTOR 1-BETA' (EF-1-BETA')
  misc_feature (1)..(224): Homolog of NCBI NO: 38175744 NR Description: putative translation elongation factor eEF-1
  misc_feature (19)..(224): Homolog of NCBI NO: 27754711 NR Description: putative elongation factor 1B alpha-subunit
  misc_feature (1)..(224): Homolog of NCBI NO: 15239877 NR Description: elongation factor 1B alpha-subunit
  misc_feature (1)..(224): Homolog of NCBI NO: 30687350 NR Description: elongation factor 1B alpha-subunit [Arabidopsis
MAITFSDLHTEEGLKSVEEHLAGKTYISGDQLSVDDVKVYAAVSVKPSDAFPNASRWFDCVASHLAKSFPGKAVGVSIGGSAAAAPAQAEAPAAAAADDDDDMDLFGDETEEEKKAAEEREAAKKDTKKPKESGKSSVLMEVKPWDDETDMKKLEECVRAVEMPGLLWGASKLVPVGYGIKKLTIMLTIVDDLVSPDNLIEDYLTCEPNNEYIQSVDIVAFNKI

SEQ ID NO: 1005 - protein, 122 aa, Zea mays subsp. mays
  peptide (1)..(122): Ceres Seq. ID no. 13599331
  misc_feature (33)..(122): Pfam Name: EF-1 guanine nucleotide exchange domain Pfam Description: EF-1 guanine nucleotide exchange domain
  misc_feature (1)..(122): Homolog of NCBI NO: 232031 NR Description: ELONGATION FACTOR 1-BETA' (EF-1-BETA')
  misc_feature (1)..(122): Homolog of NCBI NO: 38175744 NR Description: putative translation elongation factor eEF-1
  misc_feature (1)..(122): Homolog of NCBI NO: 27754711 NR Description: putative elongation factor 1B alpha-subunit
  misc_feature (1)..(122): Homolog of NCBI NO: 34899162 NR Description: putative translation elongation factor eEF-1
  misc_feature (1)..(122): Homolog of NCBI NO: 38232568 NR Description: translational elongation factor 1 subunit Bbeta
  misc_feature (1)..(122): Homolog of NCBI NO: 6015064 NR Description: ELONGATION FACTOR 1-BETA (EF-1-BETA)
  misc_feature (1)..(122): Homolog of NCBI NO: 6166140 NR Description: ELONGATION FACTOR 1-BETA (EF-1-BETA)
  misc_feature (1)..(122): Homolog of NCBI NO: 232033 NR Description: ELONGATION FACTOR 1-BETA' (EF-1-BETA')
  misc_feature (1)..(122): Homolog of NCBI NO: 15239877 NR Description: elongation factor 1B alpha-subunit
  misc_feature (1)..(122): Homolog of NCBI NO: 30687350 NR Description: elongation factor 1B alpha-subunit [Arabidopsis
MDLFGDETEEEKKAAEEREAAKKDTKKPKESGKSSVLMEVKPWDDETDMKKLEECVRAVEMPGLLWGASKLVPVGYGIKKLTIMLTIVDDLVSPDNLIEDYLTCEPNNEYIQSVDIVAFNKI

SEQ ID NO: 1006 - DNA, 1935 bp, Zea mays subsp. mays
  misc_feature (1)..(1935): Ceres Seq. ID no. 12637422
  misc_feature: MA Experiment ID: 108687 Result: Down-regulated in Transcription
  misc_feature: MA Experiment 108687 PARAMETER Experiment Name: Zm_Embryos-Flowers__P Parameter: Tissue Value: Embryo vs. Aerial+
  misc_feature: MA Experiment ID: 20000492 Result: Up-regulated in Transcription
  misc_feature: MA Experiment 20000492 PARAMETER Experiment Name: Zm_Hybrid_Seed_Dev_P Parameter: DAP Value: 12
  misc_feature: MA Experiment 20000492 PARAMETER Experiment Name: Zm_Hybrid_Seed_Dev_P Parameter: Organism Value: Zea mays
  misc_feature: MA Experiment 20000492 PARAMETER Experiment Name: Zm_Hybrid_Seed_Dev_P Parameter: Plant Line Value: 35A19
  misc_feature: MA Experiment 20000492 PARAMETER Experiment Name: Zm_Hybrid_Seed_Dev_P Parameter: Tissue Value: Fert Kernel vs. Unfert Floret
  misc_feature: MA Experiment ID: 20000535 Result: Up-regulated in Transcription
  misc_feature: MA Experiment 20000535 PARAMETER Experiment Name: Zm_Hybrid_Seed_Dev_P Parameter: DAP Value: 30 vs. 12
  misc_feature: MA Experiment 20000535 PARAMETER Experiment Name: Zm_Hybrid_Seed_Dev_P Parameter: Organism Value: Zea mays
  misc_feature: MA Experiment 20000535 PARAMETER Experiment Name: Zm_Hybrid_Seed_Dev_P Parameter: Plant Line Value: 35A19
  misc_feature: MA Experiment 20000535 PARAMETER Experiment Name: Zm_Hybrid_Seed_Dev_P Parameter: Tissue Value: Embryo vs. Unfert Floret
gaccgatgccgctgctgctgcgcggcgcctccctcctccgcctctgccagtgtaccagtgggctctcaagtgtgaaatttagttcaagagtaacggtactagtgaatctcaacgccatgagggacggaatgcgggccacatattcacgtagagctgcctctaagaacagtgaggtcaagaaagatgagcagccactcacagagaaggaagatgctgctgaaagtgatttggagatggagcgagggaggagcagcagccctagccagctccaatcaatgactgtcaaggagctcagggagctcacgaggaggaggggtatttctgtgaaaggtaccaagaaagatttagtatcagcactgatgaattctatggccgtggaagcaaatggtgaagagggaaagtcatccgttgagctggttagccccttggaagtacctttgaaaagaaaaggtggtgcttctgttgtggttgaacaaaaactagaaagttctgagattatttctgaaacacctaacaagaaaagaagtagaacaaaacaaaaatcaagcaagaacaccacttgtcaggaaatttcggtgactaatgtcaagctaagtaagactgttgtccagaaggaaacagttgacggattaagtcctgatgatgattcagagccttggactatactcgtgcataagaaaccagaagccagctggattccatacaaccctaggactatgaggcctccacctcttagcaaggatacacgggctctgaagattatgtcatggaatgtcaatggattgaaagcattgctcaaatcaagaggcttctctgtgcagcagttagcacagagggaggactttgatgtgctttgcttacaagaaacaaaaatgcaggagaaggatattgaagttattaaggacactttgcttgatggctacacaaatagtttctggacttgcagtgtgtcaaagcttggctattctggcactgcaataatttcaagagtcaaaccactgtcgatcaagtatgggcttggtataccagaccatgatactgaagggagggttgtgactgtagagtttgatgacttctacctgttaactgcttatgtaccaaactctggtgatggtctaaaaagattgacttacagggtcacagagtgggatccatcccttggtaactacatgaaagaattggagaaatcgaagcctgtcatactaaccggtgatcttaattgtgcgcatcaggagattgatatacatgaccctgctggaaatcgtagaagtgctggcttcacaaacgaggaaagagaatcatttgggaccaattttttgtccaaagggttcgttgatacgtttcggaaacagcatcctaatgttgttgcctatagttactgggggtacagacataatgcccggaagacaaacaaaggttggcgcctggattactttcttgtgtccgaatcaatcgcagaaaaagtgcatgattcatatattcttccggacatctctgccagtgatcacagtccccttggtctcgtgctgaagctgtaggctgtatcacaggctatgccaaacattcagtctgaagcttgtgccatatttctcagacagcgatgcttattcctgatggtttctggttcgttcagattcctggcaggaacaaggacttttgtcagactattagtgaaacaaggctttgtaatgcactgagcagatttgagactattagtggacaacttactgttagcaaagctgcacctttgtaatgtaaatatgcggccatatcttgtgctgcacttgtgcagctcaatatgagcagcaggggaagctcattacctggtcatggaattatgatactgaccttaacctgttgaggtctttaaactatcttgtcatgtgctgtgccgctgatggcgtcagaaaataactgtgccatgcaatttcacgc

SEQ ID NO: 1007 - protein, 511 aa, Zea mays subsp. mays
  peptide (1)..(511): Ceres Seq. ID no. 12637423
  misc_feature (251)..(509): Pfam Name: Endonuclease/Exonuclease/phosphatase family Pfam Description: Endonuclease/Exonuclease/phosphatase family
  misc_feature (251)..(511): Homolog of NCBI NO: 16081140 NR Description: 3'-exo-deoxyribonuclease [Bacillus subtilis]
  misc_feature (251)..(510): Homolog of NCBI NO: 20808602 NR Description: Exonuclease III [Thermoanaerobacter
  misc_feature (251)..(511): Homolog of NCBI NO: 16803822 NR Description: similar to 3'-exo-deoxyribonuclease exoA
  misc_feature (251)..(511): Homolog of NCBI NO: 16800960 NR Description: similar to 3'-exo-deoxyribonuclease exoA
  misc_feature (212)..(511): Homolog of NCBI NO: 34908950 NR Description: putative exodeoxyribonuclease
  misc_feature (53)..(203): Homolog of NCBI NO: 15227354 NR Description: DNA-(apurinic or apyrimidinic site) lyase (ARP)
  misc_feature (53)..(203): Homolog of NCBI NO: 472869 NR Description: ARP protein [Arabidopsis thaliana]
  misc_feature (156)..(511): Homolog of NCBI NO: 15227354 NR Description: DNA-(apurinic or apyrimidinic site) lyase (ARP)
  misc_feature (156)..(511): Homolog of NCBI NO: 472869 NR Description: ARP protein [Arabidopsis thaliana]
  misc_feature (78)..(511): Homolog of NCBI NO: 34908948 NR Description: putative exodeoxyribonuclease
PMPLLLRGASLLRLCQCTSGLSSVKFSSRVTVLVNLNAMRDGMRATYSRRAASKNSEVKKDEQPLTEKEDAAESDLEMERGRSSSPSQLQSMTVKELRELTRRRGISVKGTKKDLVSALMNSMAVEANGEEGKSSVELVSPLEVPLKRKGGASVVVEQKLESSEIISETPNKKRSRTKQKSSKNTTCQEISVTNVKLSKTVVQKETVDGLSPDDDSEPWTILVHKKPEASWIPYNPRTMRPPPLSKDTRALKIMSWNVNGLKALLKSRGFSVQQLAQREDFDVLCLQETKMQEKDIEVIKDTLLDGYTNSFWTCSVSKLGYSGTAIISRVKPLSIKYGLGIPDHDTEGRVVTVEFDDFYLLTAYVPNSGDGLKRLTYRVTEWDPSLGNYMKELEKSKPVILTGDLNCAHQEIDIHDPAGNRRSAGFTNEERESFGTNFLSKGFVDTFRKQHPNVVAYSYWGYRHNARKTNKGWRLDYFLVSESIAEKVHDSYILPDISASDHSPLGLVLKL

SEQ ID NO: 1008 - protein, 510 aa, Zea mays subsp. mays
  peptide (1)..(510): Ceres Seq. ID no. 12637424
  misc_feature (250)..(508): Pfam Name: Endonuclease/Exonuclease/phosphatase family Pfam Description: Endonuclease/Exonuclease/phosphatase family
  misc_feature (250)..(510): Homolog of NCBI NO: 16081140 NR Description: 3'-exo-deoxyribonuclease [Bacillus subtilis]
  misc_feature (250)..(509): Homolog of NCBI NO: 20808602 NR Description: Exonuclease III [Thermoanaerobacter
  misc_feature (250)..(510): Homolog of NCBI NO: 16803822 NR Description: similar to 3'-exo-deoxyribonuclease exoA
  misc_feature (250)..(510): Homolog of NCBI NO: 16800960 NR Description: similar to 3'-exo-deoxyribonuclease exoA
  misc_feature (211)..(510): Homolog of NCBI NO: 34908950 NR Description: putative exodeoxyribonuclease
  misc_feature (52)..(202): Homolog of NCBI NO: 15227354 NR Description: DNA-(apurinic or apyrimidinic site) lyase (ARP)
  misc_feature (52)..(202): Homolog of NCBI NO: 472869 NR Description: ARP protein [Arabidopsis thaliana]
  misc_feature (155)..(510): Homolog of NCBI NO: 15227354 NR Description: DNA-(apurinic or apyrimidinic site) lyase (ARP)
  misc_feature (155)..(510): Homolog of NCBI NO: 472869 NR Description: ARP protein [Arabidopsis thaliana]
  misc_feature (77)..(510): Homolog of NCBI NO: 34908948 NR Description: putative exodeoxyribonuclease
MPLLLRGASLLRLCQCTSGLSSVKFSSRVTVLVNLNAMRDGMRATYSRRAASKNSEVKKDEQPLTEKEDAAESDLEMERGRSSSPSQLQSMTVKELRELTRRRGISVKGTKKDLVSALMNSMAVEANGEEGKSSVELVSPLEVPLKRKGGASVVVEQKLESSEIISETPNKKRSRTKQKSSKNTTCQEISVTNVKLSKTVVQKETVDGLSPDDDSEPWTILVHKKPEASWIPYNPRTMRPPPLSKDTRALKIMSWNVNGLKALLKSRGFSVQQLAQREDFDVLCLQETKMQEKDIEVIKDTLLDGYTNSFWTCSVSKLGYSGTAIISRVKPLSIKYGLGIPDHDTEGRVVTVEFDDFYLLTAYVPNSGDGLKRLTYRVTEWDPSLGNYMKELEKSKPVILTGDLNCAHQEIDIHDPAGNRRSAGFTNEERESFGTNFLSKGFVDTFRKQHPNVVAYSYWGYRHNARKTNKGWRLDYFLVSESIAEKVHDSYILPDISASDHSPLGLVLKL

SEQ ID NO: 1009 - protein, 473 aa, Zea mays subsp. mays
  peptide (1)..(473): Ceres Seq. ID no. 12637425
  misc_feature (213)..(471): Pfam Name: Endonuclease/Exonuclease/phosphatase family Pfam Description: Endonuclease/Exonuclease/phosphatase family
  misc_feature (213)..(473): Homolog of NCBI NO: 16081140 NR Description: 3'-exo-deoxyribonuclease [Bacillus subtilis]
  misc_feature (213)..(472): Homolog of NCBI NO: 20808602 NR Description: Exonuclease III [Thermoanaerobacter
  misc_feature (213)..(473): Homolog of NCBI NO: 16803822 NR Description: similar to 3'-exo-deoxyribonuclease exoA
  misc_feature (213)..(473): Homolog of NCBI NO: 16800960 NR Description: similar to 3'-exo-deoxyribonuclease exoA
  misc_feature (174)..(473): Homolog of NCBI NO: 34908950 NR Description: putative exodeoxyribonuclease
  misc_feature (15)..(165): Homolog of NCBI NO: 15227354 NR Description: DNA-(apurinic or apyrimidinic site) lyase (ARP)
  misc_feature (15)..(165): Homolog of NCBI NO: 472869 NR Description: ARP protein [Arabidopsis thaliana]
  misc_feature (118)..(473): Homolog of NCBI NO: 15227354 NR Description: DNA-(apurinic or apyrimidinic site) lyase (ARP)
  misc_feature (118)..(473): Homolog of NCBI NO: 472869 NR Description: ARP protein [Arabidopsis thaliana]
  misc_feature (40)..(473): Homolog of NCBI NO: 34908948 NR Description: putative exodeoxyribonuclease
MRDGMRATYSRRAASKNSEVKKDEQPLTEKEDAAESDLEMERGRSSSPSQLQSMTVKELRELTRRRGISVKGTKKDLVSALMNSMAVEANGEEGKSSVELVSPLEVPLKRKGGASVVVEQKLESSEIISETPNKKRSRTKQKSSKNTTCQEISVTNVKLSKTVVQKETVDGLSPDDDSEPWTILVHKKPEASWIPYNPRTMRPPPLSKDTRALKIMSWNVNGLKALLKSRGFSVQQLAQREDFDVLCLQETKMQEKDIEVIKDTLLDGYTNSFWTCSVSKLGYSGTAIISRVKPLSIKYGLGIPDHDTEGRVVTVEFDDFYLLTAYVPNSGDGLKRLTYRVTEWDPSLGNYMKELEKSKPVILTGDLNCAHQEIDIHDPAGNRRSAGFTNEERESFGTNFLSKGFVDTFRKQHPNVVAYSYWGYRHNARKTNKGWRLDYFLVSESIAEKVHDSYILPDISASDHSPLGLVLKL

SEQ ID NO: 1010 - DNA, 1960 bp, Zea mays subsp. mays
  misc_feature (1)..(1960): Ceres Seq. ID no. 13600301
  misc_feature: MA Experiment ID: 108535 Result: Up-regulated in Transcription
  misc_feature: MA Experiment 108535 PARAMETER Experiment Name: Zm_Meristem_P Parameter: Age (day) Value: 8
  misc_feature: MA Experiment 108535 PARAMETER Experiment Name: Zm_Meristem_P Parameter: Organism Value: Zea mays
  misc_feature: MA Experiment 108535 PARAMETER Experiment Name: Zm_Meristem_P Parameter: Plant Line Value: 35A19
  misc_feature: MA Experiment 108535 PARAMETER Experiment Name: Zm_Meristem_P Parameter: Tissue Value: Root Meristem vs. Above Root Meristem
  misc_feature: MA Experiment ID: 108536 Result: Up-regulated in Transcription
  misc_feature: MA Experiment 108536 PARAMETER Experiment Name: Zm_Meristem_P Parameter: Age (day) Value: 8
  misc_feature: MA Experiment 108536 PARAMETER Experiment Name: Zm_Meristem_P Parameter: Organism Value: Zea mays
  misc_feature: MA Experiment 108536 PARAMETER Experiment Name: Zm_Meristem_P Parameter: Plant Line Value: 35A19
  misc_feature: MA Experiment 108536 PARAMETER Experiment Name: Zm_Meristem_P Parameter: Tissue Value: Shoot Meristem vs. Above Shoot Meristem
  misc_feature: MA Experiment ID: 20000535 Result: Up-regulated in Transcription
  misc_feature: MA Experiment 20000535 PARAMETER Experiment Name: Zm_Hybrid_Seed_Dev_P Parameter: DAP Value: 30 vs. 12
  misc_feature: MA Experiment 20000535 PARAMETER Experiment Name: Zm_Hybrid_Seed_Dev_P Parameter: Organism Value: Zea mays
  misc_feature: MA Experiment 20000535 PARAMETER Experiment Name: Zm_Hybrid_Seed_Dev_P Parameter: Plant Line Value: 35A19
  misc_feature: MA Experiment 20000535 PARAMETER Experiment Name: Zm_Hybrid_Seed_Dev_P Parameter: Tissue Value: Embryo vs. Unfert Floret
gaacttcagtagattgagggatctaagagagtcaagggtagctgaagtagttccattgaaagaagttgaagaggaaatcatgtccagaaggcatacagaaatttctgatgataatacaccacctgagcaggaaagagagccaaagcaaggtgggaccggaaaaccaagtcagttggtggatacttcaaccaaagctacatctgagcaggttgctgcaaagttggaggaaagtgaaatggaaaaagaattatgtgcagaggcagaggacccttcagagttcatcactcatcgagccaaagattttgtgtcgagcatgaaggacattgaaacccggtttatgcgtgcagctgaagcaggaaatgaggtttccagaatgcttgaaaccaagaagatccgacttgacatatgtgctaaaataccaggttctccagtcaagctaccttctgcccgatttgtgtcagcacttcgagtgtgctgcaatcgtgatgttattctcaaccaggaaactgcgcagcatgtttcaaaggttgtcacatggaagcgttctgtctcatctctttcatcatcatctaagagtgcacttatgacatcgataatgaaagatgatgtggatgacagtaatagtgattttgttgaggaattcgccatggtatccggaagccattcttctacgttggacaggctacacgcatgggagagaaaactatatgatgaaatcaaggcaagtgaaaatgttaggaaggcctatgatgagaaatgtaacctactccgacgccaatttgcacgaggcctaaatgcgcaggtgattgataagactagagctgttgtgaaggatctccattccagggtatctgttgtgattcaagctgttgatgcaatctccaaaagaattgagaagataagggatgaagaactgcagccacagcttgtcgagctaattcaagggctaatcagaatgtggaaactgatgctggaatgtcaccacaaacagttcatcacgatcacattagcataccacgtgaaagactcgacctcggcgcgtcaaggtgagcaccaccatcaccgccaggcggcgatgcatctgtggaatgagatggacagcttctcctccagcttcagaaactgggtcaccgctcacaaatcgtacgtcgaggccctcaacgcgtggctccagaagtgcgtcctgcagccgccccaggaccggcgcaggcgcaaacgcaaggtctccttccctcctcggcaggccgtctcccctcccatattcatcctctgcggggactggctcgccaggacagaacctctccctgctgacgagctatgcagatccctcaaagacgtgatgcagctcctccgcgactcgttcgagcaccgcgacgagcagaacaggcccagaagcggcgagtcgcaggagtgcgggatgctggagaacagtagcgagcaggaggcggcggctaagagtgggagttgtgcagcatcagctgaagggctgcagtcgagactgacggcggttcttgaccgcctgacaaagttctcggaggcatcactgaagtgctacgaggagctcaagcagaactacgagatggcctgtgctgattataggagagttggaccaaatgctcagcttgcttaggattgatgttggttgtggtgtgtgacttcttgctatctctgttctggatgacaaattctctagtgttttggtatatattttgtgaacaatcaggtgatagcacaatctttggccgaatattactgatgatttagtgctatcagttatgtatgctccactgtgggccctgccctgatgcttcgaaaggcctatgagaaccgttttcaccacgatataacaggcaaaatataccatgatttctgtgcgctaaaaaaaaaaaaaaaaaaaactcgagggggggcccggtacccaattcgtgttaaacacaataaagttggaacgggagggggg

SEQ ID NO: 1011 - protein, 542 aa, Zea mays subsp. mays
  peptide (1)..(542): Ceres Seq. ID no. 13600302
  misc_feature (102)..(444): Pfam Name: Protein of unknown function (DUF632) Pfam Description: Protein of unknown function (DUF632)
  misc_feature (14)..(464): Homolog of NCBI NO: 15219083 NR Description: bzip-related transcription factor [Arabidopsis
  misc_feature (17)..(509): Homolog of NCBI NO: 15223973 NR Description: expressed protein [Arabidopsis thaliana]
  misc_feature (17)..(509): Homolog of NCBI NO: 19424001 NR Description: unknown protein [Arabidopsis thaliana]
  misc_feature (15)..(127): Homolog of NCBI NO: 32526673 NR Description: bzip-like transcription factor-like protein
  misc_feature (167)..(468): Homolog of NCBI NO: 32526673 NR Description: bzip-like transcription factor-like protein
  misc_feature (87)..(192): Homolog of NCBI NO: 22324428 NR Description: hypothetical protein~predicted by GeneMark.hmm
  misc_feature (221)..(467): Homolog of NCBI NO: 22324428 NR Description: hypothetical protein~predicted by GeneMark.hmm
  misc_feature (99)..(535): Homolog of NCBI NO: 15225846 NR Description: expressed protein [Arabidopsis thaliana]
  misc_feature (485)..(532): Homolog of NCBI NO: 15236022 NR Description: hypothetical protein [Arabidopsis thaliana]
  misc_feature (64)..(444): Homolog of NCBI NO: 15236022 NR Description: hypothetical protein [Arabidopsis thaliana]
NFSRLRDLRESRVAEVVPLKEVEEEIMSRRHTEISDDNTPPEQEREPKQGGTGKPSQLVDTSTKATSEQVAAKLEESEMEKELCAEAEDPSEFITHRAKDFVSSMKDIETRFMRAAEAGNEVSRMLETKKIRLDICAKIPGSPVKLPSARFVSALRVCCNRDVILNQETAQHVSKVVTWKRSVSSLSSSSKSALMTSIMKDDVDDSNSDFVEEFAMVSGSHSSTLDRLHAWERKLYDEIKASENVRKAYDEKCNLLRRQFARGLNAQVIDKTRAVVKDLHSRVSVVIQAVDAISKRIEKIRDEELQPQLVELIQGLIRMWKLMLECHHKQFITITLAYHVKDSTSARQGEHHHHRQAAMHLWNEMDSFSSSFRNWVTAHKSYVEALNAWLQKCVLQPPQDRRRRKRKVSFPPRQAVSPPIFILCGDWLARTEPLPADELCRSLKDVMQLLRDSFEHRDEQNRPRSGESQECGMLENSSEQEAAAKSGSCAASAEGLQSRLTAVLDRLTKFSEASLKCYEELKQNYEMACADYRRVGPNAQLA

SEQ ID NO: 1012 - protein, 516 aa, Zea mays subsp. mays
  peptide (1)..(516): Ceres Seq. ID no. 13600303
  misc_feature (76)..(418): Pfam Name: Protein of unknown function (DUF632) Pfam Description: Protein of unknown function (DUF632)
  misc_feature (1)..(438): Homolog of NCBI NO: 15219083 NR Description: bzip-related transcription factor [Arabidopsis
  misc_feature (1)..(483): Homolog of NCBI NO: 15223973 NR Description: expressed protein [Arabidopsis thaliana]
  misc_feature (1)..(483): Homolog of NCBI NO: 19424001 NR Description: unknown protein [Arabidopsis thaliana]
  misc_feature (1)..(101): Homolog of NCBI NO: 32526673 NR Description: bzip-like transcription factor-like protein
  misc_feature (141)..(442): Homolog of NCBI NO: 32526673 NR Description: bzip-like transcription factor-like protein
  misc_feature (61)..(166): Homolog of NCBI NO: 22324428 NR Description: hypothetical protein~predicted by GeneMark.hmm
  misc_feature (195)..(441): Homolog of NCBI NO: 22324428 NR Description: hypothetical protein~predicted by GeneMark.hmm
  misc_feature (73)..(509): Homolog of NCBI NO: 15225846 NR Description: expressed protein [Arabidopsis thaliana]
  misc_feature (459)..(506): Homolog of NCBI NO: 15236022 NR Description: hypothetical protein [Arabidopsis thaliana]
  misc_feature (38)..(418): Homolog of NCBI NO: 15236022 NR Description: hypothetical protein [Arabidopsis thaliana]
MSRRHTEISDDNTPPEQEREPKQGGTGKPSQLVDTSTKATSEQVAAKLEESEMEKELCAEAEDPSEFITHRAKDFVSSMKDIETRFMRAAEAGNEVSRMLETKKIRLDICAKIPGSPVKLPSARFVSALRVCCNRDVILNQETAQHVSKVVTWKRSVSSLSSSSKSALMTSIMKDDVDDSNSDFVEEFAMVSGSHSSTLDRLHAWERKLYDEIKASENVRKAYDEKCNLLRRQFARGLNAQVIDKTRAVVKDLHSRVSVVIQAVDAISKRIEKIRDEELQPQLVELIQGLIRMWKLMLECHHKQFITITLAYHVKDSTSARQGEHHHHRQAAMHLWNEMDSFSSSFRNWVTAHKSYVEALNAWLQKCVLQPPQDRRRRKRKVSFPPRQAVSPPIFILCGDWLARTEPLPADELCRSLKDVMQLLRDSFEHRDEQNRPRSGESQECGMLENSSEQEAAAKSGSCAASAEGLQSRLTAVLDRLTKFSEASLKCYEELKQNYEMACADYRRVGPNAQLA

SEQ ID NO: 1013 - protein, 464 aa, Zea mays subsp. mays
  peptide (1)..(464): Ceres Seq. ID no. 13600304
  misc_feature (24)..(366): Pfam Name: Protein of unknown function (DUF632) Pfam Description: Protein of unknown function (DUF632)
  misc_feature (1)..(386): Homolog of NCBI NO: 15219083 NR Description: bzip-related transcription factor [Arabidopsis
  misc_feature (1)..(431): Homolog of NCBI NO: 15223973 NR Description: expressed protein [Arabidopsis thaliana]
  misc_feature (1)..(431): Homolog of NCBI NO: 19424001 NR Description: unknown protein [Arabidopsis thaliana]
  misc_feature (1)..(49): Homolog of NCBI NO: 32526673 NR Description: bzip-like transcription factor-like protein
  misc_feature (89)..(390): Homolog of NCBI NO: 32526673 NR Description: bzip-like transcription factor-like protein
  misc_feature (9)..(114): Homolog of NCBI NO: 22324428 NR Description: hypothetical protein~predicted by GeneMark.hmm
  misc_feature (143)..(389): Homolog of NCBI NO: 22324428 NR Description: hypothetical protein~predicted by GeneMark.hmm
  misc_feature (21)..(457): Homolog of NCBI NO: 15225846 NR Description: expressed protein [Arabidopsis thaliana]
  misc_feature (407)..(454): Homolog of NCBI NO: 15236022 NR Description: hypothetical protein [Arabidopsis thaliana]
  misc_feature (1)..(366): Homolog of NCBI NO: 15236022 NR Description: hypothetical protein [Arabidopsis thaliana]
MEKELCAEAEDPSEFITHRAKDFVSSMKDIETRFMRAAEAGNEVSRMLETKKIRLDICAKIPGSPVKLPSARFVSALRVCCNRDVILNQETAQHVSKVVTWKRSVSSLSSSSKSALMTSIMKDDVDDSNSDFVEEFAMVSGSHSSTLDRLHAWERKLYDEIKASENVRKAYDEKCNLLRRQFARGLNAQVIDKTRAVVKDLHSRVSVVIQAVDAISKRIEKIRDEELQPQLVELIQGLIRMWKLMLECHHKQFITITLAYHVKDSTSARQGEHHHHRQAAMHLWNEMDSFSSSFRNWVTAHKSYVEALNAWLQKCVLQPPQDRRRRKRKVSFPPRQAVSPPIFILCGDWLARTEPLPADELCRSLKDVMQLLRDSFEHRDEQNRPRSGESQECGMLENSSEQEAAAKSGSCAASAEGLQSRLTAVLDRLTKFSEASLKCYEELKQNYEMACADYRRVGPNAQLA

SEQ ID NO: 1014 - DNA, 2225 bp, Zea mays subsp. mays
  misc_feature (1)..(2225): Ceres Seq. ID no. 14302694
attttgacctcggaaaggtttgaacccgtcagggactaaagatgccaaaggtatattgttttccttctcattctactatgctataactatttctcctctactgttttttaccctacgaactgtgttgctaattttaatctacactacatctacttaaactcaattgttcagtgtcatagctttgctggaagccacatggcatattacttacatgccttcttagagtcttttagttatttcggtaatctgtattataggaatcataattaatgttgttttataacaataaatttatattgttgttttttagtcagaaaaaatgcttgtcatttggtcaattagctagcgacatgatattaagtgttgtagcgtggtcaagggttagctatgtctatgtgccatgtgttaaaagtattaggctacaaaaatccgaaaatgtcttgataaaagcaaaaaatagtaggaccattgaaaatttaaattagtatcgttgttacaagtttacccaacttcgagtataagagagcatagttcagcccctcgtctatcacttgtatgtaaggtgaactgtttcgtttttctatagcccgaccaatgtgcctctaagcatattcccaacaggacttagtgtgttgaaaacgccgagtcagaaatttgcacacatttttgagttatatgtatttattttagttcatttggactttggttgtgaacttaatgctccaagttattttgaccgcagtgggtcctttctccaaagtacttaaaattttcattccctatcacgcctagaggccctatgggtctgcaaatgtgattttctccataaacatcaataaggttgtagctttaagtaatggatgggtggttcttgcatgtactcttccatctgctttgtcggaatgaagcttcagttgaatttgttatagtcgttcactggtgcaaactgttattgctttgttatgtgtcatttgtttgtaggtctggaagatgagtaggcggaacgtggttgcaatagatcctattcaagtgtactatgtggaagggatcttggagcagttggcgttcgtggaggagtcgaagcgcaaggaggactgggtcgtcaggaaccaggagcgcagggcggccaaacgcaatcgcatccgcgacgagcacaaggtcgttgtcaggcagcccaaggactcaccaccacgttccacaacagggagcgtgacatcctgcggatgaggacccacttcaaggttagcaagcagccgcccaatgaggcgctcgactccaggctctttgcaattcgcatccctggctccatggacttgcattcgcacattaggaaggtcttgaggaagctacgtctgatgatggtcctcaccggaataaccttttctttgcacactaactgattgaattgacacatcttgtgtaccattgaaatctgaccacttcttttgccaacccctcttttgttaaaaataaaattaaaaattagattgtcaatcttgaggccacaatggagttattcgtggagcttcgagttattggaggtcgagctgtaaaaagctagcgttttttgcatattgtacacagtatcaggaggatgagccagaagcacaagaatggtattgccaagcagcacacctgctctacagcttagttatgtttagatttatatatgatatatatgaggtttctttgctcacatgtatttgcctgcacctatctaggtttagctctattgattacatcttttgtgcagggctgatgagctatcccctgatgagcttgagcgcctcttgaatcatgaccatggttggttgattgccaacccccaccagttcaaggtccctagctggttcctcaacaggaaaaagtactacaaggatggtaggttctctcaggttgtttccaacgcccttgacaagaagctcagcttagggatgactctaggctgaagaagaccaggaaccactatggtctgtcactactggggtctacttgtccgtggccagcacaccaagactaccaaaaggcatggaaagactataggtgtgtcggagaatagataaagtcaatttggtgcctaccttggatatttattatctgtaggatagatgaaccgttctggtttatgaaacttttgttgcgtattccaagctggttgaattgaatgttcttaagaaccaatgtcattagaaaagttaaaagattcaataatttgaaatggtttt

SEQ ID NO: 1015 - protein, 78 aa, Zea mays subsp. mays
  peptide (1)..(78): Ceres Seq. ID no. 14302695
  misc_feature (18)..(64): Homolog of NCBI NO: 38636688 NR Description: putative 60S ribosomal protein L7 (RPL7A)
MSRRNVVAIDPIQVYYVEGILEQLAFVEESKRKEDWVVRNQERRAAKRNRIRDEHKVVVRQPKDSPPRSTTGSVTSCG

SEQ ID NO: 1016 - protein, 71 aa, Zea mays subsp. mays
  peptide (1)..(71): Ceres Seq. ID no. 14302696
MLFYNNKFILLFFSQKKCLSFGQLASDMILSVVAWSRVSYVYVPCVKSIRLQKSENVLIKAKNSRTIENLN

SEQ ID NO: 1017 - protein, 58 aa, Zea mays subsp. mays
  peptide (1)..(58): Ceres Seq. ID no. 14302697
MWKGSWSSWRSWRSRSARRTGSSGTRSAGRPNAIASATSTRSLSGSPRTHHHVPQQGA

SEQ ID NO: 1018 - DNA, 1876 bp, Zea mays subsp. mays
  misc_feature (1)..(1876): Ceres Seq. ID no. 13624195
aacaacttgaaaacatcttaagggtagaagcgacgtagctgtttgatgttccaagcgttgccgtagatctcgccttgattgttggccagcttgtatgttccgggcttcagaactttggcgatgacgaatggcccttcccaggggggtgtgagcttgtgcctccctcgggcgtcttgccgcagccgaagcactagatcgcccacctggaggtctcgggaccggacccctcgggcgtggtagcgtcgcagggactgctggtaccgcgccgagtgtagtaaggccctgtcccgagcctcctccagctggtccagcgattcctctcggctagcttggttgctttgatcggtgtaggccctcgtcctcggggagccgtattccaggtcagtgggcaagatagcttcagccccgtaaaccaggaaaaacggcgtgaaacccgtggcacgactcggcgtcgtccttaggctccagaccaccgaggggagttccttcatccatcgcttgccgaacttgttgaggtcgttgtagatccgaggcttgagcccttgtagaatcatgccgttggcacgctctacttgcccattcgacatgggatgagccacggcggcccagtccacccggatatggtgatcctcgcaaaaaatccaaaattttttgccggtgaactgggtgccgttgtcggtgatgatggagttcgggaccccgaagcgatggatgatgttggtgaagaacgccaccgcctgctcggacctgatgctgttcagaggttgggcctcgatccacttggagaatttgtcgatggcgaccagcaggtgcgtatagcccccgggcgccttctgcaagggaccgacgaggtccagaccccatacagcgaagggccaggtgatgggtattgtctgcagagcctgagcgggaaggtgggtccgcttcgcatagaattggcacccttcgcaggtgcggacaattctagtggcgtcagccaccgccgttggccagtagaagccctgccggaaagcattcccgacaagggctcggggtgctgcgtggtggccggaagcccccgagtgtatttcttgcagcaattcccgaccttcggcgatggagatgcatcgctagaggaggcccgaggggctgcgatgttagagctcctcttcattgcccagcaagacgaatgacttggcgcgtcgcgctacccgccgagcctcgacttggtcgaggggtagctctcctcgacggagatatcgcaggtacggggcctgccaatctcgatctggcgtggccccactctgttcttcctcgacgtccagtgcctcgtcctcggggggccgagggtacctcgggccgttccgagggtgcctcgggctgagcagacctcccagcgcaagcaagagcgccgaacacatggttcatgcaccgctggtacgtcgcgcccgcattcctcaaaccgaacggcantggtgacatagcagtacatgccgaacggcgtgatgaaagaagtcgcgagctggtcggactctttcattcggatctggtgataccctgagtaggcatcgaggaaggacagggtttcgcacccagcggtggaatccacgatttggtcgatgcgaggcaaagggtagggaaccttcggacatgctttgttgagaccagtgtagtctacgcacatccgccatttcccccctttcttcctcacaagcaccagggttggcaagccattcgggatggaatacctctttgatgaaccctgctgccattagcttgtggatctcttcgccaatcactctgcgcttttcctcgtcgaatcggcgcagagactgcctgacgggccgggctccggcccgaatatccagcgagtgctcggcgacatccctcggtattg

SEQ ID NO: 1019 - protein, 193 aa, Zea mays subsp. mays
  peptide (1)..(193): Ceres Seq. ID no. 13624196
  misc_feature (1)..(48): Homolog of NCBI NO: 18542179 NR Description: putative pol protein [Zea mays]
MSHGGPVHPDMVILAKNPKFFAGELGAVVGDDGVRDPEAMDDVGEERHRLLGPDAVQRLGLDPLGEFVDGDQQVRIAPGRLLQGTDEVQTPYSEGPGDGYCLQSLSGKVGPLRIELAPFAGADNSSGVSHRRWPVEALPESIPDKGSGCCVVAGSPRVYFLQQFPTFGDGDASLEEARGAAMLELLFIAQQDE

SEQ ID NO: 1020 - protein, 183 aa, Zea mays subsp. mays
  peptide (1)..(183): Ceres Seq. ID no. 13624197
  misc_feature (1)..(38): Homolog of NCBI NO: 18542179 NR Description: putative pol protein [Zea mays]
MVILAKNPKFFAGELGAVVGDDGVRDPEAMDDVGEERHRLLGPDAVQRLGLDPLGEFVDGDQQVRIAPGRLLQGTDEVQTPYSEGPGDGYCLQSLSGKVGPLRIELAPFAGADNSSGVSHRRWPVEALPESIPDKGSGCCVVAGSPRVYFLQQFPTFGDGDASLEEARGAAMLELLFIAQQDE

SEQ ID NO: 1021 - protein, 154 aa, Zea mays subsp. mays
  peptide (1)..(154): Ceres Seq. ID no. 13624198
MDDVGEERHRLLGPDAVQRLGLDPLGEFVDGDQQVRIAPGRLLQGTDEVQTPYSEGPGDGYCLQSLSGKVGPLRIELAPFAGADNSSGVSHRRWPVEALPESIPDKGSGCCVVAGSPRVYFLQQFPTFGDGDASLEEARGAAMLELLFIAQQDE

SEQ ID NO: 1022 - DNA, 1580 bp, Zea mays subsp. mays
  misc_feature (1)..(1580): Ceres Seq. ID no. 14302617
  misc_feature: MA Experiment ID: 108522 Result: Up-regulated in Transcription
  misc_feature: MA Experiment 108522 PARAMETER Experiment Name: Zm_42deg_Heat_P Parameter: Age (day) Value: 8
  misc_feature: MA Experiment 108522 PARAMETER Experiment Name: Zm_42deg_Heat_P Parameter: Organism Value: Zea mays
  misc_feature: MA Experiment 108522 PARAMETER Experiment Name: Zm_42deg_Heat_P Parameter: Plant Line Value: 35A19
  misc_feature: MA Experiment 108522 PARAMETER Experiment Name: Zm_42deg_Heat_P Parameter: Temperature (deg C) Value: 42 vs. 22
  misc_feature: MA Experiment 108522 PARAMETER Experiment Name: Zm_42deg_Heat_P Parameter: Timepoint (hr) Value: 1
  misc_feature: MA Experiment 108522 PARAMETER Experiment Name: Zm_42deg_Heat_P Parameter: Tissue Value: Aerial
  misc_feature: MA Experiment ID: 108523 Result: Up-regulated in Transcription
  misc_feature: MA Experiment 108523 PARAMETER Experiment Name: Zm_42deg_Heat_P Parameter: Age (day) Value: 8
  misc_feature: MA Experiment 108523 PARAMETER Experiment Name: Zm_42deg_Heat_P Parameter: Organism Value: Zea mays
  misc_feature: MA Experiment 108523 PARAMETER Experiment Name: Zm_42deg_Heat_P Parameter: Plant Line Value: 35A19
  misc_feature: MA Experiment 108523 PARAMETER Experiment Name: Zm_42deg_Heat_P Parameter: Temperature (deg C) Value: 42 vs. 22
  misc_feature: MA Experiment 108523 PARAMETER Experiment Name: Zm_42deg_Heat_P Parameter: Timepoint (hr) Value: 6
  misc_feature: MA Experiment 108523 PARAMETER Experiment Name: Zm_42deg_Heat_P Parameter: Tissue Value: Aerial
  misc_feature: MA Experiment ID: 108597 Result: Up-regulated in Transcription
  misc_feature: MA Experiment 108597 PARAMETER Experiment Name: Zm_100uM_ABA_P Parameter: Age (day) Value: 9
  misc_feature: MA Experiment 108597 PARAMETER Experiment Name: Zm_100uM_ABA_P Parameter: Organism Value: Zea mays
  misc_feature: MA Experiment 108597 PARAMETER Experiment Name: Zm_100uM_ABA_P Parameter: Plant Line Value: 35A19
  misc_feature: MA Experiment 108597 PARAMETER Experiment Name: Zm_100uM_ABA_P Parameter: Timepoint (hr) Value: 24
  misc_feature: MA Experiment 108597 PARAMETER Experiment Name: Zm_100uM_ABA_P Parameter: Tissue Value: Aerial
  misc_feature: MA Experiment 108597 PARAMETER Experiment Name: Zm_100uM_ABA_P Parameter: Treatment Value: 100uM ABA vs. No Treatment
ttttagtggaggagctactgtcttgagggttactagtgtctgacactatcttgagcaagtcagagacaggagtagagttggattgcagctcctctatgaggagcttgattttgttggacatagccactcgattgaatgacaactttccaacatggccaccgtcaccagacatggcatcggtagcagcagcatcgtgtctcggggtcggggacagcagccagagaagcatgagagccagttaccagcagtgtggcgagcagcatggcgggcatggtgagcttgggctgcgaggccaccgcccaactccggtgcggcgtctcgagtcccgtcgtgtttgtcctggatcatgaagtagtgaagctcgtccacagcatcctcagcctcgtcggccttcttgccgagaatctcgagctgctccagcaggttggggttcccggcgacgacgtcgtccctccccttggccacgtccagcagcgctctagcgtaccgcatcttctctttgatcatgttaaggttggtgccgagctcggcgctggacacgtaggatttcatccagtcgtcggggagattattgagaacatggccaaggagatacttggccgttcccagagccacctccatcttctgctccggtcgagatggaagtcgaaagaacagtgtgcgtgtgctgctggctggatgttgcccagcgccgaggaccgacgtatgcttatatggcgttctggtaattgataattgattggtcctgatgcgattcgtgcttatctataattctatccggatccggctcgctaggcatctttgccgagggcgtacggcttcctcgtggtcctcatctaatggtgctgtcacattcaaagaagaaagtgctgggaaaaccacgtacgagaatttccgatacagatcagacagcaggcctaacatctatagccaaggatgtctgaataactttctacaagtcttctgcagcaagacaaaaccggcgtgtttagaaggttttgtcttctgcatgcgttgaatgatctatagccacgtacgacaaagttttatagaaggttttgtcgtgcatgcgttgaatggtccaagccatagggacgaaccgacgtgtccggcttcgtttcgtgctttgcttttaattgggtggcgactcagattttcatgtcaaaatctgcagcctcgtgtgaagatgctagagaagacaaaaggcaagcgctgatgatcctgcaagtggtatgaatagagagcctataaagtgcctttctggcgcacaatctgaagctgcaaagcaaacgcaatgctgccgtcgggagattggaactacaatatctttgcatctctagctagtgaatgttcctttggactgatgactttgccgtagaggttagccgtcactcgtcactggacagtgcgtttgctgctatatcaagaggttcttttttttaaaagcttggtttcaatgtatacaaagtttcgtttaaggaccctttgctaccccctttgctaccgagtgtagtccaaaggctacttaactcataaacacaggagacacaaagatataggaggtattgatactttcattc

SEQ ID NO: 1023 - protein, 156 aa, Zea mays subsp. mays
  peptide (1)..(156): Ceres Seq. ID no. 14302618
MAGMVSLGCEATAQLRCGVSSPVVFVLDHEVVKLVHSILSLVGLLAENLELLQQVGVPGDDVVPPLGHVQQRSSVPHLLFDHVKVGAELGAGHVGFHPVVGEIIENMAKEILGRSQSHLHLLLRSRWKSKEQCACAAGWMLPSAEDRRMLIWRSGN

SEQ ID NO: 1024 - protein, 153 aa, Zea mays subsp. mays
  peptide (1)..(153): Ceres Seq. ID no. 14302619
MVSLGCEATAQLRCGVSSPVVFVLDHEVVKLVHSILSLVGLLAENLELLQQVGVPGDDVVPPLGHVQQRSSVPHLLFDHVKVGAELGAGHVGFHPVVGEIIENMAKEILGRSQSHLHLLLRSRWKSKEQCACAAGWMLPSAEDRRMLIWRSGN

SEQ ID NO: 1025 - protein, 89 aa, Zea mays subsp. mays
  peptide (1)..(89): Ceres Seq. ID no. 14302620
  misc_feature (40)..(79): Homolog of NCBI NO: 22327677 NR Description: DHHC-type zinc finger domain-containing protein
MRFVLIYNSIRIRLARHLCRGRTASSWSSSNGAVTFKEESAGKTTYENFRYRSDSRPNIYSQGCLNNFLQVFCSKTKPACLEGFVFCMR

SEQ ID NO: 1026 - DNA, 1718 bp, Zea mays subsp. mays
  misc_feature (1)..(1718): Ceres Seq. ID no. 12638003
tcgctggtactgggagcgggtgacagttattgtggatgcatgtgctattgtcggttaatgaacttcggaagctatttaagatcttacaatgccctttggcatattttaaatggaaatcaaagcactctgtttctttgttatttatttgttgtataatttgcttccacttgcagaattggtcttctagtggtctgcttgagaaaatgaagaaactttctgaaagaaggaagcttgaagatttaacaattggtccagtccttacagtaagtcaggggcggagccagcccttttttgggggtcagctgaccccggtaaatttctgaatatctaatagaaaatggtgttaataacaatagttctatagtgaagatctagtagaaaatactgatgaccccgataaaatttttgctagcttcgctactgcagtaagtggacagttctggattgtaatcacaattgttctttgtaactaaaatgatatggtgtcgtgttgggaacaaacagtagttaaaaacttaatcaagcaataaatggaaccaggtaataatatattattttctgttattttagtagatgtgaagggcaatcctagtctagcggtgagagttgtctcaccgagtcaccaggttgagggttcgaagatttgcctatcccctttctaaaccttactcatgtgtgtgtaagaagagaagtttttttttattttagtagatgtgagggtgtccagacatcaaatagtgtgtaagaagagaagacaaaggaaattgtctttgcacagtacaggttttcatataaaaggtcaaatatgtgtggagaaagaaaaagaacatgtagctattcatcactatttttttgtctcaactgtttatatggtcacaactcacaactggattagcggtataaagtttttctgtttcttcttattaacatatcatggatcttttctgatccaggttactacagaagccatgatagagcacatgaacaaccttctcaaaataagaggatcaaaggttctgtttggtggtgaaccgttagcgaatcactcaattcccaaaatttatggtgccatgaagcctactgctgtatttgttcctctagaagaaattctaaaaagtgggaacttcgagcttgtgacaaaggagatatttggtccattccaggtagtcacagaatactctgaggatcagcttgagttggtcttagaagcctgcgaaaggatgaatgcgcatctgacagctgcagttgtctcaaacgacccgctattcctgcaggatgtacttgggagatccgttaacgggacaacctacgccggaattcgagcgaggaccacgggcgctccacagaaccactggtttggcccggccggtgatccgcgaggcgcagggatcgggactccggaagccatcaaacttgtctggtcctgccacagggaagtcatatatgacgtcgggcccgtgcccgagagctgggcgcttccttccgcgacctgattagctagacgaggatagactattccatgtcatcacgagaaataaaaggggaagataagcgaagccagcaggactggagcgaccgaccgagagcgagtggctgcatgcctaggcattcattctctgcacgcaactgcactttcaaccctggagaaaacataataaatgctcgttcccctgtacttgagatacatggtacttggaaccggaacgtcggacaactcg

SEQ ID NO: 1027 - protein, 207 aa, Zea mays subsp. mays
  peptide (1)..(207): Ceres Seq. ID no. 12638004
  misc_feature (26)..(207): Homolog of NCBI NO: 10178084 NR Description: dehydrogenase [Arabidopsis thaliana]
  misc_feature (26)..(207): Homolog of NCBI NO: 18449343 NR Description: putative aldehyde dehydrogenase WIS1 [Triticum
  misc_feature (26)..(207): Homolog of NCBI NO: 18449337 NR Description: putative aldehyde dehydrogenase BIS1 [Hordeum
  misc_feature (26)..(207): Homolog of NCBI NO: 18449341 NR Description: putative aldehyde dehydrogenase MIS1 [Zea mays]
  misc_feature (26)..(207): Homolog of NCBI NO: 15383744 NR Description: delta-1-pyrroline-5-carboxylate dehydrogenase
  misc_feature (26)..(207): Homolog of NCBI NO: 34921534 NR Description: Probable aldehyde dehydrogenase (Flax inducible
  misc_feature (26)..(207): Homolog of NCBI NO: 18424599 NR Description: dehydrogenase
MVTTHNWISGIKFFCFFLLTYHGSFLIQVTTEAMIEHMNNLLKIRGSKVLFGGEPLANHSIPKIYGAMKPTAVFVPLEEILKSGNFELVTKEIFGPFQVVTEYSEDQLELVLEACERMNAHLTAAVVSNDPLFLQDVLGRSVNGTTYAGIRARTTGAPQNHWFGPAGDPRGAGIGTPEAIKLVWSCHREVIYDVGPVPESWALPSAT

SEQ ID NO: 1028 - protein, 174 aa, Zea mays subsp. mays
  peptide (1)..(174): Ceres Seq. ID no. 12638005
  misc_feature (1)..(174): Homolog of NCBI NO: 15383744 NR Description: delta-1-pyrroline-5-carboxylate dehydrogenase
  misc_feature (1)..(174): Homolog of NCBI NO: 34921534 NR Description: Probable aldehyde dehydrogenase (Flax inducible
  misc_feature (1)..(174): Homolog of NCBI NO: 18424599 NR Description: dehydrogenase
  misc_feature (1)..(174): Homolog of NCBI NO: 10178084 NR Description: dehydrogenase [Arabidopsis thaliana]
  misc_feature (1)..(174): Homolog of NCBI NO: 18449343 NR Description: putative aldehyde dehydrogenase WIS1 [Triticum
  misc_feature (1)..(174): Homolog of NCBI NO: 18449337 NR Description: putative aldehyde dehydrogenase BIS1 [Hordeum
  misc_feature (1)..(174): Homolog of NCBI NO: 18449341 NR Description: putative aldehyde dehydrogenase MIS1 [Zea mays]
MIEHMNNLLKIRGSKVLFGGEPLANHSIPKIYGAMKPTAVFVPLEEILKSGNFELVTKEIFGPFQVVTEYSEDQLELVLEACERMNAHLTAAVVSNDPLFLQDVLGRSVNGTTYAGIRARTTGAPQNHWFGPAGDPRGAGIGTPEAIKLVWSCHREVIYDVGPVPESWALPSAT

SEQ ID NO: 1029 - protein, 170 aa, Zea mays subsp. mays
  peptide (1)..(170): Ceres Seq. ID no. 12638006
  misc_feature (1)..(170): Homolog of NCBI NO: 15383744 NR Description: delta-1-pyrroline-5-carboxylate dehydrogenase
  misc_feature (1)..(170): Homolog of NCBI NO: 34921534 NR Description: Probable aldehyde dehydrogenase (Flax inducible
  misc_feature (1)..(170): Homolog of NCBI NO: 18424599 NR Description: dehydrogenase
  misc_feature (1)..(170): Homolog of NCBI NO: 10178084 NR Description: dehydrogenase [Arabidopsis thaliana]
  misc_feature (1)..(170): Homolog of NCBI NO: 18449343 NR Description: putative aldehyde dehydrogenase WIS1 [Triticum
  misc_feature (1)..(170): Homolog of NCBI NO: 18449337 NR Description: putative aldehyde dehydrogenase BIS1 [Hordeum
  misc_feature (1)..(170): Homolog of NCBI NO: 18449341 NR Description: putative aldehyde dehydrogenase MIS1 [Zea mays]
MNNLLKIRGSKVLFGGEPLANHSIPKIYGAMKPTAVFVPLEEILKSGNFELVTKEIFGPFQVVTEYSEDQLELVLEACERMNAHLTAAVVSNDPLFLQDVLGRSVNGTTYAGIRARTTGAPQNHWFGPAGDPRGAGIGTPEAIKLVWSCHREVIYDVGPVPESWALPSAT

SEQ ID NO: 1030 - DNA, 2516 bp, Zea mays subsp. mays
  misc_feature (1)..(2516): Ceres Seq. ID no. 14309727
gcatgcgtccgcggtgggtgcgcctagagcctgcagccaccgtagcgaaatctccaatcttgatgttgcgcggggcgaagattgcctctgccgtcgttagggtcaagcaccgagtcgccggctgctgccccctctccctatcgtcgcgccatccatttcctcgccgttgacgacgacgagcgagactagggaccggccttcgacgaagtggcggctactgctcgatctagcgagggtggctggcatcgagctggggcggcggccatgagccatctcttcgacaacaggtgagaatgaatcttacagttcaaccatatatcctcttccggacaatgtaaatatcaactccagtagatcgatcagtcggtgtcctagccatggcatcagaatagcaatggacagctgcgacagaaactcaactagcagaatcacagggaaggatattaagcaggcgattatgttcagtgcctctttgaacaagctcacattaaaccaagatgaggccaccgaatacacaaatttgatcctagaagaacttcagacaggtcaaggagtcctccagatgaatgtcatgagcaagggcctgtcaagggatctccaaccaacctgcgggccaataccagtgccaatgaaatgcagccgacagcgacatatacttactgcaaccgtagtcttcttccaagctcactggaggcgtatatttgtggttttcttgtggctcatggcatgtgctgcactcttcacatggaagttcatgcagtacagacagcggttggctttcgaggtaatggggtactgcctgtcgacagccaagggggctgcagagacgctcaagctcaacatggccattgtgctcctacctgtttgccgcaacacggtcacttggctcaggagaagccgtgttatcaactcggtcatcccatttaatgacaatattaacttccacaagcttgttgcagcgggaattgtgatcggtgtaatccttcatggaggcatccacctggcatgcgacttcccaaggatcacaaggacagataaggccttctttggacgcacaattgccgctgactttgggtaccaccagccatcctacctggagatagtggtatcaaccgaggggacaactggtatagcaatggtggtactaatgtttgtcgcattcttgcttgctagtagtccttcgagaagaaatccaggaatgctgccacctctcgtcagacagttagctgggttcaatgccttctggtactcgcaccatgtgttcatcgctgtctatgtgctcctcattgtgcattccatgttcctattcctagcaaaggatgtagcagagaagacgacgtggatgtatgtcgcaattcctgtggtgatctacattggagaacggatgttcaggatggtcagatctatggtgttcgatgtcaagatcctcaatgccacagtttatccagggatggtacttgcactcaaggtgacaaagcctccaggttttcggtatcaaagtggaatgtatgtatttgtccaatgtccagaagtatcaaagtttgaatggcacccattttcccttacatctgctccagaagatgatcacttgagcatccatataagatctcttggtgattggagctaccaaatgtatgatgtcttccaacagatgctactttccagcaactccagcatgcctaaaatattctttgatggtccctacggtgcagcgtcacaggatcactcaaagtacgaaattatattgttaattggacttggaataggagcaacgcctttcataagtgttctcaaagacattgccaatggattagataaggggcatggcaacttaaattatcactctgaccgactgaagaaggcctacttttattgggtgacaagagagcaaggatcctttgagtggttcagggatatcatgaaagaggtttcggttctagacagcaagcagggtgtgatagaaatgtataactacctgacaagtgtctaccaagaaggtgataagcggtcgatgctaataagtgcgattcaagcacttcattttgcacgccatggcattgatatcatctcaaaaactcctgttcatacgcacttttcgaggccaaactggcctagagtgctacatggccttgcaagaaggcatatcggggagaggataggggttttctactgtggtccggacgatttgggaaggcagctggagaagctctgccacaaagtgaacacaaaaacattcacgcgatttgtgttccacaaggagcatttctaataatagagactagcatagatcaactccttaggaacaaacctgtcaagtatgatctcaaagctgccaagcacttcatttttttcgcatcactccttcctatcttttgctttagtatctctgtcttcatttaaccattataaagctgatcttacttgaggagctttgtatctaactagaaaaaaacagcgccctatcgggcgcttagacgatttcttgaatgtgatctttgtgatttttttttcttttc

SEQ ID NO: 1031 - protein, 624 aa, Zea mays subsp. mays
  peptide (1)..(624): Ceres Seq. ID no. 14309728
  misc_feature (132)..(476): Pfam Name: Ferric reductase like transmembrane component Pfam Description: Ferric reductase like transmembrane component
  misc_feature (486)..(624): Homolog of NCBI NO: 17384016 NR Description: NADPH oxidase [Nicotiana tabacum]
  misc_feature (1)..(485): Homolog of NCBI NO: 17384016 NR Description: NADPH oxidase [Nicotiana tabacum]
  misc_feature (490)..(624): Homolog of NCBI NO: 3242456 NR Description: Atrboh F [Arabidopsis thaliana]
  misc_feature (1)..(541): Homolog of NCBI NO: 3242456 NR Description: Atrboh F [Arabidopsis thaliana]
  misc_feature (490)..(624): Homolog of NCBI NO: 18407959 NR Description: respiratory burst oxidase protein F (NADPH
  misc_feature (1)..(541): Homolog of NCBI NO: 18407959 NR Description: respiratory burst oxidase protein F (NADPH
  misc_feature (425)..(624): Homolog of NCBI NO: 15238842 NR Description: respiratory burst oxidase protein D (NADPH
  misc_feature (425)..(624): Homolog of NCBI NO: 11358758 NR Description: respiratory burst oxidase protein D
  misc_feature (1)..(476): Homolog of NCBI NO: 15238842 NR Description: respiratory burst oxidase protein D (NADPH
  misc_feature (1)..(476): Homolog of NCBI NO: 11358758 NR Description: respiratory burst oxidase protein D
MDSCDRNSTSRITGKDIKQAIMFSASLNKLTLNQDEATEYTNLILEELQTGQGVLQMNVMSKGLSRDLQPTCGPIPVPMKCSRQRHILTATVVFFQAHWRRIFVVFLWLMACAALFTWKFMQYRQRLAFEVMGYCLSTAKGAAETLKLNMAIVLLPVCRNTVTWLRRSRVINSVIPFNDNINFHKLVAAGIVIGVILHGGIHLACDFPRITRTDKAFFGRTIAADFGYHQPSYLEIVVSTEGTTGIAMVVLMFVAFLLASSPSRRNPGMLPPLVRQLAGFNAFWYSHHVFIAVYVLLIVHSMFLFLAKDVAEKTTWMYVAIPVVIYIGERMFRMVRSMVFDVKILNATVYPGMVLALKVTKPPGFRYQSGMYVFVQCPEVSKFEWHPFSLTSAPEDDHLSIHIRSLGDWSYQMYDVFQQMLLSSNSSMPKIFFDGPYGAASQDHSKYEIILLIGLGIGATPFISVLKDIANGLDKGHGNLNYHSDRLKKAYFYWVTREQGSFEWFRDIMKEVSVLDSKQGVIEMYNYLTSVYQEGDKRSMLISAIQALHFARHGIDIISKTPVHTHFSRPNWPRVLHGLARRHIGERIGVFYCGPDDLGRQLEKLCHKVNTKTFTRFVFHKEHF

SEQ ID NO: 1032 - protein, 603 aa, Zea mays subsp. mays
  peptide (1)..(603): Ceres Seq. ID no. 14309729
  misc_feature (111)..(455): Pfam Name: Ferric reductase like transmembrane component Pfam Description: Ferric reductase like transmembrane component
  misc_feature (465)..(603): Homolog of NCBI NO: 17384016 NR Description: NADPH oxidase [Nicotiana tabacum]
  misc_feature (1)..(464): Homolog of NCBI NO: 17384016 NR Description: NADPH oxidase [Nicotiana tabacum]
  misc_feature (469)..(603): Homolog of NCBI NO: 3242456 NR Description: Atrboh F [Arabidopsis thaliana]
  misc_feature (1)..(520): Homolog of NCBI NO: 3242456 NR Description: Atrboh F [Arabidopsis thaliana]
  misc_feature (469)..(603): Homolog of NCBI NO: 18407959 NR Description: respiratory burst oxidase protein F (NADPH
  misc_feature (1)..(520): Homolog of NCBI NO: 18407959 NR Description: respiratory burst oxidase protein F (NADPH
  misc_feature (404)..(603): Homolog of NCBI NO: 15238842 NR Description: respiratory burst oxidase protein D (NADPH
  misc_feature (404)..(603): Homolog of NCBI NO: 11358758 NR Description: respiratory burst oxidase protein D
  misc_feature (1)..(455): Homolog of NCBI NO: 15238842 NR Description: respiratory burst oxidase protein D (NADPH
  misc_feature (1)..(455): Homolog of NCBI NO: 11358758 NR Description: respiratory burst oxidase protein D
MFSASLNKLTLNQDEATEYTNLILEELQTGQGVLQMNVMSKGLSRDLQPTCGPIPVPMKCSRQRHILTATVVFFQAHWRRIFVVFLWLMACAALFTWKFMQYRQRLAFEVMGYCLSTAKGAAETLKLNMAIVLLPVCRNTVTWLRRSRVINSVIPFNDNINFHKLVAAGIVIGVILHGGIHLACDFPRITRTDKAFFGRTIAADFGYHQPSYLEIVVSTEGTTGIAMVVLMFVAFLLASSPSRRNPGMLPPLVRQLAGFNAFWYSHHVFIAVYVLLIVHSMFLFLAKDVAEKTTWMYVAIPVVIYIGERMFRMVRSMVFDVKILNATVYPGMVLALKVTKPPGFRYQSGMYVFVQCPEVSKFEWHPFSLTSAPEDDHLSIHIRSLGDWSYQMYDVFQQMLLSSNSSMPKIFFDGPYGAASQDHSKYEIILLIGLGIGATPFISVLKDIANGLDKGHGNLNYHSDRLKKAYFYWVTREQGSFEWFRDIMKEVSVLDSKQGVIEMYNYLTSVYQEGDKRSMLISAIQALHFARHGIDIISKTPVHTHFSRPNWPRVLHGLARRHIGERIGVFYCGPDDLGRQLEKLCHKVNTKTFTRFVFHKEHF

SEQ ID NO: 1033 - protein, 568 aa, Zea mays subsp. mays
  peptide (1)..(568): Ceres Seq. ID no. 14309730
  misc_feature (76)..(420): Pfam Name: Ferric reductase like transmembrane component Pfam Description: Ferric reductase like transmembrane component
  misc_feature (430)..(568): Homolog of NCBI NO: 17384016 NR Description: NADPH oxidase [Nicotiana tabacum]
  misc_feature (1)..(429): Homolog of NCBI NO: 17384016 NR Description: NADPH oxidase [Nicotiana tabacum]
  misc_feature (434)..(568): Homolog of NCBI NO: 3242456 NR Description: Atrboh F [Arabidopsis thaliana]
  misc_feature (1)..(485): Homolog of NCBI NO: 3242456 NR Description: Atrboh F [Arabidopsis thaliana]
  misc_feature (434)..(568): Homolog of NCBI NO: 18407959 NR Description: respiratory burst oxidase protein F (NADPH
  misc_feature (1)..(485): Homolog of NCBI NO: 18407959 NR Description: respiratory burst oxidase protein F (NADPH
  misc_feature (369)..(568): Homolog of NCBI NO: 15238842 NR Description: respiratory burst oxidase protein D (NADPH
  misc_feature (369)..(568): Homolog of NCBI NO: 11358758 NR Description: respiratory burst oxidase protein D
  misc_feature (1)..(420): Homolog of NCBI NO: 15238842 NR Description: respiratory burst oxidase protein D (NADPH
  misc_feature (1)..(420): Homolog of NCBI NO: 11358758 NR Description: respiratory burst oxidase protein D
MNVMSKGLSRDLQPTCGPIPVPMKCSRQRHILTATVVFFQAHWRRIFVVFLWLMACAALFTWKFMQYRQRLAFEVMGYCLSTAKGAAETLKLNMAIVLLPVCRNTVTWLRRSRVINSVIPFNDNINFHKLVAAGIVIGVILHGGIHLACDFPRITRTDKAFFGRTIAADFGYHQPSYLEIVVSTEGTTGIAMVVLMFVAFLLASSPSRRNPGMLPPLVRQLAGFNAFWYSHHVFIAVYVLLIVHSMFLFLAKDVAEKTTWMYVAIPVVIYIGERMFRMVRSMVFDVKILNATVYPGMVLALKVTKPPGFRYQSGMYVFVQCPEVSKFEWHPFSLTSAPEDDHLSIHIRSLGDWSYQMYDVFQQMLLSSNSSMPKIFFDGPYGAASQDHSKYEIILLIGLGIGATPFISVLKDIANGLDKGHGNLNYHSDRLKKAYFYWVTREQGSFEWFRDIMKEVSVLDSKQGVIEMYNYLTSVYQEGDKRSMLISAIQALHFARHGIDIISKTPVHTHFSRPNWPRVLHGLARRHIGERIGVFYCGPDDLGRQLEKLCHKVNTKTFTRFVFHKEHF

SEQ ID NO: 1034 - DNA, 1001 bp, Zea mays subsp. mays
  misc_feature (1)..(1001): Ceres Seq. ID no. 15177518
atcaaccatggcttactcagctcccatatctccatccctatccttcttcaaaaacccccaactcaccagactctcgttccctttctccccactttactctcgccctagggttcagaatccaagtctgctcacgaagaacaagacgtggtcgtcgtccgtggtggtggcggcgacggcggcggagaagcagaagaagagataccctggagaatcgaaagggtttgtggaggagatgaggtttgtggcgatgagacttcacacgaaggagcaggccaaggaaggtgagaaagagacaaaatctcccgaggaacgtcctgtcgctaaatgggaaccgactgttgaaggttacttgaggtttttggtggatagcaagttggtttacgacacgcttgaagggattattcatcagtccactttcccaacttatgcggaattcaagaacactgggctggaaagggcagagaaattggacactgatctgaagtggttcaaagaacaaggctacgagattccagaaccaactgatactggtaaaaaatattctcagtatttaaaggatttagcagacaaggatcctccatcattcatttgtcacttctacaacatctacttcgcccacagcgctggtggtcgaatgattggaagaaaggtagcggaaaggattctcgacaatagagaactcgagttttacaaatgggacggcgacctttccggattgttgcagaacgtgagggaaaaactgaacaaagttgcagaggagtggacgagagaagagaagaatcattgtttggaagagaccgagaaatcgttcaagtattctggtgagatacttcgtctcatattgtcctgattcctctctttatatacgcgcttgtggcaactaaaatccctgctcaagttttttattcctgtattatatttttaaactcgcttctgcttgtttgtatcatcaaactcttatttgcttcaaagcttaatacgacgttggaagttcagcgttc

SEQ ID NO: 1035 - protein, 282 aa, Zea mays subsp. mays
  peptide (1)..(282): Ceres Seq. ID no. 15177519
  misc_feature (88)..(279): Pfam Name: Heme oxygenase Pfam Description: Heme oxygenase
  misc_feature (52)..(282): Homolog of NCBI NO: 15076863 NR Description: putative heme oxygenase 1 precursor [Pisum
  misc_feature (3)..(282): Homolog of NCBI NO: 14485575 NR Description: heme oxygenase 1 [Lycopersicon esculentum]
  misc_feature (42)..(282): Homolog of NCBI NO: 15222425 NR Description: heme oxygenase -related [Arabidopsis thaliana]
  misc_feature (43)..(282): Homolog of NCBI NO: 14030647 NR Description: At2g26670/F18A8.4 [Arabidopsis thaliana]
  misc_feature (17)..(282): Homolog of NCBI NO: 21450864 NR Description: putative heme oxygenase HO1 [Arabidopsis thaliana]
  misc_feature (3)..(282): Homolog of NCBI NO: 15225771 NR Description: heme oxygenase 1 (HO1) [Arabidopsis thaliana]
STMAYSAPISPSLSFFKNPQLTRLSFPFSPLYSRPRVQNPSLLTKNKTWSSSVVVAATAAEKQKKRYPGESKGFVEEMRFVAMRLHTKEQAKEGEKETKSPEERPVAKWEPTVEGYLRFLVDSKLVYDTLEGIIHQSTFPTYAEFKNTGLERAEKLDTDLKWFKEQGYEIPEPTDTGKKYSQYLKDLADKDPPSFICHFYNIYFAHSAGGRMIGRKVAERILDNRELEFYKWDGDLSGLLQNVREKLNKVAEEWTREEKNHCLEETEKSFKYSGEILRLILS

SEQ ID NO: 1036 - protein, 280 aa, Zea mays subsp. mays
  peptide (1)..(280): Ceres Seq. ID no. 15177520
  misc_feature (86)..(277): Pfam Name: Heme oxygenase Pfam Description: Heme oxygenase
  misc_feature (50)..(280): Homolog of NCBI NO: 15076863 NR Description: putative heme oxygenase 1 precursor [Pisum
  misc_feature (1)..(280): Homolog of NCBI NO: 14485575 NR Description: heme oxygenase 1 [Lycopersicon esculentum]
  misc_feature (40)..(280): Homolog of NCBI NO: 15222425 NR Description: heme oxygenase -related [Arabidopsis thaliana]
  misc_feature (41)..(280): Homolog of NCBI NO: 14030647 NR Description: At2g26670/F18A8.4 [Arabidopsis thaliana]
  misc_feature (15)..(280): Homolog of NCBI NO: 21450864 NR Description: putative heme oxygenase HO1 [Arabidopsis thaliana]
  misc_feature (1)..(280): Homolog of NCBI NO: 15225771 NR Description: heme oxygenase 1 (HO1) [Arabidopsis thaliana]
MAYSAPISPSLSFFKNPQLTRLSFPFSPLYSRPRVQNPSLLTKNKTWSSSVVVAATAAEKQKKRYPGESKGFVEEMRFVAMRLHTKEQAKEGEKETKSPEERPVAKWEPTVEGYLRFLVDSKLVYDTLEGIIHQSTFPTYAEFKNTGLERAEKLDTDLKWFKEQGYEIPEPTDTGKKYSQYLKDLADKDPPSFICHFYNIYFAHSAGGRMIGRKVAERILDNRELEFYKWDGDLSGLLQNVREKLNKVAEEWTREEKNHCLEETEKSFKYSGEILRLILS

SEQ ID NO: 1037 - protein, 205 aa, Zea mays subsp. mays
  peptide (1)..(205): Ceres Seq. ID no. 15177521
  misc_feature (11)..(202): Pfam Name: Heme oxygenase Pfam Description: Heme oxygenase
  misc_feature (1)..(205): Homolog of NCBI NO: 15076863 NR Description: putative heme oxygenase 1 precursor [Pisum
  misc_feature (1)..(205): Homolog of NCBI NO: 14485575 NR Description: heme oxygenase 1 [Lycopersicon esculentum]
  misc_feature (1)..(205): Homolog of NCBI NO: 15222425 NR Description: heme oxygenase -related [Arabidopsis thaliana]
  misc_feature (1)..(205): Homolog of NCBI NO: 14030647 NR Description: At2g26670/F18A8.4 [Arabidopsis thaliana]
  misc_feature (1)..(205): Homolog of NCBI NO: 21450864 NR Description: putative heme oxygenase HO1 [Arabidopsis thaliana]
  misc_feature (1)..(205): Homolog of NCBI NO: 15225771 NR Description: heme oxygenase 1 (HO1) [Arabidopsis thaliana]
MRFVAMRLHTKEQAKEGEKETKSPEERPVAKWEPTVEGYLRFLVDSKLVYDTLEGIIHQSTFPTYAEFKNTGLERAEKLDTDLKWFKEQGYEIPEPTDTGKKYSQYLKDLADKDPPSFICHFYNIYFAHSAGGRMIGRKVAERILDNRELEFYKWDGDLSGLLQNVREKLNKVAEEWTREEKNHCLEETEKSFKYSGEILRLILS

SEQ ID NO: 1038 - DNA, 1575 bp, Zea mays subsp. mays
  misc_feature (1)..(1575): Ceres Seq. ID no. 15179007
aagttttagtttcagcttcactgtcttttttaacgactctgttccttctccgaccaaaagcgagaaaaaaaatggcgtctcttggccaaatcaccctcccgcgagcgccatcgttgcagaaaggcctcctacgccgtccgatcagaaccccaatcagattcaacggccggatcgcgagtgtattgactaacgcgggttcggtgaaagcaagtgtgagccagaaggtgattgaagaggaggcgaaagttctggtgggtacctacgcgcgtgctccagtggtgctctcgagtgggaaaggttgtaaattgatggacgcagaagggaaagagtatcttgattgtgcatctggaatcgctgtgaatgctctgggccatggagatcctgattggcttcaagctgtcactgaccaagcttctgttctttcccacgtcagcaatgtctattacaccattcctcagatagaactagcgaaacgccttgtggcaagttctttcgcagaccgtgtattcttctgtaactctggaacagaagccaacgaagcagccatcaagttttctagaaagttccagagattcacccatcctgaagacaaggaagtcgccacaagcttcatcgcctttacgaatagtttccatggtagaaccttaggagctcttgcattaacaagcaaagaacagtacagaactcctttcgaacctatcatgccaggcgttacgttcttggaatatggtaacactcaagcagccactgatcttatccgctccggtaaaatagctgctgtgtttgtggagcctattcaaggagaaggtggggtttactctgctacaaaagagtttctccagtctcttcgctcagcttgtgatgctgcaggatctcttctcgtcttcgatgaggttcagtgtggtttgggtcgaaccggtaacctatgggcatatgaagcatttggtgtaacacctgacataatgacagttgcaaagcctttagcaggtggtttaccaattggagcggtgcttgtaactgaaaaagttgctgagaccatcaaatatggagatcatggaagcacatttgcagggaaccctcttgtgtgtagtgcagccatcgctgtttttgataaagtatctaaatcctctttcttggccagtgtctcgagcaaaggtttatactttaaggatctgttggtgaagaaactaggaggaaacttgcacgtgaaggaagtgagaggagaagggcttattattggagtggagctggacgtgcccgcaggtccgttggtcgatgcttgtcgtgattctggtcttctgatcttgacggcagggaaagggaatgtcgtcaggattgttccgccgttgattatatcggaggaggaaatcgaacgtgccgttgagattattttccatgatttaactgcgcttgactgaatattgttgttgaacataaatgttcatcgactatgaactgtgtttttaaaattctgtactttacttaaataagctcaagtataacagtaaatgtgcctgttacagttcataactgctgtttcttggttctgtttttttgaaacatttttcttggttc

SEQ ID NO: 1039 - protein, 471 aa, Zea mays subsp. mays
  peptide (1)..(471): Ceres Seq. ID no. 15179008
  misc_feature (81)..(471): Pfam Name: Aminotransferase class-III Pfam Description: Aminotransferase class-III
  misc_feature (37)..(463): Homolog of NCBI NO: 40747112 NR Description: hypothetical protein AN1150.2 [Aspergillus
  misc_feature (72)..(470): Homolog of NCBI NO: 15679337 NR Description: N-acetylornithine aminotransferase
  misc_feature (83)..(463): Homolog of NCBI NO: 15644529 NR Description: acetylornithine aminotransferase [Thermotoga
  misc_feature (75)..(463): Homolog of NCBI NO: 23112365 NR Description: hypothetical protein [Desulfitobacterium
  misc_feature (76)..(463): Homolog of NCBI NO: 15668902 NR Description: acetylornithine aminotransferase (argD)
  misc_feature (74)..(460): Homolog of NCBI NO: 22972847 NR Description: hypothetical protein [Chloroflexus aurantiacus]
  misc_feature (204)..(444): Homolog of NCBI NO: 34394063 NR Description: putative acetylornithine aminotransferase
  misc_feature (24)..(471): Homolog of NCBI NO: 2811029 NR Description: Acetylornithine aminotransferase, mitochondrial
  misc_feature (24)..(471): Homolog of NCBI NO: 21554043 NR Description: putative acetylornithine transaminase
  misc_feature (24)..(471): Homolog of NCBI NO: 15220176 NR Description: acetylornithine aminotransferase, mitochondrial
VLVSASLSFLTTLFLLRPKARKKMASLGQITLPRAPSLQKGLLRRPIRTPIRFNGRIASVLTNAGSVKASVSQKVIEEEAKVLVGTYARAPVVLSSGKGCKLMDAEGKEYLDCASGIAVNALGHGDPDWLQAVTDQASVLSHVSNVYYTIPQIELAKRLVASSFADRVFFCNSGTEANEAAIKFSRKFQRFTHPEDKEVATSFIAFTNSFHGRTLGALALTSKEQYRTPFEPIMPGVTFLEYGNTQAATDLIRSGKIAAVFVEPIQGEGGVYSATKEFLQSLRSACDAAGSLLVFDEVQCGLGRTGNLWAYEAFGVTPDIMTVAKPLAGGLPIGAVLVTEKVAETIKYGDHGSTFAGNPLVCSAAIAVFDKVSKSSFLASVSSKGLYFKDLLVKKLGGNLHVKEVRGEGLIIGVELDVPAGPLVDACRDSGLLILTAGKGNVVRIVPPLIISEEEIERAVEIIFHDLTALD

SEQ ID NO: 1040 - protein, 448 aa, Zea mays subsp. mays
  peptide (1)..(448): Ceres Seq. ID no. 15179009
  misc_feature (58)..(448): Pfam Name: Aminotransferase class-III Pfam Description: Aminotransferase class-III
  misc_feature (60)..(440): Homolog of NCBI NO: 15644529 NR Description: acetylornithine aminotransferase [Thermotoga
  misc_feature (52)..(440): Homolog of NCBI NO: 23112365 NR Description: hypothetical protein [Desulfitobacterium
  misc_feature (53)..(440): Homolog of NCBI NO: 15668902 NR Description: acetylornithine aminotransferase (argD)
  misc_feature (51)..(437): Homolog of NCBI NO: 22972847 NR Description: hypothetical protein [Chloroflexus aurantiacus]
  misc_feature (14)..(440): Homolog of NCBI NO: 40747112 NR Description: hypothetical protein AN1150.2 [Aspergillus
  misc_feature (49)..(447): Homolog of NCBI NO: 15679337 NR Description: N-acetylornithine aminotransferase
  misc_feature (181)..(421): Homolog of NCBI NO: 34394063 NR Description: putative acetylornithine aminotransferase
  misc_feature (1)..(448): Homolog of NCBI NO: 2811029 NR Description: Acetylornithine aminotransferase, mitochondrial
  misc_feature (1)..(448): Homolog of NCBI NO: 21554043 NR Description: putative acetylornithine transaminase
  misc_feature (1)..(448): Homolog of NCBI NO: 15220176 NR Description: acetylornithine aminotransferase, mitochondrial
MASLGQITLPRAPSLQKGLLRRPIRTPIRFNGRIASVLTNAGSVKASVSQKVIEEEAKVLVGTYARAPVVLSSGKGCKLMDAEGKEYLDCASGIAVNALGHGDPDWLQAVTDQASVLSHVSNVYYTIPQIELAKRLVASSFADRVFFCNSGTEANEAAIKFSRKFQRFTHPEDKEVATSFIAFTNSFHGRTLGALALTSKEQYRTPFEPIMPGVTFLEYGNTQAATDLIRSGKIAAVFVEPIQGEGGVYSATKEFLQSLRSACDAAGSLLVFDEVQCGLGRTGNLWAYEAFGVTPDIMTVAKPLAGGLPIGAVLVTEKVAETIKYGDHGSTFAGNPLVCSAAIAVFDKVSKSSFLASVSSKGLYFKDLLVKKLGGNLHVKEVRGEGLIIGVELDVPAGPLVDACRDSGLLILTAGKGNVVRIVPPLIISEEEIERAVEIIFHDLTALD

SEQ ID NO: 1041 - protein, 369 aa, Zea mays subsp. mays
  peptide (1)..(369): Ceres Seq. ID no. 15179010
  misc_feature (1)..(369): Pfam Name: Aminotransferase class-III Pfam Description: Aminotransferase class-III
  misc_feature (1)..(361): Homolog of NCBI NO: 40747112 NR Description: hypothetical protein AN1150.2 [Aspergillus
  misc_feature (1)..(368): Homolog of NCBI NO: 15679337 NR Description: N-acetylornithine aminotransferase
  misc_feature (1)..(361): Homolog of NCBI NO: 15644529 NR Description: acetylornithine aminotransferase [Thermotoga
  misc_feature (1)..(361): Homolog of NCBI NO: 23112365 NR Description: hypothetical protein [Desulfitobacterium
  misc_feature (1)..(361): Homolog of NCBI NO: 15668902 NR Description: acetylornithine aminotransferase (argD)
  misc_feature (1)..(358): Homolog of NCBI NO: 22972847 NR Description: hypothetical protein [Chloroflexus aurantiacus]
  misc_feature (102)..(342): Homolog of NCBI NO: 34394063 NR Description: putative acetylornithine aminotransferase
  misc_feature (1)..(369): Homolog of NCBI NO: 2811029 NR Description: Acetylornithine aminotransferase, mitochondrial
  misc_feature (1)..(369): Homolog of NCBI NO: 21554043 NR Description: putative acetylornithine transaminase
  misc_feature (1)..(369): Homolog of NCBI NO: 15220176 NR Description: acetylornithine aminotransferase, mitochondrial
MDAEGKEYLDCASGIAVNALGHGDPDWLQAVTDQASVLSHVSNVYYTIPQIELAKRLVASSFADRVFFCNSGTEANEAAIKFSRKFQRFTHPEDKEVATSFIAFTNSFHGRTLGALALTSKEQYRTPFEPIMPGVTFLEYGNTQAATDLIRSGKIAAVFVEPIQGEGGVYSATKEFLQSLRSACDAAGSLLVFDEVQCGLGRTGNLWAYEAFGVTPDIMTVAKPLAGGLPIGAVLVTEKVAETIKYGDHGSTFAGNPLVCSAAIAVFDKVSKSSFLASVSSKGLYFKDLLVKKLGGNLHVKEVRGEGLIIGVELDVPAGPLVDACRDSGLLILTAGKGNVVRIVPPLIISEEEIERAVEIIFHDLTALD

SEQ ID NO: 1042 - DNA, 631 bp, Zea mays subsp. mays
  misc_feature (1)..(631): Ceres Seq. ID no. 15179011
ctgggattagagtttatagaaaatcggaaagagagagagagagagagacgagttctccgatcaacaacgccagcaaaatggagatggaaacagaagtctctgagaagaaggagatagtggtgcttctggttggtccgccaggaagcggcaaatcgacgttcagtgagtccgtaatgaaatcatctcaccgcccttggtctcgcatctgtcaggacattattaacaatggcaaagctggaagcaaagctcagtgcctaaagatggctatagaatccctcaaggaagggaagagcgtctttattgacagatgcaatcttgacagggagcagcgctccgagtttattaagctcggtggtccccttgttgaagtccatgcactggttctcgaactttctgctcaagtttgtatatctagatcagtcaaaagaagtggccatgagggtaatctacaaggcggaagagctgcagctgttgtgaacaagatgcttcggagtaaggaacttcccaaattgaatgaaggcttttctcggattctgttttgttacaacgacgcagatgttgagaatgctgtttttttttttttttttttttgaatgaatgttaaatttattcaaaaaagcctttatacaac

SEQ ID NO: 1043 - protein, 196 aa, Zea mays subsp. mays
  peptide (1)..(196): Ceres Seq. ID no. 15179012
  misc_feature (5)..(177): Homolog of NCBI NO: 32416758 NR Description: hypothetical protein [Neurospora crassa]
  misc_feature (9)..(190): Homolog of NCBI NO: 15240948 NR Description: hypothetical protein [Arabidopsis thaliana]
GIRVYRKSERERERETSSPINNASKMEMETEVSEKKEIVVLLVGPPGSGKSTFSESVMKSSHRPWSRICQDIINNGKAGSKAQCLKMAIESLKEGKSVFIDRCNLDREQRSEFIKLGGPLVEVHALVLELSAQVCISRSVKRSGHEGNLQGGRAAAVVNKMLRSKELPKLNEGFSRILFCYNDADVENAVFFFFFF

SEQ ID NO: 1044 - protein, 171 aa, Zea mays subsp. mays
  peptide (1)..(171): Ceres Seq. ID no. 15179013
  misc_feature (1)..(152): Homolog of NCBI NO: 32416758 NR Description: hypothetical protein [Neurospora crassa]
  misc_feature (1)..(165): Homolog of NCBI NO: 15240948 NR Description: hypothetical protein [Arabidopsis thaliana]
MEMETEVSEKKEIVVLLVGPPGSGKSTFSESVMKSSHRPWSRICQDIINNGKAGSKAQCLKMAIESLKEGKSVFIDRCNLDREQRSEFIKLGGPLVEVHALVLELSAQVCISRSVKRSGHEGNLQGGRAAAVVNKMLRSKELPKLNEGFSRILFCYNDADVENAVFFFFFF

SEQ ID NO: 1045 - protein, 169 aa, Zea mays subsp. mays
  peptide (1)..(169): Ceres Seq. ID no. 15179014
  misc_feature (1)..(150): Homolog of NCBI NO: 32416758 NR Description: hypothetical protein [Neurospora crassa]
  misc_feature (1)..(163): Homolog of NCBI NO: 15240948 NR Description: hypothetical protein [Arabidopsis thaliana]
METEVSEKKEIVVLLVGPPGSGKSTFSESVMKSSHRPWSRICQDIINNGKAGSKAQCLKMAIESLKEGKSVFIDRCNLDREQRSEFIKLGGPLVEVHALVLELSAQVCISRSVKRSGHEGNLQGGRAAAVVNKMLRSKELPKLNEGFSRILFCYNDADVENAVFFFFFF

SEQ ID NO: 1046 - DNA, 1194 bp, Zea mays subsp. mays
  misc_feature (1)..(1194): Ceres Seq. ID no. 15176835
acttcgccttctctacacaaacaaaactggttcgctaagagctccgacaatggctgtctgcgcaactcactcctctctcatgatagcatacgccgcatccaaggaccttacaattccgtctcttttctcatctgccaacccaagacccaacaagttgagcgtcgcactctatccccctcttgttctccttgcggggagaagagcttcgaacccatccttcccggtggttgtctcagccgtagccgcagaggctgatgtcgacacggaggacgcggagcagaacgaagccacctccaccaccgccacagccgtcctcgatccgccaaagcctaagaaaggaaaagcagctttgcttctcaagagagatagaacaaggtctaagaggtttctggaaatccaaaagctaagggaaaccaaaaaggagtacgacgtcaagactgctatatctttgcttaagcaaaccgctaacacaaggtttgtggagtcggtcgaagcccatttccgtctcaacatcgatcctaagtacaatgatcagcagctgcgagcaaccgtgagccttcctaaaggaacagggcaaactgttaaagtggctgttcttgcacaaggtgagaaggtcgatgaagcaaaaaatgcaggggcagatattgtgggcagtgatgatttgatcgaacagataaaaggagggttcatggagttcgataagttaattgcatccccggatatgatggtcaaggttgctggcctgggaaagattcttggtccacgaggactcatgccaaatcccaaggctggtaccgtcacagctaacattccacaggctatagaagagttcaagaagggaaaagtagaattcagagcagacaaaactgggattgttcacattccgtttgggaaagtgaatttcacagaggaagacctgctcgtaaacttccttgcagcagtgaaatcggtggagacaaacaagccaaagggagcaaaaggagtgtactggaaaagcgcacacatatgttcgtcaatggggccatccatcaagttgaacataagggagatgatagagttcaagccataaataaccacatttgtgtttttttttttgtgagtgtaggcgaacaccattagttatctcttgtatacctcaccggttgtatcaccttaactctgataagaccatttgctttattgattattactgtt

SEQ ID NO: 1047 - protein, 355 aa, Zea mays subsp. mays
  peptide (1)..(355): Ceres Seq. ID no. 15176836
  misc_feature (138)..(342): Pfam Name: Ribosomal protein L1p/L10e family Pfam Description: Ribosomal protein L1p/L10e family
  misc_feature (126)..(350): Homolog of NCBI NO: 39997957 NR Description: ribosomal protein L1 [Geobacter sulfurreducens
  misc_feature (126)..(354): Homolog of NCBI NO: 37521169 NR Description: 50S ribosomal protein L1 [Gloeobacter violaceus]
  misc_feature (126)..(354): Homolog of NCBI NO: 16330010 NR Description: 50S ribosomal protein L1 [Synechocystis sp. PCC
  misc_feature (126)..(349): Homolog of NCBI NO: 11467612 NR Description: ribosomal protein L1 [Guillardia theta]
  misc_feature (126)..(354): Homolog of NCBI NO: 17232793 NR Description: 50S ribosomal protein L1 [Nostoc sp. PCC 7120]
  misc_feature (123)..(354): Homolog of NCBI NO: 22297840 NR Description: 50S ribosomal protein L1 [Thermosynechococcus
  misc_feature (102)..(277): Homolog of NCBI NO: 1350625 NR Description: 50S RIBOSOMAL PROTEIN L1, CHLOROPLAST PRECURSOR
  misc_feature (76)..(355): Homolog of NCBI NO: 25453504 NR Description: ribosomal protein L1 [imported] - spinach
  misc_feature (17)..(355): Homolog of NCBI NO: 15229443 NR Description: ribosomal protein L1p family [Arabidopsis
  misc_feature (17)..(355): Homolog of NCBI NO: 25456457 NR Description: ribosomal protein L1 protein [imported] -
LRLLYTNKTGSLRAPTMAVCATHSSLMIAYAASKDLTIPSLFSSANPRPNKLSVALYPPLVLLAGRRASNPSFPVVVSAVAAEADVDTEDAEQNEATSTTATAVLDPPKPKKGKAALLLKRDRTRSKRFLEIQKLRETKKEYDVKTAISLLKQTANTRFVESVEAHFRLNIDPKYNDQQLRATVSLPKGTGQTVKVAVLAQGEKVDEAKNAGADIVGSDDLIEQIKGGFMEFDKLIASPDMMVKVAGLGKILGPRGLMPNPKAGTVTANIPQAIEEFKKGKVEFRADKTGIVHIPFGKVNFTEEDLLVNFLAAVKSVETNKPKGAKGVYWKSAHICSSMGPSIKLNIREMIEFKP

SEQ ID NO: 1048 - protein, 339 aa, Zea mays subsp. mays
  peptide (1)..(339): Ceres Seq. ID no. 15176837
  misc_feature (122)..(326): Pfam Name: Ribosomal protein L1p/L10e family Pfam Description: Ribosomal protein L1p/L10e family
  misc_feature (110)..(334): Homolog of NCBI NO: 39997957 NR Description: ribosomal protein L1 [Geobacter sulfurreducens
  misc_feature (110)..(338): Homolog of NCBI NO: 37521169 NR Description: 50S ribosomal protein L1 [Gloeobacter violaceus]
  misc_feature (110)..(338): Homolog of NCBI NO: 16330010 NR Description: 50S ribosomal protein L1 [Synechocystis sp. PCC
  misc_feature (110)..(333): Homolog of NCBI NO: 11467612 NR Description: ribosomal protein L1 [Guillardia theta]
  misc_feature (110)..(338): Homolog of NCBI NO: 17232793 NR Description: 50S ribosomal protein L1 [Nostoc sp. PCC 7120]
  misc_feature (107)..(338): Homolog of NCBI NO: 22297840 NR Description: 50S ribosomal protein L1 [Thermosynechococcus
  misc_feature (86)..(261): Homolog of NCBI NO: 1350625 NR Description: 50S RIBOSOMAL PROTEIN L1, CHLOROPLAST PRECURSOR
  misc_feature (60)..(339): Homolog of NCBI NO: 25453504 NR Description: ribosomal protein L1 [imported] - spinach
  misc_feature (1)..(339): Homolog of NCBI NO: 15229443 NR Description: ribosomal protein L1p family [Arabidopsis
  misc_feature (1)..(339): Homolog of NCBI NO: 25456457 NR Description: ribosomal protein L1 protein [imported] -
MAVCATHSSLMIAYAASKDLTIPSLFSSANPRPNKLSVALYPPLVLLAGRRASNPSFPVVVSAVAAEADVDTEDAEQNEATSTTATAVLDPPKPKKGKAALLLKRDRTRSKRFLEIQKLRETKKEYDVKTAISLLKQTANTRFVESVEAHFRLNIDPKYNDQQLRATVSLPKGTGQTVKVAVLAQGEKVDEAKNAGADIVGSDDLIEQIKGGFMEFDKLIASPDMMVKVAGLGKILGPRGLMPNPKAGTVTANIPQAIEEFKKGKVEFRADKTGIVHIPFGKVNFTEEDLLVNFLAAVKSVETNKPKGAKGVYWKSAHICSSMGPSIKLNIREMIEFKP

SEQ ID NO: 1049 - protein, 329 aa, Zea mays subsp. mays
  peptide (1)..(329): Ceres Seq. ID no. 15176838
  misc_feature (112)..(316): Pfam Name: Ribosomal protein L1p/L10e family Pfam Description: Ribosomal protein L1p/L10e family
  misc_feature (100)..(324): Homolog of NCBI NO: 39997957 NR Description: ribosomal protein L1 [Geobacter sulfurreducens
  misc_feature (100)..(328): Homolog of NCBI NO: 37521169 NR Description: 50S ribosomal protein L1 [Gloeobacter violaceus]
  misc_feature (100)..(328): Homolog of NCBI NO: 16330010 NR Description: 50S ribosomal protein L1 [Synechocystis sp. PCC
  misc_feature (100)..(323): Homolog of NCBI NO: 11467612 NR Description: ribosomal protein L1 [Guillardia theta]
  misc_feature (100)..(328): Homolog of NCBI NO: 17232793 NR Description: 50S ribosomal protein L1 [Nostoc sp. PCC 7120]
  misc_feature (97)..(328): Homolog of NCBI NO: 22297840 NR Description: 50S ribosomal protein L1 [Thermosynechococcus
  misc_feature (76)..(251): Homolog of NCBI NO: 1350625 NR Description: 50S RIBOSOMAL PROTEIN L1, CHLOROPLAST PRECURSOR
  misc_feature (50)..(329): Homolog of NCBI NO: 25453504 NR Description: ribosomal protein L1 [imported] - spinach
  misc_feature (1)..(329): Homolog of NCBI NO: 15229443 NR Description: ribosomal protein L1p family [Arabidopsis
  misc_feature (1)..(329): Homolog of NCBI NO: 25456457 NR Description: ribosomal protein L1 protein [imported] -
MIAYAASKDLTIPSLFSSANPRPNKLSVALYPPLVLLAGRRASNPSFPVVVSAVAAEADVDTEDAEQNEATSTTATAVLDPPKPKKGKAALLLKRDRTRSKRFLEIQKLRETKKEYDVKTAISLLKQTANTRFVESVEAHFRLNIDPKYNDQQLRATVSLPKGTGQTVKVAVLAQGEKVDEAKNAGADIVGSDDLIEQIKGGFMEFDKLIASPDMMVKVAGLGKILGPRGLMPNPKAGTVTANIPQAIEEFKKGKVEFRADKTGIVHIPFGKVNFTEEDLLVNFLAAVKSVETNKPKGAKGVYWKSAHICSSMGPSIKLNIREMIEFKP

SEQ ID NO: 1050 - DNA, 1006 bp, Zea mays subsp. mays
  misc_feature (1)..(1006): Ceres Seq. ID no. 15178924
aagtgtaaacattgtattccacaaactgcacttttcaaacaaattttgtaaaaaggcactctaaaacaataaaccatatatataaacagcataaatctgttcagtatccaaatccctctgagtctcttacataaacatcaatcccaacgaatcatctatgaaaaaacccctttgagaaaaataatccaaaacaatgtacttttcatcgtctgtactaaaacgcctcattttgatcaatttcttagccatacaactactccttataagcagcgaattgcccttaaacacgaccaatgagtatctcaaccacaaatgcttggttagtgaaggaaaatacaagccgggaagtgaatacgagagacatttaaataatatcatcaaaatgttctacagtggcagttacagaggtttctacctgttcggtatgaataatgataacgctatcctccagtgccgcgccgattcctacgggaccaagtgccacgactgctttgccaccgccctcgctaagcttcgcaggaaatgtccgtggtataagggcatgataatttggtatgaccaatgtcttctcgccattactactacagatgctattgggaagatcgattacgacaataacttttgtatgtccaatgcaaagaagttgggaggagataagagcgcttttacaaggacttggaaaactctcatggacaatctgacgactttagctaccaccactaaaggtaaagatacgtacacaatgttctctgcgggggagacgttgtacaagggtgataagatgtatggaatggtgcagtgtacatatgacttatcactaagagcttgtaaggagtgtttggtttttaatagcgtgcgttttcaagattgcttgagtgatacaagaggagcgagatttgtgggtgggacctgtacttttaggtttgagttttatccttttatttctaagccggtcctaaatatttaatgagctaaataaatgttatactattggtttgaatttccc

SEQ ID NO: 1051 - protein, 257 aa, Zea mays subsp. mays
  peptide (1)..(257): Ceres Seq. ID no. 15178925
  misc_feature (84)..(135): Pfam Name: Domain of unknown function DUF26 Pfam Description: Domain of unknown function DUF26
  misc_feature (86)..(251): Homolog of NCBI NO: 11994709 NR Description: contains similarity to receptor protein
  misc_feature (5)..(250): Homolog of NCBI NO: 15233366 NR Description: pollen coat receptor kinase, putative
  misc_feature (5)..(250): Homolog of NCBI NO: 15233235 NR Description: receptor-like kinase-related [Arabidopsis
  misc_feature (1)..(250): Homolog of NCBI NO: 15233238 NR Description: receptor-like protein kinase-related [Arabidopsis
  misc_feature (1)..(250): Homolog of NCBI NO: 15233236 NR Description: receptor-like protein kinase-related [Arabidopsis
  misc_feature (7)..(251): Homolog of NCBI NO: 15233204 NR Description: pollen coat receptor kinase, putative
  misc_feature (7)..(251): Homolog of NCBI NO: 15233207 NR Description: receptor-like protein kinase-related [Arabidopsis
  misc_feature (7)..(251): Homolog of NCBI NO: 9279744 NR Description: contains similarity to receptor protein
  misc_feature (1)..(250): Homolog of NCBI NO: 15233368 NR Description: receptor-like protein kinase-related [Arabidopsis
  misc_feature (1)..(251): Homolog of NCBI NO: 15233201 NR Description: receptor-like protein kinase-related [Arabidopsis
MYFSSSVLKRLILINFLAIQLLLISSELPLNTTNEYLNHKCLVSEGKYKPGSEYERHLNNIIKMFYSGSYRGFYLFGMNNDNAILQCRADSYGTKCHDCFATALAKLRRKCPWYKGMIIWYDQCLLAITTTDAIGKIDYDNNFCMSNAKKLGGDKSAFTRTWKTLMDNLTTLATTTKGKDTYTMFSAGETLYKGDKMYGMVQCTYDLSLRACKECLVFNSVRFQDCLSDTRGARFVGGTCTFRFEFYPFISKPVLNI

SEQ ID NO: 1052 - protein, 194 aa, Zea mays subsp. mays
  peptide (1)..(194): Ceres Seq. ID no. 15178926
  misc_feature (21)..(72): Pfam Name: Domain of unknown function DUF26 Pfam Description: Domain of unknown function DUF26
  misc_feature (23)..(188): Homolog of NCBI NO: 11994709 NR Description: contains similarity to receptor protein
  misc_feature (1)..(187): Homolog of NCBI NO: 15233366 NR Description: pollen coat receptor kinase, putative
  misc_feature (1)..(187): Homolog of NCBI NO: 15233235 NR Description: receptor-like kinase-related [Arabidopsis
  misc_feature (1)..(187): Homolog of NCBI NO: 15233238 NR Description: receptor-like protein kinase-related [Arabidopsis
  misc_feature (1)..(187): Homolog of NCBI NO: 15233236 NR Description: receptor-like protein kinase-related [Arabidopsis
  misc_feature (1)..(188): Homolog of NCBI NO: 15233204 NR Description: pollen coat receptor kinase, putative
  misc_feature (1)..(188): Homolog of NCBI NO: 15233207 NR Description: receptor-like protein kinase-related [Arabidopsis
  misc_feature (1)..(188): Homolog of NCBI NO: 9279744 NR Description: contains similarity to receptor protein
  misc_feature (1)..(187): Homolog of NCBI NO: 15233368 NR Description: receptor-like protein kinase-related [Arabidopsis
  misc_feature (1)..(188): Homolog of NCBI NO: 15233201 NR Description: receptor-like protein kinase-related [Arabidopsis
MFYSGSYRGFYLFGMNNDNAILQCRADSYGTKCHDCFATALAKLRRKCPWYKGMIIWYDQCLLAITTTDAIGKIDYDNNFCMSNAKKLGGDKSAFTRTWKTLMDNLTTLATTTKGKDTYTMFSAGETLYKGDKMYGMVQCTYDLSLRACKECLVFNSVRFQDCLSDTRGARFVGGTCTFRFEFYPFISKPVLNI

SEQ ID NO: 1053 - protein, 180 aa, Zea mays subsp. mays
  peptide (1)..(180): Ceres Seq. ID no. 15178927
  misc_feature (7)..(58): Pfam Name: Domain of unknown function DUF26 Pfam Description: Domain of unknown function DUF26
  misc_feature (1)..(174): Homolog of NCBI NO: 15233201 NR Description: receptor-like protein kinase-related [Arabidopsis
  misc_feature (9)..(174): Homolog of NCBI NO: 11994709 NR Description: contains similarity to receptor protein
  misc_feature (1)..(173): Homolog of NCBI NO: 15233366 NR Description: pollen coat receptor kinase, putative
  misc_feature (1)..(173): Homolog of NCBI NO: 15233235 NR Description: receptor-like kinase-related [Arabidopsis
  misc_feature (1)..(173): Homolog of NCBI NO: 15233238 NR Description: receptor-like protein kinase-related [Arabidopsis
  misc_feature (1)..(173): Homolog of NCBI NO: 15233236 NR Description: receptor-like protein kinase-related [Arabidopsis
  misc_feature (1)..(174): Homolog of NCBI NO: 15233204 NR Description: pollen coat receptor kinase, putative
  misc_feature (1)..(174): Homolog of NCBI NO: 15233207 NR Description: receptor-like protein kinase-related [Arabidopsis
  misc_feature (1)..(174): Homolog of NCBI NO: 9279744 NR Description: contains similarity to receptor protein
  misc_feature (1)..(173): Homolog of NCBI NO: 15233368 NR Description: receptor-like protein kinase-related [Arabidopsis
MNNDNAILQCRADSYGTKCHDCFATALAKLRRKCPWYKGMIIWYDQCLLAITTTDAIGKIDYDNNFCMSNAKKLGGDKSAFTRTWKTLMDNLTTLATTTKGKDTYTMFSAGETLYKGDKMYGMVQCTYDLSLRACKECLVFNSVRFQDCLSDTRGARFVGGTCTFRFEFYPFISKPVLNI

SEQ ID NO: 1054 - DNA, 885 bp, Zea mays subsp. mays
  misc_feature (1)..(885): Ceres Seq. ID no. 15176511
ataacaaaaaaaaaatggcgaccgcgtctctcgtcccgacatcaaacatcttccatgtctctccgtcagttagaacaagagctagcgtcattgttgcatcatctcatcaacaacaaccaagaaggagagacttactgctgaaaacagcggtggctattcctgcgattttgaacttgaaggaagctcctatctctgaggcgcgtgaggtggaagtgggatcgttcttaccaccttctgagtctgacccttccttcgtcctcttcaaagccaaaccttctgatactcctgctctccgcgcagggaacgtgcagccgtatcagtttgttctaccaccgaactggaaacagcttcgaatagccaacatcttgtcaggcaactactgccaaccgaaatgcgcagagccatggatagaagtgaagttcgagaacgagaagcaagggaaagttcaagtagttgcttctcctttgattcgtttaaccaacaagccaaacgcaactattgaagatctcggtgagcctgagagagtgattgcttctctcggtccctttgtcactggaaactcttatgattctgatgagcttgtggatacatcaatcgaaaagatcggtgatcaaacgtactataagtatgtgttggagacgccgtttgcgctaacgggaagtcataaccttgcaaaagcgacagcgaaagggaacactgtggttctgtttgtggtgagtgctactgagaagcaatggcagagctcacagaagactcttcaagccattcttgattcttttcaactgtaaaatcagagttattgttatgactctaaaagaaactatagagcaaacggtttgtgtgtgattgtttgtgtgtagtacaatataacgaagtcatttcttc

SEQ ID NO: 1055 - protein, 261 aa, Zea mays subsp. mays
  peptide (1)..(261): Ceres Seq. ID no. 15176512
  misc_feature (104)..(261): Homolog of NCBI NO: 8928455 NR Description: Thylakoid lumenal 29.8 kDa protein, chloroplast
  misc_feature (104)..(261): Homolog of NCBI NO: 30699237 NR Description: thylakoid lumenal 29.8 kDa protein [Arabidopsis
  misc_feature (226)..(261): Homolog of NCBI NO: 34909044 NR Description: P0034E02.35 [Oryza sativa (japonica
  misc_feature (41)..(205): Homolog of NCBI NO: 34909044 NR Description: P0034E02.35 [Oryza sativa (japonica
  misc_feature (5)..(261): Homolog of NCBI NO: 15228983 NR Description: thylakoid lumenal 20 kDa protein [Arabidopsis
NKKKMATASLVPTSNIFHVSPSVRTRASVIVASSHQQQPRRRDLLLKTAVAIPAILNLKEAPISEAREVEVGSFLPPSESDPSFVLFKAKPSDTPALRAGNVQPYQFVLPPNWKQLRIANILSGNYCQPKCAEPWIEVKFENEKQGKVQVVASPLIRLTNKPNATIEDLGEPERVIASLGPFVTGNSYDSDELVDTSIEKIGDQTYYKYVLETPFALTGSHNLAKATAKGNTVVLFVVSATEKQWQSSQKTLQAILDSFQL

SEQ ID NO: 1056 - protein, 257 aa, Zea mays subsp. mays
  peptide (1)..(257): Ceres Seq. ID no. 15176513
  misc_feature (100)..(257): Homolog of NCBI NO: 8928455 NR Description: Thylakoid lumenal 29.8 kDa protein, chloroplast
  misc_feature (100)..(257): Homolog of NCBI NO: 30699237 NR Description: thylakoid lumenal 29.8 kDa protein [Arabidopsis
  misc_feature (222)..(257): Homolog of NCBI NO: 34909044 NR Description: P0034E02.35 [Oryza sativa (japonica
  misc_feature (37)..(201): Homolog of NCBI NO: 34909044 NR Description: P0034E02.35 [Oryza sativa (japonica
  misc_feature (1)..(257): Homolog of NCBI NO: 15228983 NR Description: thylakoid lumenal 20 kDa protein [Arabidopsis
MATASLVPTSNIFHVSPSVRTRASVIVASSHQQQPRRRDLLLKTAVAIPAILNLKEAPISEAREVEVGSFLPPSESDPSFVLFKAKPSDTPALRAGNVQPYQFVLPPNWKQLRIANILSGNYCQPKCAEPWIEVKFENEKQGKVQVVASPLIRLTNKPNATIEDLGEPERVIASLGPFVTGNSYDSDELVDTSIEKIGDQTYYKYVLETPFALTGSHNLAKATAKGNTVVLFVVSATEKQWQSSQKTLQAILDSFQL

SEQ ID NO: 1057 - DNA, 1447 bp, Zea mays subsp. mays
  misc_feature (1)..(1447): Ceres Seq. ID no. 15179593
attttccacgccttcattctctctataagattcattttatagattccatggccaccgtctcctccgcttctccctggccaagcgtttccacctccgcctcagattcgaactctgctgttccctctcaccaccgcgatcgtggagacgagaccgagtctctcgattccttctcctccatgagcctcaactccgaagagattactcataattccgatcgaattccggagtctcaaacaccggcgaatcctcccccgtcgctgctccacctctccttcaaccaggaccacgcctgcttcgccgtcggcaccgaccgcggcttccggatcctcaactgcgatccgttccgcgaaatcttccggcgcgatttcgatcggggcggtggagtcgccgtcgtggagatgctcttcagatgcaatatcctagcgctcgtaggcggcggacctgatccgcagtatccgccgaacaaggtcatgatttgggacgatcaccagagccggtgcatcggcgagctctccttcaggtccgatgttcgatccgttaggctcaggagggatcggattatcgtggtcctcgagcagaagatttttgtttacaacttcgcggaccttaagctgatgcatcagattgagactattgcgaaccctaagggcttgtgcgctgtctctcagggtgctggctctatggtgttggtgtgtcctggtttgcagaaaggacaactgaggatcgagcattatgcttcgaagcggactaagttcgtcatggctcatgattcgaggattgcttgctttgctctcacgcaggatgggcatttgttggccacggctagctctaaggggactctggttcggatctttaatactgttgatggcaccttgcgccaagaggttaggaggggtgcagatagagcagagatatacagtctggctttctcttcaaatgctcagtggttagctgtctcaagtgacaaaggaaccgtccatgtctttggtctcaaaggcaactccggtgctcaggtgaaagacacacccagaattgcatctgatcttactcgtacttcctcatccccatcctcgtccctgtcattattcaaaggagtgttgcccaagtatttcagctcggagtggtcggtggctcagttccggttggttgaaggaactcagtacgtagtcgcctttggacatcagaagaatactgttgttattcttggcatggatgggagcttctacagatgccagtttgatccggtgaatgggggagaaatgtctcagcttgagtatcacaactgtctaaaacctcctgttttctagatgcaactattttcttaagttccttctatcttttatctctgctctacttaagtggtgagagtcggtgcaaccatatggtgttaatgtatatagtttgtgtgtataataattacgaatggttcttataatttccaaaaacc

SEQ ID NO: 1058 - protein, 434 aa, Zea mays subsp. mays
  peptide (1)..(434): Ceres Seq. ID no. 15179594
  misc_feature (293)..(329): Pfam Name: WD domain, G-beta repeat Pfam Description: WD domain, G-beta repeat
  misc_feature (84)..(236): Homolog of NCBI NO: 16740527 NR Description: Required for cytoplasm to vacuole targeting of I and starvation induced autophagy (AUT10). Needed for
  misc_feature (365)..(430): Homolog of NCBI NO: 34896164 NR Description: hypothetical protein~similar to Arabidopsis
  misc_feature (86)..(359): Homolog of NCBI NO: 34896164 NR Description: hypothetical protein~similar to Arabidopsis
  misc_feature (86)..(430): Homolog of NCBI NO: 7487233 NR Description: hypothetical protein At2g40810 [imported] -
  misc_feature (86)..(430): Homolog of NCBI NO: 30694449 NR Description: WD-40 repeat protein family [Arabidopsis thaliana]
  misc_feature (57)..(430): Homolog of NCBI NO: 30688413 NR Description: WD-40 repeat protein family [Arabidopsis
  misc_feature (16)..(297): Homolog of NCBI NO: 18412493 NR Description: expressed protein [Arabidopsis thaliana]
  misc_feature (18)..(431): Homolog of NCBI NO: 34907164 NR Description: P0423A12.19 [Oryza sativa (japonica
  misc_feature (16)..(434): Homolog of NCBI NO: 11288364 NR Description: hypothetical protein F26K9.200 - Arabidopsis
  misc_feature (16)..(434): Homolog of NCBI NO: 14517420 NR Description: AT3g62770/F26K9_200 [Arabidopsis thaliana]
FPRLHSLYKIHFIDSMATVSSASPWPSVSTSASDSNSAVPSHHRDRGDETESLDSFSSMSLNSEEITHNSDRIPESQTPANPPPSLLHLSFNQDHACFAVGTDRGFRILNCDPFREIFRRDFDRGGGVAVVEMLFRCNILALVGGGPDPQYPPNKVMIWDDHQSRCIGELSFRSDVRSVRLRRDRIIVVLEQKIFVYNFADLKLMHQIETIANPKGLCAVSQGAGSMVLVCPGLQKGQLRIEHYASKRTKFVMAHDSRIACFALTQDGHLLATASSKGTLVRIFNTVDGTLRQEVRRGADRAEIYSLAFSSNAQWLAVSSDKGTVHVFGLKGNSGAQVKDTPRIASDLTRTSSSPSSSLSLFKGVLPKYFSSEWSVAQFRLVEGTQYVVAFGHQKNTVVILGMDGSFYRCQFDPVNGGEMSQLEYHNCLKPPVF

SEQ ID NO: 1059 - protein, 419 aa, Zea mays subsp. mays
  peptide (1)..(419): Ceres Seq. ID no. 15179595
  misc_feature (278)..(314): Pfam Name: WD domain, G-beta repeat Pfam Description: WD domain, G-beta repeat
  misc_feature (69)..(221): Homolog of NCBI NO: 16740527 NR Description: Required for cytoplasm to vacuole targeting of I and starvation induced autophagy (AUT10). Needed for
  misc_feature (350)..(415): Homolog of NCBI NO: 34896164 NR Description: hypothetical protein~similar to Arabidopsis
  misc_feature (71)..(344): Homolog of NCBI NO: 34896164 NR Description: hypothetical protein~similar to Arabidopsis
  misc_feature (71)..(415): Homolog of NCBI NO: 7487233 NR Description: hypothetical protein At2g40810 [imported] -
  misc_feature (71)..(415): Homolog of NCBI NO: 30694449 NR Description: WD-40 repeat protein family [Arabidopsis thaliana]
  misc_feature (42)..(415): Homolog of NCBI NO: 30688413 NR Description: WD-40 repeat protein family [Arabidopsis
  misc_feature (1)..(282): Homolog of NCBI NO: 18412493 NR Description: expressed protein [Arabidopsis thaliana]
  misc_feature (3)..(416): Homolog of NCBI NO: 34907164 NR Description: P0423A12.19 [Oryza sativa (japonica
  misc_feature (1)..(419): Homolog of NCBI NO: 11288364 NR Description: hypothetical protein F26K9.200 - Arabidopsis
  misc_feature (1)..(419): Homolog of NCBI NO: 14517420 NR Description: AT3g62770/F26K9_200 [Arabidopsis thaliana]
MATVSSASPWPSVSTSASDSNSAVPSHHRDRGDETESLDSFSSMSLNSEEITHNSDRIPESQTPANPPPSLLHLSFNQDHACFAVGTDRGFRILNCDPFREIFRRDFDRGGGVAVVEMLFRCNILALVGGGPDPQYPPNKVMIWDDHQSRCIGELSFRSDVRSVRLRRDRIIVVLEQKIFVYNFADLKLMHQIETIANPKGLCAVSQGAGSMVLVCPGLQKGQLRIEHYASKRTKFVMAHDSRIACFALTQDGHLLATASSKGTLVRIFNTVDGTLRQEVRRGADRAEIYSLAFSSNAQWLAVSSDKGTVHVFGLKGNSGAQVKDTPRIASDLTRTSSSPSSSLSLFKGVLPKYFSSEWSVAQFRLVEGTQYVVAFGHQKNTVVILGMDGSFYRCQFDPVNGGEMSQLEYHNCLKPPVF

SEQ ID NO: 1060 - protein, 376 aa, Zea mays subsp. mays
  peptide (1)..(376): Ceres Seq. ID no. 15179596
  misc_feature (235)..(271): Pfam Name: WD domain, G-beta repeat Pfam Description: WD domain, G-beta repeat
  misc_feature (26)..(178): Homolog of NCBI NO: 16740527 NR Description: Required for cytoplasm to vacuole targeting of I and starvation induced autophagy (AUT10). Needed for
  misc_feature (307)..(372): Homolog of NCBI NO: 34896164 NR Description: hypothetical protein~similar to Arabidopsis
  misc_feature (28)..(301): Homolog of NCBI NO: 34896164 NR Description: hypothetical protein~similar to Arabidopsis
  misc_feature (28)..(372): Homolog of NCBI NO: 7487233 NR Description: hypothetical protein At2g40810 [imported] -
  misc_feature (28)..(372): Homolog of NCBI NO: 30694449 NR Description: WD-40 repeat protein family [Arabidopsis thaliana]
  misc_feature (1)..(372): Homolog of NCBI NO: 30688413 NR Description: WD-40 repeat protein family [Arabidopsis
  misc_feature (1)..(239): Homolog of NCBI NO: 18412493 NR Description: expressed protein [Arabidopsis thaliana]
  misc_feature (1)..(373): Homolog of NCBI NO: 34907164 NR Description: P0423A12.19 [Oryza sativa (japonica
  misc_feature (1)..(376): Homolog of NCBI NO: 11288364 NR Description: hypothetical protein F26K9.200 - Arabidopsis
  misc_feature (1)..(376): Homolog of NCBI NO: 14517420 NR Description: AT3g62770/F26K9_200 [Arabidopsis thaliana]
MSLNSEEITHNSDRIPESQTPANPPPSLLHLSFNQDHACFAVGTDRGFRILNCDPFREIFRRDFDRGGGVAVVEMLFRCNILALVGGGPDPQYPPNKVMIWDDHQSRCIGELSFRSDVRSVRLRRDRIIVVLEQKIFVYNFADLKLMHQIETIANPKGLCAVSQGAGSMVLVCPGLQKGQLRIEHYASKRTKFVMAHDSRIACFALTQDGHLLATASSKGTLVRIFNTVDGTLRQEVRRGADRAEIYSLAFSSNAQWLAVSSDKGTVHVFGLKGNSGAQVKDTPRIASDLTRTSSSPSSSLSLFKGVLPKYFSSEWSVAQFRLVEGTQYVVAFGHQKNTVVILGMDGSFYRCQFDPVNGGEMSQLEYHNCLKPPVF

SEQ ID NO: 1061 - DNA, 746 bp, Zea mays subsp. mays
  misc_feature (1)..(746): Ceres Seq. ID no. 15179616
aattagttgtcctcttctctaaaacattttcaacaaagaaaacggtaataagagagaagaggtggtagtaaacaagatcagaatctttaacattttcaaaacaaatggcgaccaaagccatcttcttcttctttgtctcggccgtgtgcctgtcctctctcgccggcgttgccaacgctgacgccgacgactttgacagtttccaaatccagggatcggtttactgtgacacttgccgtgtccaattcgttacccgcctcagccaattccttgaaggtgcgaaagtgaagctagagtgcaggagtagaacaaacggaactgtaacgttgactaaagaagccgtgacggacaaatcaggaagctacaaaatggaagtcaccggtgaccacgaggaggaagtctgcgagctcgttctcctccaatcaccagacagtggttgcagcgacgtcagcacagaggcttacctacgtaacgccgctaaggttagtctgaccgcgaatgacggtatcgtctcacacgagacacgtatcgttaacccccttggtttcatggttaagacgccgttagctgattgtcccgccgcatttaaggagcttggaatcgtccctgacgtcatcttctaaatatgatgacgacttgtaccaattcaagatcgttatttaactgtcatctattatttgctttcttgtatacagaaaacgtaatttgataaaaatacaaaaaagcggcaattctatatttattat

SEQ ID NO: 1062 - protein, 172 aa, Zea mays subsp. mays
  peptide (1)..(172): Ceres Seq. ID no. 15179617
  misc_feature (35)..(159): Pfam Name: Pollen proteins Ole e I family Pfam Description: Pollen proteins Ole e I family
  misc_feature (4)..(168): Homolog of NCBI NO: 125887 NR Description: Anther specific LAT52 protein precursor
  misc_feature (13)..(169): Homolog of NCBI NO: 28380096 NR Description: Olee1-like protein precursor
  misc_feature (1)..(166): Homolog of NCBI NO: 22074346 NR Description: Che a 1 allergen precursor [Chenopodium album]
  misc_feature (58)..(172): Homolog of NCBI NO: 28393099 NR Description: unknown protein [Arabidopsis thaliana]
  misc_feature (5)..(172): Homolog of NCBI NO: 15218844 NR Description: expressed protein [Arabidopsis thaliana]
  misc_feature (16)..(172): Homolog of NCBI NO: 9758935 NR Description: Ole e I (main olive allergen)-like protein
  misc_feature (1)..(172): Homolog of NCBI NO: 21593871 NR Description: Ole e I (main olive allergen)-like protein
  misc_feature (1)..(172): Homolog of NCBI NO: 18422603 NR Description: Ole e I (main olive allergen)-related protein
  misc_feature (1)..(172): Homolog of NCBI NO: 18415132 NR Description: Ole e I (main olive allergen)-related protein
  misc_feature (1)..(169): Homolog of NCBI NO: 7486300 NR Description: hypothetical protein F28J12.250 - Arabidopsis
MATKAIFFFFVSAVCLSSLAGVANADADDFDSFQIQGSVYCDTCRVQFVTRLSQFLEGAKVKLECRSRTNGTVTLTKEAVTDKSGSYKMEVTGDHEEEVCELVLLQSPDSGCSDVSTEAYLRNAAKVSLTANDGIVSHETRIVNPLGFMVKTPLADCPAAFKELGIVPDVIF

SEQ ID NO: 1063 - DNA, 892 bp, Zea mays subsp. mays
  misc_feature (1)..(892): Ceres Seq. ID no. 15179952
gaaaaatctctactcgtttccggaagaagatgactggagttgatgatgacaaggagttcaaagaggaaaccgtgattctcagcgacgacgacagtgaagtggaagaagttaaagacggaggagaagaaggctccgacgaggaagaagaagaagaagtcgatggaagtgaaggtgacgatgatgaggaagatgaagacgacgacgaggtccaggttttgcagtccctaggtgggcctccggtacagtcggctgaagacgaagatgaggaaggagaagaagacggaaacggagacgatgatgatgatgatgacgatgacgacgacgatgacgacgacgaggacgacgaagatggtgaagatgaggaggatcttgggactgattacctagtgaggccaattggtcgggctgaagatgaagaggatgcgagtgatttcgagcctgaagagaatggtgtggaggaagacatcgatgaaggtgaagatgacgacgagaatgataactcgggtgcgggaaaatctgaggctcctcccaagaggaagagaggagctgctgaggaagaggaagaggaggatagtgatgatgaagatgatgcaagacctccgaagaggtagttttcgaggaatttgacaacaacagcatggttcaaacaaacagatagagagcgttatggcttttttttttaaaaaagaaaatttggagtcgtgagatttgaatcattggttggggttcatgtaagtttattatggagcaagacttagtagtttaagttgagtaggggcttttttttttttttctttctcattttatgcaaatgttgtttctttttctagtgagtcaataaccaatgtttctggaacgatttgctgtctaatgctatttctctatcagttac

SEQ ID NO: 1064 - protein, 202 aa, Zea mays subsp. mays
  peptide (1)..(202): Ceres Seq. ID no. 15179953
  misc_feature (34)..(196): Pfam Name: Chromadorea ALT protein Pfam Description: Chromadorea ALT protein
  misc_feature (14)..(196): Homolog of NCBI NO: 35210492 NR Description: aspartic acid-rich protein aspolin1 [Theragra
  misc_feature (14)..(196): Homolog of NCBI NO: 35210494 NR Description: aspartic acid-rich protein aspolin2 [Theragra
  misc_feature (16)..(196): Homolog of NCBI NO: 35210494 NR Description: aspartic acid-rich protein aspolin2 [Theragra
  misc_feature (16)..(196): Homolog of NCBI NO: 35210492 NR Description: aspartic acid-rich protein aspolin1 [Theragra
  misc_feature (14)..(196): Homolog of NCBI NO: 35210494 NR Description: aspartic acid-rich protein aspolin2 [Theragra
  misc_feature (14)..(196): Homolog of NCBI NO: 35210494 NR Description: aspartic acid-rich protein aspolin2 [Theragra
  misc_feature (64)..(202): Homolog of NCBI NO: 28393370 NR Description: unknown protein [Arabidopsis thaliana]
  misc_feature (64)..(202): Homolog of NCBI NO: 30684391 NR Description: expressed protein [Arabidopsis thaliana]
  misc_feature (15)..(196): Homolog of NCBI NO: 34894890 NR Description: B1140D12.10 [Oryza sativa (japonica
  misc_feature (10)..(202): Homolog of NCBI NO: 18401985 NR Description: expressed protein [Arabidopsis thaliana]
KISTRFRKKMTGVDDDKEFKEETVILSDDDSEVEEVKDGGEEGSDEEEEEEVDGSEGDDDEEDEDDDEVQVLQSLGGPPVQSAEDEDEEGEEDGNGDDDDDDDDDDDDDDDEDDEDGEDEEDLGTDYLVRPIGRAEDEEDASDFEPEENGVEEDIDEGEDDDENDNSGAGKSEAPPKRKRGAAEEEEEEDSDDEDDARPPKR

SEQ ID NO: 1065 - protein, 193 aa, Zea mays subsp. mays
  peptide (1)..(193): Ceres Seq. ID no. 15179954
  misc_feature (25)..(187): Pfam Name: Chromadorea ALT protein Pfam Description: Chromadorea ALT protein
  misc_feature (5)..(187): Homolog of NCBI NO: 35210492 NR Description: aspartic acid-rich protein aspolin1 [Theragra
  misc_feature (5)..(187): Homolog of NCBI NO: 35210494 NR Description: aspartic acid-rich protein aspolin2 [Theragra
  misc_feature (7)..(187): Homolog of NCBI NO: 35210494 NR Description: aspartic acid-rich protein aspolin2 [Theragra
  misc_feature (7)..(187): Homolog of NCBI NO: 35210492 NR Description: aspartic acid-rich protein aspolin1 [Theragra
  misc_feature (5)..(187): Homolog of NCBI NO: 35210494 NR Description: aspartic acid-rich protein aspolin2 [Theragra
  misc_feature (5)..(187): Homolog of NCBI NO: 35210494 NR Description: aspartic acid-rich protein aspolin2 [Theragra
  misc_feature (55)..(193): Homolog of NCBI NO: 28393370 NR Description: unknown protein [Arabidopsis thaliana]
  misc_feature (55)..(193): Homolog of NCBI NO: 30684391 NR Description: expressed protein [Arabidopsis thaliana]
  misc_feature (6)..(187): Homolog of NCBI NO: 34894890 NR Description: B1140D12.10 [Oryza sativa (japonica
  misc_feature (1)..(193): Homolog of NCBI NO: 18401985 NR Description: expressed protein [Arabidopsis thaliana]
MTGVDDDKEFKEETVILSDDDSEVEEVKDGGEEGSDEEEEEEVDGSEGDDDEEDEDDDEVQVLQSLGGPPVQSAEDEDEEGEEDGNGDDDDDDDDDDDDDDDEDDEDGEDEEDLGTDYLVRPIGRAEDEEDASDFEPEENGVEEDIDEGEDDDENDNSGAGKSEAPPKRKRGAAEEEEEEDSDDEDDARPPKR

SEQ ID NO: 1066 - DNA, 872 bp, Zea mays subsp. mays
  misc_feature (1)..(872): Ceres Seq. ID no. 15179153
aatcggaaaattctagagcatcgagagtttcttcaatggcgaatctccccaccgttctcgttaccggcgctagtggcaaaacaggtcagattgtgtacaagaagctgaaggagaggtcagacaagtttgtggcgaaggggttagtgagaactcctcaagggaaagaggagattggaggagaagatgatgtgttcattggtgatataagggatgctgatagcattacccctgcgattcaagggatcgatgcgcttgtgattctcactagcgctgtgcccaagatgaaacctgggtttgatcccactaaaggtggaagacctgagttcattttcgatgatggacaataccctgaacaggttgattggattggccagaagaaccaaatagatgctgccaaggctgctggtgttaagcatattgtcttggttgggtccatgggtggaacaaatcctgatcatcctctcaacaaactgggaaatgggaacatactgatttggaagaggaaagctgaacagtaccttgctgattctggtactccttacacaataatcagagctggaggacttctagacaaagaaggaggtgcacgagagctcctagttggcaaagacgatgagcttcttcaaacagacaccaaaaccgtccccagggctgatgttgctgaagtctgcattcaggcattgctgttcgaggaagctaagaataaagcatttgatctcggttcaaaaccagagggaaccagttctcccaccaatgacttcaaggctctcttctctcaagtcatcgctcgtttttagatcttctatctctattgcaactgaataatttgtgttgtaatgtaccaaaccttttaaaataaaatctccgggtcc

SEQ ID NO: 1067 - protein, 264 aa, Zea mays subsp. mays
  peptide (1)..(264): Ceres Seq. ID no. 15179154
  misc_feature (117)..(248): Pfam Name: Isoflavone reductase Pfam Description: Isoflavone reductase
  misc_feature (9)..(264): Homolog of NCBI NO: 14719331 NR Description: putative 3-beta hydroxysteroid
  misc_feature (2)..(264): Homolog of NCBI NO: 18404496 NR Description: expressed protein [Arabidopsis thaliana]
  misc_feature (11)..(264): Homolog of NCBI NO: 34897418 NR Description: unknown protein [Oryza sativa (japonica
  misc_feature (103)..(259): Homolog of NCBI NO: 17230243 NR Description: hypothetical protein [Nostoc sp. PCC 7120]
  misc_feature (103)..(260): Homolog of NCBI NO: 16330694 NR Description: hypothetical protein [Synechocystis sp. PCC 6803]
  misc_feature (2)..(264): Homolog of NCBI NO: 7485430 NR Description: hypothetical protein At2g37660 [imported] -
  misc_feature (103)..(260): Homolog of NCBI NO: 23130188 NR Description: hypothetical protein [Nostoc punctiforme]
  misc_feature (117)..(250): Homolog of NCBI NO: 37523053 NR Description: hypothetical protein gll3484 [Gloeobacter
  misc_feature (12)..(259): Homolog of NCBI NO: 11358410 NR Description: hypothetical protein T7H20.290 - Arabidopsis
  misc_feature (12)..(264): Homolog of NCBI NO: 18413869 NR Description: expressed protein [Arabidopsis thaliana]
SENSRASRVSSMANLPTVLVTGASGKTGQIVYKKLKERSDKFVAKGLVRTPQGKEEIGGEDDVFIGDIRDADSITPAIQGIDALVILTSAVPKMKPGFDPTKGGRPEFIFDDGQYPEQVDWIGQKNQIDAAKAAGVKHIVLVGSMGGTNPDHPLNKLGNGNILIWKRKAEQYLADSGTPYTIIRAGGLLDKEGGARELLVGKDDELLQTDTKTVPRADVAEVCIQALLFEEAKNKAFDLGSKPEGTSSPTNDFKALFSQVIARF

SEQ ID NO: 1068 - protein, 253 aa, Zea mays subsp. mays
  peptide (1)..(253): Ceres Seq. ID no. 15179155
  misc_feature (106)..(237): Pfam Name: Isoflavone reductase Pfam Description: Isoflavone reductase
  misc_feature (106)..(239): Homolog of NCBI NO: 37523053 NR Description: hypothetical protein gll3484 [Gloeobacter
  misc_feature (92)..(248): Homolog of NCBI NO: 17230243 NR Description: hypothetical protein [Nostoc sp. PCC 7120]
  misc_feature (92)..(249): Homolog of NCBI NO: 23130188 NR Description: hypothetical protein [Nostoc punctiforme]
  misc_feature (92)..(249): Homolog of NCBI NO: 16330694 NR Description: hypothetical protein [Synechocystis sp. PCC 6803]
  misc_feature (1)..(253): Homolog of NCBI NO: 7485430 NR Description: hypothetical protein At2g37660 [imported] -
  misc_feature (1)..(253): Homolog of NCBI NO: 14719331 NR Description: putative 3-beta hydroxysteroid
  misc_feature (1)..(253): Homolog of NCBI NO: 18404496 NR Description: expressed protein [Arabidopsis thaliana]
  misc_feature (1)..(253): Homolog of NCBI NO: 34897418 NR Description: unknown protein [Oryza sativa (japonica
  misc_feature (1)..(248): Homolog of NCBI NO: 11358410 NR Description: hypothetical protein T7H20.290 - Arabidopsis
  misc_feature (1)..(253): Homolog of NCBI NO: 18413869 NR Description: expressed protein [Arabidopsis thaliana]
MANLPTVLVTGASGKTGQIVYKKLKERSDKFVAKGLVRTPQGKEEIGGEDDVFIGDIRDADSITPAIQGIDALVILTSAVPKMKPGFDPTKGGRPEFIFDDGQYPEQVDWIGQKNQIDAAKAAGVKHIVLVGSMGGTNPDHPLNKLGNGNILIWKRKAEQYLADSGTPYTIIRAGGLLDKEGGARELLVGKDDELLQTDTKTVPRADVAEVCIQALLFEEAKNKAFDLGSKPEGTSSPTNDFKALFSQVIARF

SEQ ID NO: 1069 - protein, 171 aa, Zea mays subsp. mays
  peptide (1)..(171): Ceres Seq. ID no. 15179156
  misc_feature (24)..(155): Pfam Name: Isoflavone reductase Pfam Description: Isoflavone reductase
  misc_feature (24)..(157): Homolog of NCBI NO: 37523053 NR Description: hypothetical protein gll3484 [Gloeobacter
  misc_feature (10)..(166): Homolog of NCBI NO: 17230243 NR Description: hypothetical protein [Nostoc sp. PCC 7120]
  misc_feature (10)..(167): Homolog of NCBI NO: 23130188 NR Description: hypothetical protein [Nostoc punctiforme]
  misc_feature (10)..(167): Homolog of NCBI NO: 16330694 NR Description: hypothetical protein [Synechocystis sp. PCC 6803]
  misc_feature (1)..(171): Homolog of NCBI NO: 7485430 NR Description: hypothetical protein At2g37660 [imported] -
  misc_feature (1)..(171): Homolog of NCBI NO: 14719331 NR Description: putative 3-beta hydroxysteroid
  misc_feature (1)..(171): Homolog of NCBI NO: 18404496 NR Description: expressed protein [Arabidopsis thaliana]
  misc_feature (1)..(171): Homolog of NCBI NO: 34897418 NR Description: unknown protein [Oryza sativa (japonica
  misc_feature (1)..(166): Homolog of NCBI NO: 11358410 NR Description: hypothetical protein T7H20.290 - Arabidopsis
  misc_feature (1)..(171): Homolog of NCBI NO: 18413869 NR Description: expressed protein [Arabidopsis thaliana]
MKPGFDPTKGGRPEFIFDDGQYPEQVDWIGQKNQIDAAKAAGVKHIVLVGSMGGTNPDHPLNKLGNGNILIWKRKAEQYLADSGTPYTIIRAGGLLDKEGGARELLVGKDDELLQTDTKTVPRADVAEVCIQALLFEEAKNKAFDLGSKPEGTSSPTNDFKALFSQVIARF

SEQ ID NO: 1070 - DNA, 737 bp, Zea mays subsp. mays
  misc_feature (1)..(737): Ceres Seq. ID no. 15173990
acaacaaacaatacatcaattctgccagataacgttttgagattttctctaaagctaaaagtcaatttaaaggtatttcttgttaagatcgaaaactctgttttgcagtttttgagtttttgaatcaaagatggggaggttgtttgtggttcatcttgaagggaagatctatagctgcaaacactgcaagactcatcttgctttatatgaagacatcatctccaagtcttttcactgtaagcatggaaaagcttatcttttcaacaaagtttccaatgttacaattggagaaacagaagacagaatgatgatgacaggaaaacatacagtggctgacattttctgtgtctcatgtggatcaatagttggttggagatatgagactgctcatgagaagagccagaagtacaaagaaggaaagtcagttcttgaaagatttaagatatcgggtcctgatggaagcaactactgggtgagtagccatggaaggcatataggtggaagtgatgcagatgattcttgaagtcctctctctatccttatgatttggcatccattgtaaatgtaaattcttcaacctcaactccaacttgcttttataagaccaacaaaagagctttattctattgcgctcaatattatctgaaaatccctcagtaaataaactctgattctgtgtaatgatcatgcttcatcaaaacctatgcttcttattcgtattgctataattataaact

SEQ ID NO: 1071 - protein, 130 aa, Zea mays subsp. mays
  peptide (1)..(130): Ceres Seq. ID no. 15173991
  misc_feature (1)..(108): Pfam Name: Yippee putative zinc-binding protein Pfam Description: Yippee putative zinc-binding protein
  misc_feature (32)..(103): Homolog of NCBI NO: 27923900 NR Description: Yippee-like protein At3g08995
  misc_feature (1)..(101): Homolog of NCBI NO: 32402994 NR Description: hypothetical protein [Neurospora crassa]
  misc_feature (1)..(130): Homolog of NCBI NO: 15238881 NR Description: zinc-binding protein-related [Arabidopsis
  misc_feature (1)..(103): Homolog of NCBI NO: 15232001 NR Description: Yippee-related protein [Arabidopsis thaliana]
  misc_feature (1)..(116): Homolog of NCBI NO: 15228759 NR Description: Yippee-related protein [Arabidopsis thaliana]
  misc_feature (1)..(130): Homolog of NCBI NO: 21617953 NR Description: yippee-like protein [Arabidopsis thaliana]
  misc_feature (1)..(130): Homolog of NCBI NO: 18399156 NR Description: expressed protein [Arabidopsis thaliana]
  misc_feature (1)..(129): Homolog of NCBI NO: 28273361 NR Description: putative zinc binding protein
  misc_feature (1)..(129): Homolog of NCBI NO: 27923880 NR Description: Yippee-like protein
  misc_feature (1)..(130): Homolog of NCBI NO: 15225631 NR Description: expressed protein [Arabidopsis thaliana]
MGRLFVVHLEGKIYSCKHCKTHLALYEDIISKSFHCKHGKAYLFNKVSNVTIGETEDRMMMTGKHTVADIFCVSCGSIVGWRYETAHEKSQKYKEGKSVLERFKISGPDGSNYWVSSHGRHIGGSDADDS

SEQ ID NO: 1072 - protein, 72 aa, Zea mays subsp. mays
  peptide (1)..(72): Ceres Seq. ID no. 15173992
  misc_feature (1)..(45): Homolog of NCBI NO: 27923900 NR Description: Yippee-like protein At3g08995
  misc_feature (1)..(43): Homolog of NCBI NO: 32402994 NR Description: hypothetical protein [Neurospora crassa]
  misc_feature (1)..(72): Homolog of NCBI NO: 15238881 NR Description: zinc-binding protein-related [Arabidopsis
  misc_feature (1)..(45): Homolog of NCBI NO: 15232001 NR Description: Yippee-related protein [Arabidopsis thaliana]
  misc_feature (1)..(58): Homolog of NCBI NO: 15228759 NR Description: Yippee-related protein [Arabidopsis thaliana]
  misc_feature (1)..(72): Homolog of NCBI NO: 21617953 NR Description: yippee-like protein [Arabidopsis thaliana]
  misc_feature (1)..(72): Homolog of NCBI NO: 18399156 NR Description: expressed protein [Arabidopsis thaliana]
  misc_feature (1)..(71): Homolog of NCBI NO: 28273361 NR Description: putative zinc binding protein
  misc_feature (1)..(71): Homolog of NCBI NO: 27923880 NR Description: Yippee-like protein
  misc_feature (1)..(72): Homolog of NCBI NO: 15225631 NR Description: expressed protein [Arabidopsis thaliana]
MMMTGKHTVADIFCVSCGSIVGWRYETAHEKSQKYKEGKSVLERFKISGPDGSNYWVSSHGRHIGGSDADDS

SEQ ID NO: 1073 - protein, 71 aa, Zea mays subsp. mays
  peptide (1)..(71): Ceres Seq. ID no. 15173993
  misc_feature (1)..(44): Homolog of NCBI NO: 27923900 NR Description: Yippee-like protein At3g08995
  misc_feature (1)..(42): Homolog of NCBI NO: 32402994 NR Description: hypothetical protein [Neurospora crassa]
  misc_feature (1)..(71): Homolog of NCBI NO: 15238881 NR Description: zinc-binding protein-related [Arabidopsis
  misc_feature (1)..(44): Homolog of NCBI NO: 15232001 NR Description: Yippee-related protein [Arabidopsis thaliana]
  misc_feature (1)..(57): Homolog of NCBI NO: 15228759 NR Description: Yippee-related protein [Arabidopsis thaliana]
  misc_feature (1)..(71): Homolog of NCBI NO: 21617953 NR Description: yippee-like protein [Arabidopsis thaliana]
  misc_feature (1)..(71): Homolog of NCBI NO: 18399156 NR Description: expressed protein [Arabidopsis thaliana]
  misc_feature (1)..(70): Homolog of NCBI NO: 28273361 NR Description: putative zinc binding protein
  misc_feature (1)..(70): Homolog of NCBI NO: 27923880 NR Description: Yippee-like protein
  misc_feature (1)..(71): Homolog of NCBI NO: 15225631 NR Description: expressed protein [Arabidopsis thaliana]
MMTGKHTVADIFCVSCGSIVGWRYETAHEKSQKYKEGKSVLERFKISGPDGSNYWVSSHGRHIGGSDADDS

SEQ ID NO: 1074 - DNA, 542 bp, Zea mays subsp. mays
  misc_feature (1)..(542): Ceres Seq. ID no. 15173986
atcgaaccttgaacacctcctctctatagccggagacttcactcagagaaactcaagagaagagttagaagcaatggagggaggagaagaagctggagcggagataatggttgattcaaaggacttacagcaacaaagcaaagctttggacaagcttaccgatcgcgtcgaggatcgccagctcgattctaatcgtgttcaatcggctatggcttcgattgctgcttctagggaggctgatctaaatgccaagagattgagggagaaggaactggcttctgttaagatcaatgccgcagatgttgagctcattgtcaacgaactcgagctggagaagaatgtggtggagagaactctaagggagcacaaaggcgatgccgttgctgctactagggaattgctttcacgttatcctctatgaagggaccagttccagccttactacttgcagtttcttttgtgtgaggtttgagagcaagtatccgaatatttaactcaagttcgaagttttagtcttcttatcaatttaaatcgggttggcc

SEQ ID NO: 1075 - protein, 139 aa, Zea mays subsp. mays
  peptide (1)..(139): Ceres Seq. ID no. 15173987
  misc_feature (14)..(127): Homolog of NCBI NO: 34866616 NR Description: similar to RIKEN cDNA 2310003F16 [Rattus
  misc_feature (17)..(135): Homolog of NCBI NO: 21358275 NR Description: CG9922-PA [Drosophila melanogaster]
  misc_feature (14)..(129): Homolog of NCBI NO: 6841494 NR Description: HSPC136 [Homo sapiens]
  misc_feature (14)..(129): Homolog of NCBI NO: 27229055 NR Description: RIKEN cDNA 2310003F16 [Mus musculus]
  misc_feature (14)..(129): Homolog of NCBI NO: 27734984 NR Description: Huntingtin interacting protein K [Homo sapiens]
  misc_feature (14)..(129): Homolog of NCBI NO: 34856780 NR Description: similar to RIKEN cDNA 2310003F16 [Rattus
  misc_feature (14)..(129): Homolog of NCBI NO: 7020527 NR Description: unnamed protein product [Homo sapiens]
  misc_feature (14)..(129): Homolog of NCBI NO: 3329429 NR Description: huntingtin interacting protein HYPK [Homo sapiens]
  misc_feature (7)..(134): Homolog of NCBI NO: 31249767 NR Description: unknown protein [Oryza sativa (japonica
  misc_feature (25)..(139): Homolog of NCBI NO: 18397632 NR Description: expressed protein [Arabidopsis thaliana]
SNLEHLLSIAGDFTQRNSREELEAMEGGEEAGAEIMVDSKDLQQQSKALDKLTDRVEDRQLDSNRVQSAMASIAASREADLNAKRLREKELASVKINAADVELIVNELELEKNVVERTLREHKGDAVAATRELLSRYPL

SEQ ID NO: 1076 - protein, 115 aa, Zea mays subsp. mays
  peptide (1)..(115): Ceres Seq. ID no. 15173988
  misc_feature (1)..(103): Homolog of NCBI NO: 34866616 NR Description: similar to RIKEN cDNA 2310003F16 [Rattus
  misc_feature (1)..(111): Homolog of NCBI NO: 21358275 NR Description: CG9922-PA [Drosophila melanogaster]
  misc_feature (1)..(105): Homolog of NCBI NO: 6841494 NR Description: HSPC136 [Homo sapiens]
  misc_feature (1)..(105): Homolog of NCBI NO: 7020527 NR Description: unnamed protein product [Homo sapiens]
  misc_feature (1)..(105): Homolog of NCBI NO: 27734984 NR Description: Huntingtin interacting protein K [Homo sapiens]
  misc_feature (1)..(105): Homolog of NCBI NO: 34856780 NR Description: similar to RIKEN cDNA 2310003F16 [Rattus
  misc_feature (1)..(105): Homolog of NCBI NO: 27229055 NR Description: RIKEN cDNA 2310003F16 [Mus musculus]
  misc_feature (1)..(105): Homolog of NCBI NO: 3329429 NR Description: huntingtin interacting protein HYPK [Homo sapiens]
  misc_feature (1)..(110): Homolog of NCBI NO: 31249767 NR Description: unknown protein [Oryza sativa (japonica
  misc_feature (1)..(115): Homolog of NCBI NO: 18397632 NR Description: expressed protein [Arabidopsis thaliana]
MEGGEEAGAEIMVDSKDLQQQSKALDKLTDRVEDRQLDSNRVQSAMASIAASREADLNAKRLREKELASVKINAADVELIVNELELEKNVVERTLREHKGDAVAATRELLSRYPL

SEQ ID NO: 1077 - protein, 104 aa, Zea mays subsp. mays
  peptide (1)..(104): Ceres Seq. ID no. 15173989
  misc_feature (1)..(94): Homolog of NCBI NO: 6841494 NR Description: HSPC136 [Homo sapiens]
  misc_feature (1)..(94): Homolog of NCBI NO: 7020527 NR Description: unnamed protein product [Homo sapiens]
  misc_feature (1)..(94): Homolog of NCBI NO: 27734984 NR Description: Huntingtin interacting protein K [Homo sapiens]
  misc_feature (1)..(94): Homolog of NCBI NO: 34856780 NR Description: similar to RIKEN cDNA 2310003F16 [Rattus
  misc_feature (1)..(94): Homolog of NCBI NO: 27229055 NR Description: RIKEN cDNA 2310003F16 [Mus musculus]
  misc_feature (1)..(94): Homolog of NCBI NO: 3329429 NR Description: huntingtin interacting protein HYPK [Homo sapiens]
  misc_feature (1)..(99): Homolog of NCBI NO: 31249767 NR Description: unknown protein [Oryza sativa (japonica
  misc_feature (1)..(104): Homolog of NCBI NO: 18397632 NR Description: expressed protein [Arabidopsis thaliana]
  misc_feature (1)..(92): Homolog of NCBI NO: 34866616 NR Description: similar to RIKEN cDNA 2310003F16 [Rattus
  misc_feature (1)..(100): Homolog of NCBI NO: 21358275 NR Description: CG9922-PA [Drosophila melanogaster]
MVDSKDLQQQSKALDKLTDRVEDRQLDSNRVQSAMASIAASREADLNAKRLREKELASVKINAADVELIVNELELEKNVVERTLREHKGDAVAATRELLSRYPL

SEQ ID NO: 1078 - DNA, 760 bp, Zea mays subsp. mays
  misc_feature (1)..(760): Ceres Seq. ID no. 15176693
ataacataagataacgcatagagaaaaccaagaagaaaagaagatgtcgtggcaaacttacgttgatgagcatttgatgtgtgatgtcggagacggccagggtcatcaccttactgccgccgcaatcgttggtcatgacggtagcgtttgggctcagagcgctaactttccccagttcaaggcacaagagttcactggtattatgaaagatttcgatgaaccgggtcacttagcccccacagggttatttctagcaggagccaagtacatggtcatccaaggcgagcctggcgctgtaatccgtggcaagaagggagctggaggcataaccataaagaaaactggacaatcatgtgtctttgggatatacgaagagcccgtgacaccaggacagtgcaatatggtcgtcgagaggttgggtgattacctcctcgaacaggatctctaagcccccatctcctcaaacctactacaatgttccaccttccacatttttttatgcaaacttaatatatatgatttgatttctgggttctttctaagaaggtgaagcctaatttagagtctgattcttaaaaatgtaaggttttcctttttctttttcttgatttcatcagatttattttattttgcttttgttaaccatgttaaataatttgtctatttgttattctctcttgacttttgacgaattgcattttatgtctattgcatatagtgttgacatattaagaaaataatatatggtttgacaacaact

SEQ ID NO: 1079 - protein, 134 aa, Zea mays subsp. mays
  peptide (1)..(134): Ceres Seq. ID no. 15176694
  misc_feature (2)..(129): Pfam Name: Profilin Pfam Description: Profilin
  misc_feature (1)..(132): Homolog of NCBI NO: 6469497 NR Description: profilin [Nicotiana tabacum]
  misc_feature (1)..(132): Homolog of NCBI NO: 2499814 NR Description: Profilin 1
  misc_feature (1)..(134): Homolog of NCBI NO: 464471 NR Description: PROFILIN 1 (POLLEN ALLERGEN PHL P 11) (PHL P XI)
  misc_feature (1)..(134): Homolog of NCBI NO: 3914432 NR Description: PROFILIN 2/4 (POLLEN ALLERGEN PHL P 11) (PHL P
  misc_feature (1)..(134): Homolog of NCBI NO: 1942360 NR Description: Birch Pollen Profilin
  misc_feature (1)..(134): Homolog of NCBI NO: 3914446 NR Description: Profilin (Pollen allergen Mer a 1)
  misc_feature (1)..(134): Homolog of NCBI NO: 15224839 NR Description: profilin 4 [Arabidopsis thaliana]
  misc_feature (1)..(134): Homolog of NCBI NO: 28393116 NR Description: putative profilin 3 [Arabidopsis thaliana]
  misc_feature (1)..(134): Homolog of NCBI NO: 14423854 NR Description: Profilin
  misc_feature (1)..(134): Homolog of NCBI NO: 15233536 NR Description: profilin 3 [Arabidopsis thaliana]
MSWQTYVDEHLMCDVGDGQGHHLTAAAIVGHDGSVWAQSANFPQFKAQEFTGIMKDFDEPGHLAPTGLFLAGAKYMVIQGEPGAVIRGKKGAGGITIKKTGQSCVFGIYEEPVTPGQCNMVVERLGDYLLEQDL

SEQ ID NO: 1080 - protein, 123 aa, Zea mays subsp. mays
  peptide (1)..(123): Ceres Seq. ID no. 15176695
  misc_feature (1)..(118): Pfam Name: Profilin Pfam Description: Profilin
  misc_feature (1)..(121): Homolog of NCBI NO: 6469497 NR Description: profilin [Nicotiana tabacum]
  misc_feature (1)..(121): Homolog of NCBI NO: 2499814 NR Description: Profilin 1
  misc_feature (1)..(123): Homolog of NCBI NO: 464471 NR Description: PROFILIN 1 (POLLEN ALLERGEN PHL P 11) (PHL P XI)
  misc_feature (1)..(123): Homolog of NCBI NO: 3914432 NR Description: PROFILIN 2/4 (POLLEN ALLERGEN PHL P 11) (PHL P
  misc_feature (1)..(123): Homolog of NCBI NO: 1942360 NR Description: Birch Pollen Profilin
  misc_feature (1)..(123): Homolog of NCBI NO: 3914446 NR Description: Profilin (Pollen allergen Mer a 1)
  misc_feature (1)..(123): Homolog of NCBI NO: 15224839 NR Description: profilin 4 [Arabidopsis thaliana]
  misc_feature (1)..(123): Homolog of NCBI NO: 28393116 NR Description: putative profilin 3 [Arabidopsis thaliana]
  misc_feature (1)..(123): Homolog of NCBI NO: 14423854 NR Description: Profilin
  misc_feature (1)..(123): Homolog of NCBI NO: 15233536 NR Description: profilin 3 [Arabidopsis thaliana]
MCDVGDGQGHHLTAAAIVGHDGSVWAQSANFPQFKAQEFTGIMKDFDEPGHLAPTGLFLAGAKYMVIQGEPGAVIRGKKGAGGITIKKTGQSCVFGIYEEPVTPGQCNMVVERLGDYLLEQDL

SEQ ID NO: 1081 - protein, 81 aa, Zea mays subsp. mays
  peptide (1)..(81): Ceres Seq. ID no. 15176696
  misc_feature (1)..(76): Pfam Name: Profilin Pfam Description: Profilin
  misc_feature (1)..(79): Homolog of NCBI NO: 6469497 NR Description: profilin [Nicotiana tabacum]
  misc_feature (1)..(79): Homolog of NCBI NO: 2499814 NR Description: Profilin 1
  misc_feature (1)..(81): Homolog of NCBI NO: 464471 NR Description: PROFILIN 1 (POLLEN ALLERGEN PHL P 11) (PHL P XI)
  misc_feature (1)..(81): Homolog of NCBI NO: 3914432 NR Description: PROFILIN 2/4 (POLLEN ALLERGEN PHL P 11) (PHL P
  misc_feature (1)..(81): Homolog of NCBI NO: 1942360 NR Description: Birch Pollen Profilin
  misc_feature (1)..(81): Homolog of NCBI NO: 3914446 NR Description: Profilin (Pollen allergen Mer a 1)
  misc_feature (1)..(81): Homolog of NCBI NO: 15224839 NR Description: profilin 4 [Arabidopsis thaliana]
  misc_feature (1)..(81): Homolog of NCBI NO: 28393116 NR Description: putative profilin 3 [Arabidopsis thaliana]
  misc_feature (1)..(81): Homolog of NCBI NO: 14423854 NR Description: Profilin
  misc_feature (1)..(81): Homolog of NCBI NO: 15233536 NR Description: profilin 3 [Arabidopsis thaliana]
MKDFDEPGHLAPTGLFLAGAKYMVIQGEPGAVIRGKKGAGGITIKKTGQSCVFGIYEEPVTPGQCNMVVERLGDYLLEQDL

SEQ ID NO: 1082 - DNA, 1102 bp, Zea mays subsp. mays
  misc_feature (1)..(1102): Ceres Seq. ID no. 15176185
acgcttgaactcgttattaattagacccaaaatgttaagagtaaccggaagtctctcagcggtatcatctccggcggcggtaactttctccgccgcactgagactctccgttgcccacactctcgctttctcatctcctcctccacatccccgctgcctctccacgttctctcgttcacttatcggcagacgcatctcttcgctccgaccacgcgttccttcaatgtacccgattaggctctctggcttctcggctctcaaagcgagagcttcgtttagcagtagtgggagtagtagtccaagcagagagattctggtgcagcatgtgcttgttaaggagggtgattctgagctctttgctgaactccagaagcgaatcttggatggagaggatatgagtgatcttgcagctgagtactcgatttgtccatccaagaaggatggtggtatacttggatgggtgaaattgggtcaaatggtaccagagtttgaggaagctgcgtttaaagcagagccgaatcatgtggtcaggtgtaaaacccaatttggctggcacttattgcaagttctatctgagagggaacctgtgaaagacatccaggtggaggagctgcattccaaaatgcaagatccagttttcatggaagaggctcagttaattgatgtcagagaacctgacgagatagccacagcatccttgccaggatttaaagtgttcccgctccgccaattcggaacatgggcaccagacatcacttcaaagctgaaccctgagaaggatacattcgtcctgtgtaaggttggtggcaggtcgatgcaggttgcgaactggctgcagtctcagggcttcaagagtgtgtacaatgtggctggtggaatacaagcctattccctcaaggttgacccatcaattcctacttactgacactgccacatcagagagttctagatcatcccatgcaatttactctctttattaaaaagatttttctatcgttaatccaaataattgccaatcgtattcggggaattcatttttaacagtaagtgcctgttttcgataaaattcaaatcacataaaaactgacgcgtaatgagagat

SEQ ID NO: 1083 - protein, 307 aa, Zea mays subsp. mays
  peptide (1)..(307): Ceres Seq. ID no. 15176186
  misc_feature (204)..(299): Pfam Name: Rhodanese-like domain Pfam Description: Rhodanese-like domain
  misc_feature (103)..(197): Homolog of NCBI NO: 15893571 NR Description: Peptidil-prolyl cis-trans isomerase [Clostridium
  misc_feature (195)..(307): Homolog of NCBI NO: 37523718 NR Description: hypothetical protein gll4149 [Gloeobacter
  misc_feature (195)..(307): Homolog of NCBI NO: 16331613 NR Description: hypothetical protein [Synechocystis sp. PCC 6803]
  misc_feature (199)..(307): Homolog of NCBI NO: 22297588 NR Description: ORF_ID:tll0044~hypothetical protein
  misc_feature (191)..(307): Homolog of NCBI NO: 23039944 NR Description: hypothetical protein [Trichodesmium erythraeum
  misc_feature (196)..(307): Homolog of NCBI NO: 23127749 NR Description: hypothetical protein [Nostoc punctiforme]
  misc_feature (194)..(307): Homolog of NCBI NO: 17231535 NR Description: hypothetical protein [Nostoc sp. PCC 7120]
  misc_feature (89)..(307): Homolog of NCBI NO: 25456107 NR Description: probable peptidylprolyl isomerase (EC 5.2.1.8)
  misc_feature (11)..(307): Homolog of NCBI NO: 21554407 NR Description: peptidyl-prolyl cis-trans isomerase-like protein
  misc_feature (11)..(307): Homolog of NCBI NO: 18419898 NR Description: peptidyl-prolyl cis-trans isomerase - like
RLNSLLIRPKMLRVTGSLSAVSSPAAVTFSAALRLSVAHTLAFSSPPPHPRCLSTFSRSLIGRRISSLRPRVPSMYPIRLSGFSALKARASFSSSGSSSPSREILVQHVLVKEGDSELFAELQKRILDGEDMSDLAAEYSICPSKKDGGILGWVKLGQMVPEFEEAAFKAEPNHVVRCKTQFGWHLLQVLSEREPVKDIQVEELHSKMQDPVFMEEAQLIDVREPDEIATASLPGFKVFPLRQFGTWAPDITSKLNPEKDTFVLCKVGGRSMQVANWLQSQGFKSVYNVAGGIQAYSLKVDPSIPTY

SEQ ID NO: 1084 - protein, 297 aa, Zea mays subsp. mays
  peptide (1)..(297): Ceres Seq. ID no. 15176187
  misc_feature (194)..(289): Pfam Name: Rhodanese-like domain Pfam Description: Rhodanese-like domain
  misc_feature (93)..(187): Homolog of NCBI NO: 15893571 NR Description: Peptidil-prolyl cis-trans isomerase [Clostridium
  misc_feature (185)..(297): Homolog of NCBI NO: 37523718 NR Description: hypothetical protein gll4149 [Gloeobacter
  misc_feature (185)..(297): Homolog of NCBI NO: 16331613 NR Description: hypothetical protein [Synechocystis sp. PCC 6803]
  misc_feature (189)..(297): Homolog of NCBI NO: 22297588 NR Description: ORF_ID:tll0044~hypothetical protein
  misc_feature (181)..(297): Homolog of NCBI NO: 23039944 NR Description: hypothetical protein [Trichodesmium erythraeum
  misc_feature (186)..(297): Homolog of NCBI NO: 23127749 NR Description: hypothetical protein [Nostoc punctiforme]
  misc_feature (184)..(297): Homolog of NCBI NO: 17231535 NR Description: hypothetical protein [Nostoc sp. PCC 7120]
  misc_feature (79)..(297): Homolog of NCBI NO: 25456107 NR Description: probable peptidylprolyl isomerase (EC 5.2.1.8)
  misc_feature (1)..(297): Homolog of NCBI NO: 21554407 NR Description: peptidyl-prolyl cis-trans isomerase-like protein
  misc_feature (1)..(297): Homolog of NCBI NO: 18419898 NR Description: peptidyl-prolyl cis-trans isomerase - like
MLRVTGSLSAVSSPAAVTFSAALRLSVAHTLAFSSPPPHPRCLSTFSRSLIGRRISSLRPRVPSMYPIRLSGFSALKARASFSSSGSSSPSREILVQHVLVKEGDSELFAELQKRILDGEDMSDLAAEYSICPSKKDGGILGWVKLGQMVPEFEEAAFKAEPNHVVRCKTQFGWHLLQVLSEREPVKDIQVEELHSKMQDPVFMEEAQLIDVREPDEIATASLPGFKVFPLRQFGTWAPDITSKLNPEKDTFVLCKVGGRSMQVANWLQSQGFKSVYNVAGGIQAYSLKVDPSIPTY

SEQ ID NO: 1085 - protein, 233 aa, Zea mays subsp. mays
  peptide (1)..(233): Ceres Seq. ID no. 15176188
  misc_feature (130)..(225): Pfam Name: Rhodanese-like domain Pfam Description: Rhodanese-like domain
  misc_feature (29)..(123): Homolog of NCBI NO: 15893571 NR Description: Peptidil-prolyl cis-trans isomerase [Clostridium
  misc_feature (121)..(233): Homolog of NCBI NO: 37523718 NR Description: hypothetical protein gll4149 [Gloeobacter
  misc_feature (121)..(233): Homolog of NCBI NO: 16331613 NR Description: hypothetical protein [Synechocystis sp. PCC 6803]
  misc_feature (125)..(233): Homolog of NCBI NO: 22297588 NR Description: ORF_ID:tll0044~hypothetical protein
  misc_feature (117)..(233): Homolog of NCBI NO: 23039944 NR Description: hypothetical protein [Trichodesmium erythraeum
  misc_feature (122)..(233): Homolog of NCBI NO: 23127749 NR Description: hypothetical protein [Nostoc punctiforme]
  misc_feature (120)..(233): Homolog of NCBI NO: 17231535 NR Description: hypothetical protein [Nostoc sp. PCC 7120]
  misc_feature (15)..(233): Homolog of NCBI NO: 25456107 NR Description: probable peptidylprolyl isomerase (EC 5.2.1.8)
  misc_feature (1)..(233): Homolog of NCBI NO: 21554407 NR Description: peptidyl-prolyl cis-trans isomerase-like protein
  misc_feature (1)..(233): Homolog of NCBI NO: 18419898 NR Description: peptidyl-prolyl cis-trans isomerase - like
MYPIRLSGFSALKARASFSSSGSSSPSREILVQHVLVKEGDSELFAELQKRILDGEDMSDLAAEYSICPSKKDGGILGWVKLGQMVPEFEEAAFKAEPNHVVRCKTQFGWHLLQVLSEREPVKDIQVEELHSKMQDPVFMEEAQLIDVREPDEIATASLPGFKVFPLRQFGTWAPDITSKLNPEKDTFVLCKVGGRSMQVANWLQSQGFKSVYNVAGGIQAYSLKVDPSIPTY

SEQ ID NO: 1086 - DNA, 1210 bp, Zea mays subsp. mays
  misc_feature (1)..(1210): Ceres Seq. ID no. 15179510
agtcatttgtcattatctgtctctctccactgagattcaacacgttatcagcactttgctctccaccgagcggttaccgtcgacagcaatgtccatgcatccgtgcatccggcgtctgtcggacgaaaagcgattcaaagacaagttcatggagacgctgcttaggtatggctacagaggctagtacatgtctaatggctggacgctggacaacaacccgacaccactggaaggagatgatctcgctggagtctggcagtctggccacaaggagttgatctctactcagcaacagttgcaccacagcatctgtatcgtcggaggccgggactgcgtggccatggcgccgcccaacgactccgagccatgcacgcaccaccggctgcccgcggacgagctgcagccgccgccgccggctacgtgctgcggcgccgctttggacgaccgggcgccggcggcggcatgggcgtcgtcgccgtccgagcctgaccaggtggcggcggcgcctgctgctcaggaggcggagaagaagcagaacagcgcgacgacgacggaggccgaagcagcagcgggaagcggcgccgggcgggagctggtggcggcgcggcggccggcggcggcggcggaggagagcgcgcgggagcggctgaagcggcatcgcaccgaaatggcggggcgggtgcggatcccggagatgtggggccaggagcggctgctcaaggactgggtcgactgcgccgtcttcgaccgcccgctcgccgccaccgcggggctgctcaccgcccgcgacgcgcttgtcgccgagtgcgccgccgcgcgccggccggccgtctcgcacggctccgcggggcgcccgctacgggtgcacaacggctgctcgtgagcactgcacacgtcatcggctacgacgactacgatcgagcgacgagcgagcccgctcgccgcatgcagttgagaagtgtgcctttcaacaactctattatttatttcgatccttcattgcgtagtactagtacgttctcggactatggatttggtcgatgatgtgatgatgatacacaccacgattggagtaattaatactactcatgcttcattagtactggtggttgtaattaatgtagttgatcaccattttaagcatgcatgtctcaaaacaatcttgtttattattttttcagctaatatataagctagagtgttcttgctt

SEQ ID NO: 1087 - protein, 231 aa, Zea mays subsp. mays
  peptide (1)..(231): Ceres Seq. ID no. 15179511
  misc_feature (149)..(230): Homolog of NCBI NO: 15229972 NR Description: expressed protein [Arabidopsis thaliana]
  misc_feature (84)..(230): Homolog of NCBI NO: 18409685 NR Description: expressed protein [Arabidopsis thaliana]
  misc_feature (90)..(213): Homolog of NCBI NO: 38346335 NR Description: OSJNBa0073L04.6 [Oryza sativa (japonica
MSNGWTLDNNPTPLEGDDLAGVWQSGHKELISTQQQLHHSICIVGGRDCVAMAPPNDSEPCTHHRLPADELQPPPPATCCGAALDDRAPAAAWASSPSEPDQVAAAPAAQEAEKKQNSATTTEAEAAAGSGAGRELVAARRPAAAAEESARERLKRHRTEMAGRVRIPEMWGQERLLKDWVDCAVFDRPLAATAGLLTARDALVAECAAARRPAVSHGSAGRPLRVHNGCS

SEQ ID NO: 1088 - protein, 180 aa, Zea mays subsp. mays
  peptide (1)..(180): Ceres Seq. ID no. 15179512
  misc_feature (98)..(179): Homolog of NCBI NO: 15229972 NR Description: expressed protein [Arabidopsis thaliana]
  misc_feature (33)..(179): Homolog of NCBI NO: 18409685 NR Description: expressed protein [Arabidopsis thaliana]
  misc_feature (39)..(162): Homolog of NCBI NO: 38346335 NR Description: OSJNBa0073L04.6 [Oryza sativa (japonica
MAPPNDSEPCTHHRLPADELQPPPPATCCGAALDDRAPAAAWASSPSEPDQVAAAPAAQEAEKKQNSATTTEAEAAAGSGAGRELVAARRPAAAAEESARERLKRHRTEMAGRVRIPEMWGQERLLKDWVDCAVFDRPLAATAGLLTARDALVAECAAARRPAVSHGSAGRPLRVHNGCS

SEQ ID NO: 1089 - DNA, 2153 bp, Zea mays subsp. mays
  misc_feature (1)..(2153): Ceres Seq. ID no. 15178310
  misc_feature: MA Experiment ID: 108529 Result: Down-regulated in Transcription
  misc_feature: MA Experiment 108529 PARAMETER Experiment Name: Zm_Imbibed_Seeds_P Parameter: Age (day) Value: 5 vs. 2
  misc_feature: MA Experiment 108529 PARAMETER Experiment Name: Zm_Imbibed_Seeds_P Parameter: Organism Value: Zea mays
  misc_feature: MA Experiment 108529 PARAMETER Experiment Name: Zm_Imbibed_Seeds_P Parameter: Plant Line Value: 35A19
  misc_feature: MA Experiment 108529 PARAMETER Experiment Name: Zm_Imbibed_Seeds_P Parameter: Tissue Value: Roots vs. Embryo
  misc_feature: MA Experiment ID: 108535 Result: Up-regulated in Transcription
  misc_feature: MA Experiment 108535 PARAMETER Experiment Name: Zm_Meristem_P Parameter: Age (day) Value: 8
  misc_feature: MA Experiment 108535 PARAMETER Experiment Name: Zm_Meristem_P Parameter: Organism Value: Zea mays
  misc_feature: MA Experiment 108535 PARAMETER Experiment Name: Zm_Meristem_P Parameter: Plant Line Value: 35A19
  misc_feature: MA Experiment 108535 PARAMETER Experiment Name: Zm_Meristem_P Parameter: Tissue Value: Root Meristem vs. Above Root Meristem
  misc_feature: MA Experiment ID: 108543 Result: Up-regulated in Transcription
  misc_feature: MA Experiment ID: 108545 Result: Up-regulated in Transcription
  misc_feature: MA Experiment 108545 PARAMETER Experiment Name: Zm_Imbibed_Seeds_P Parameter: Age (day) Value: 3 vs. 2
  misc_feature: MA Experiment 108545 PARAMETER Experiment Name: Zm_Imbibed_Seeds_P Parameter: Organism Value: Zea mays
  misc_feature: MA Experiment 108545 PARAMETER Experiment Name: Zm_Imbibed_Seeds_P Parameter: Plant Line Value: 35A19
  misc_feature: MA Experiment 108545 PARAMETER Experiment Name: Zm_Imbibed_Seeds_P Parameter: Tissue Value: Aerial vs. Embryo
  misc_feature: MA Experiment ID: 108546 Result: Down-regulated in Transcription
  misc_feature: MA Experiment 108546 PARAMETER Experiment Name: Zm_Imbibed_Seeds_P Parameter: Age (day) Value: 3 vs. 2
  misc_feature: MA Experiment 108546 PARAMETER Experiment Name: Zm_Imbibed_Seeds_P Parameter: Organism Value: Zea mays
  misc_feature: MA Experiment 108546 PARAMETER Experiment Name: Zm_Imbibed_Seeds_P Parameter: Plant Line Value: 35A19
  misc_feature: MA Experiment 108546 PARAMETER Experiment Name: Zm_Imbibed_Seeds_P Parameter: Tissue Value: Roots vs. Embryo
  misc_feature: MA Experiment ID: 108556 Result: Down-regulated in Transcription
  misc_feature: MA Experiment 108556 PARAMETER Experiment Name: Zm_Drought_P Parameter: Age (day) Value: 9
  misc_feature: MA Experiment 108556 PARAMETER Experiment Name: Zm_Drought_P Parameter: Organism Value: Zea mays
  misc_feature: MA Experiment 108556 PARAMETER Experiment Name: Zm_Drought_P Parameter: Plant Line Value: 35A19
  misc_feature: MA Experiment 108556 PARAMETER Experiment Name: Zm_Drought_P Parameter: Timepoint (hr) Value: 24
  misc_feature: MA Experiment 108556 PARAMETER Experiment Name: Zm_Drought_P Parameter: Tissue Value: Aerial
  misc_feature: MA Experiment 108556 PARAMETER Experiment Name: Zm_Drought_P Parameter: Treatment Value: Drought vs. No Drought
  misc_feature: MA Experiment ID: 108687 Result: Down-regulated in Transcription
  misc_feature: MA Experiment 108687 PARAMETER Experiment Name: Zm_Embryos-Flowers__P Parameter: Tissue Value: Embryo vs. Aerial+
  misc_feature: MA Experiment ID: 108689 Result: Down-regulated in Transcription
  misc_feature: MA Experiment 108689 PARAMETER Experiment Name: Zm_Drought_Roots_P Parameter: Age (day) Value: 9
  misc_feature: MA Experiment 108689 PARAMETER Experiment Name: Zm_Drought_Roots_P Parameter: Organism Value: Zea mays
  misc_feature: MA Experiment 108689 PARAMETER Experiment Name: Zm_Drought_Roots_P Parameter: Plant Line Value: 35A19
  misc_feature: MA Experiment 108689 PARAMETER Experiment Name: Zm_Drought_Roots_P Parameter: Timepoint (hr) Value: 24
  misc_feature: MA Experiment 108689 PARAMETER Experiment Name: Zm_Drought_Roots_P Parameter: Tissue Value: Roots
  misc_feature: MA Experiment 108689 PARAMETER Experiment Name: Zm_Drought_Roots_P Parameter: Treatment Value: Drought vs. No Drought
  misc_feature: MA Experiment ID: 20000477 Result: Down-regulated in Transcription
  misc_feature: MA Experiment 20000477 PARAMETER Experiment Name: Zm_5mM_SA_P Parameter: Age (day) Value: 10
  misc_feature: MA Experiment 20000477 PARAMETER Experiment Name: Zm_5mM_SA_P Parameter: Organism Value: Zea mays
  misc_feature: MA Experiment 20000477 PARAMETER Experiment Name: Zm_5mM_SA_P Parameter: Plant Line Value: 35A19
  misc_feature: MA Experiment 20000477 PARAMETER Experiment Name: Zm_5mM_SA_P Parameter: Timepoint (hr) Value: 48
  misc_feature: MA Experiment 20000477 PARAMETER Experiment Name: Zm_5mM_SA_P Parameter: Tissue Value: Aerial
  misc_feature: MA Experiment 20000477 PARAMETER Experiment Name: Zm_5mM_SA_P Parameter: Treatment Value: 5mM SA vs. No Treatment
  misc_feature: MA Experiment ID: 20000478 Result: Down-regulated in Transcription
  misc_feature: MA Experiment 20000478 PARAMETER Experiment Name: Zm_5mM_SA_P Parameter: Age (day) Value: 11
  misc_feature: MA Experiment 20000478 PARAMETER Experiment Name: Zm_5mM_SA_P Parameter: Organism Value: Zea mays
  misc_feature: MA Experiment 20000478 PARAMETER Experiment Name: Zm_5mM_SA_P Parameter: Plant Line Value: 35A19
  misc_feature: MA Experiment 20000478 PARAMETER Experiment Name: Zm_5mM_SA_P Parameter: Timepoint (hr) Value: 72
  misc_feature: MA Experiment 20000478 PARAMETER Experiment Name: Zm_5mM_SA_P Parameter: Tissue Value: Aerial
  misc_feature: MA Experiment 20000478 PARAMETER Experiment Name: Zm_5mM_SA_P Parameter: Treatment Value: 5mM SA vs. No Treatment
  misc_feature: MA Experiment ID: 20000479 Result: Down-regulated in Transcription
  misc_feature: MA Experiment 20000479 PARAMETER Experiment Name: Zm_Drought_P Parameter: Age (day) Value: 10
  misc_feature: MA Experiment 20000479 PARAMETER Experiment Name: Zm_Drought_P Parameter: Organism Value: Zea mays
  misc_feature: MA Experiment 20000479 PARAMETER Experiment Name: Zm_Drought_P Parameter: Plant Line Value: 35A19
  misc_feature: MA Experiment 20000479 PARAMETER Experiment Name: Zm_Drought_P Parameter: Timepoint (hr) Value: 48
  misc_feature: MA Experiment 20000479 PARAMETER Experiment Name: Zm_Drought_P Parameter: Tissue Value: Aerial
  misc_feature: MA Experiment 20000479 PARAMETER Experiment Name: Zm_Drought_P Parameter: Treatment Value: Drought vs. No Drought
  misc_feature: MA Experiment ID: 20000480 Result: Down-regulated in Transcription
  misc_feature: MA Experiment 20000480 PARAMETER Experiment Name: Zm_Drought_P Parameter: Age (day) Value: 11
  misc_feature: MA Experiment 20000480 PARAMETER Experiment Name: Zm_Drought_P Parameter: Organism Value: Zea mays
  misc_feature: MA Experiment 20000480 PARAMETER Experiment Name: Zm_Drought_P Parameter: Plant Line Value: 35A19
  misc_feature: MA Experiment 20000480 PARAMETER Experiment Name: Zm_Drought_P Parameter: Timepoint (hr) Value: 72
  misc_feature: MA Experiment 20000480 PARAMETER Experiment Name: Zm_Drought_P Parameter: Tissue Value: Aerial
  misc_feature: MA Experiment 20000480 PARAMETER Experiment Name: Zm_Drought_P Parameter: Treatment Value: Drought vs. No Drought
  misc_feature: MA Experiment ID: 20000535 Result: Up-regulated in Transcription
  misc_feature: MA Experiment 20000535 PARAMETER Experiment Name: Zm_Hybrid_Seed_Dev_P Parameter: DAP Value: 30 vs. 12
  misc_feature: MA Experiment 20000535 PARAMETER Experiment Name: Zm_Hybrid_Seed_Dev_P Parameter: Organism Value: Zea mays
  misc_feature: MA Experiment 20000535 PARAMETER Experiment Name: Zm_Hybrid_Seed_Dev_P Parameter: Plant Line Value: 35A19
  misc_feature: MA Experiment 20000535 PARAMETER Experiment Name: Zm_Hybrid_Seed_Dev_P Parameter: Tissue Value: Embryo vs. Unfert Floret
  misc_feature: MA Experiment ID: 20000632 Result: Down-regulated in Transcription
  misc_feature: MA Experiment 20000632 PARAMETER Experiment Name: Zm_Herbicide-Treatments_P Parameter: Timepoint (hr) Value: 4
  misc_feature: MA Experiment 20000632 PARAMETER Experiment Name: Zm_Herbicide-Treatments_P Parameter: Tissue Value: Aerial
  misc_feature: MA Experiment 20000632 PARAMETER Experiment Name: Zm_Herbicide-Treatments_P Parameter: Treatment Value: Glean vs. No Treatment
gtccttcttccttctctcacacactccactccacgtccccctccttcaaatcctttcaacacccaagcacaaggagagagaagccgccgccgccgccatggacaatattgaggtgaggaggaggaagaagaaagggagaagcagcggacgccgccaggggggacgggtacaggcggtcctgcgcgccggcctcgtcgccatggccttcgccctcctctgcctctgctcctccacgccctccgccattgccctcaccccagacggcgaggcgttgctggagctcaagctggccttcaacgccaccgtgcagcggctcaccagctggcgtcccagcgaccccaacccctgcggctgggagggcatctcctgctccgtccctgacctcagggtccaatccataaacctcccattcatgcagctcgggggcatcatttcgcccagcatcgggaggctcgacaagctgcagagactagctctgcaccagaacagcttgcacggcccaatccctgcagagatcaagaactgcaccgagctcagggcaatttacctgagagccaactacctgcaaggaggcatcccttcagagattggcgagctcgtgcacctcaccatcttggacctgtcaagcaatctgctgaggggcacaataccggcctcgatcggaagcctcactcacctgcgctttctgaacctgtctactaacttcttctccggagagatcccaaatgctggtgtcctcggaaccttcaaaagcagctcgttcgttggaaatctggagctctgtggcctgtccatccagaaagcttgccgtggaaccctcggctttcctgctgtgttgccacattccgatccgctctcttcggctggtgtttctccaatcaataacaacaagacgtcacactttctcaatggcgtcgtgatcggctcgatgtcaaccttggctcttgccttggtagccgtacttgggttcctatggatctgcttgctgtccattaagagtagcattggtggaaactatgtaaagatggacaaacagactgttcctgatggtgcaaagcttgtgacataccagtggaaccttccatattcatcaagcgagattattagaaggttggagctgcttgatgaagaggacgtggtcggttgtgggggctttggcacggtgtacaggatggtgatggatgatggcacgtcgtttgccgtcaagaggattgacctcagccgcgaaagtcgcgacaggaccttcgagaaggagcttgagattctgggcagcatcaggcacataaaccttgtcaatctgcgaggctactgccggctccccacagcgaagctactcgtatatgatttcgttgagctgggcagcttggattgctaccttcatggagatgaacaagaggagcagccattgaactggaacgcgcggatgaaaatcgcgcttggctcggctcgaggcctggcatatctgcaccacgattgctcgcccgggatcgtgcatagggacatcaaagccagtaacatcctgctggatagaagcttggagcctcgtgtctccgattttggcctcgcgaggctgcttgtagacagtgctgcccacgttaccaccgtcgtcgcgggcacctttggatacctagcaccagagtacttgcaaaacgggcatgctactgagaaatcagacgtgtatagctttggagtgcttatgctggagctagtgaccggaaagaggccgaccgattcttgcttcatcaagaagggactgaacattgttggctggctcaacaccctaactggggagcaccggctggaggatatcatcgatgagcgatgcggcgatgtggaggtggaagccgtggaagccatcctggacatcgcagccatgtgcaccgacgcagacccggggcagcggccatcgatgagcgctgtcctcaagatgctggaggaggagatcttgtccccctgcatgagcgagctgtgctacgagcagcacctggagctctgagctgaggaggaagatggtgctggctgcgtgcgtgaagcgtcatggatgagactgaagttttgtactgtagatacaacgatgatgagtgtaggtgatgtactgatgttttgtgtgctcttagggccaatgaagaacagtaagcagcagttcgtgagtg

SEQ ID NO: 1090 - protein, 664 aa, Zea mays subsp. mays
  peptide (1)..(664): Ceres Seq. ID no. 15178311
  misc_feature (69)..(664): Homolog of NCBI NO: 38679443 NR Description: benzothiadiazole-induced somatic embryogenesis
  misc_feature (82)..(650): Homolog of NCBI NO: 13897308 NR Description: SERK1 protein [Zea mays]
  misc_feature (79)..(664): Homolog of NCBI NO: 13897310 NR Description: SERK2 protein [Zea mays]
  misc_feature (59)..(664): Homolog of NCBI NO: 21740899 NR Description: OSJNBa0036B21.13 [Oryza sativa (japonica
  misc_feature (69)..(664): Homolog of NCBI NO: 40253600 NR Description: putative somatic embryogenesis receptor kinase 1
  misc_feature (157)..(655): Homolog of NCBI NO: 15227455 NR Description: leucine-rich repeat transmembrane protein kinase,
  misc_feature (157)..(655): Homolog of NCBI NO: 30692520 NR Description: leucine-rich repeat transmembrane protein kinase,
  misc_feature (157)..(655): Homolog of NCBI NO: 25403114 NR Description: probable protein kinase [imported] - Arabidopsis
  misc_feature (88)..(651): Homolog of NCBI NO: 10177448 NR Description: receptor-like protein kinase [Arabidopsis
  misc_feature (63)..(651): Homolog of NCBI NO: 30697726 NR Description: leucine rich repeat protein family [Arabidopsis
SFFLLSHTPLHVPLLQILSTPKHKEREAAAAAMDNIEVRRRKKKGRSSGRRQGGRVQAVLRAGLVAMAFALLCLCSSTPSAIALTPDGEALLELKLAFNATVQRLTSWRPSDPNPCGWEGISCSVPDLRVQSINLPFMQLGGIISPSIGRLDKLQRLALHQNSLHGPIPAEIKNCTELRAIYLRANYLQGGIPSEIGELVHLTILDLSSNLLRGTIPASIGSLTHLRFLNLSTNFFSGEIPNAGVLGTFKSSSFVGNLELCGLSIQKACRGTLGFPAVLPHSDPLSSAGVSPINNNKTSHFLNGVVIGSMSTLALALVAVLGFLWICLLSIKSSIGGNYVKMDKQTVPDGAKLVTYQWNLPYSSSEIIRRLELLDEEDVVGCGGFGTVYRMVMDDGTSFAVKRIDLSRESRDRTFEKELEILGSIRHINLVNLRGYCRLPTAKLLVYDFVELGSLDCYLHGDEQEEQPLNWNARMKIALGSARGLAYLHHDCSPGIVHRDIKASNILLDRSLEPRVSDFGLARLLVDSAAHVTTVVAGTFGYLAPEYLQNGHATEKSDVYSFGVLMLELVTGKRPTDSCFIKKGLNIVGWLNTLTGEHRLEDIIDERCGDVEVEAVEAILDIAAMCTDADPGQRPSMSAVLKMLEEEILSPCMSELCYEQHLEL

SEQ ID NO: 1091 - protein, 632 aa, Zea mays subsp. mays
  peptide (1)..(632): Ceres Seq. ID no. 15178312
  misc_feature (50)..(618): Homolog of NCBI NO: 13897308 NR Description: SERK1 protein [Zea mays]
  misc_feature (47)..(632): Homolog of NCBI NO: 13897310 NR Description: SERK2 protein [Zea mays]
  misc_feature (27)..(632): Homolog of NCBI NO: 21740899 NR Description: OSJNBa0036B21.13 [Oryza sativa (japonica
  misc_feature (37)..(632): Homolog of NCBI NO: 40253600 NR Description: putative somatic embryogenesis receptor kinase 1
  misc_feature (125)..(623): Homolog of NCBI NO: 15227455 NR Description: leucine-rich repeat transmembrane protein kinase,
  misc_feature (125)..(623): Homolog of NCBI NO: 30692520 NR Description: leucine-rich repeat transmembrane protein kinase,
  misc_feature (125)..(623): Homolog of NCBI NO: 25403114 NR Description: probable protein kinase [imported] - Arabidopsis
  misc_feature (56)..(619): Homolog of NCBI NO: 10177448 NR Description: receptor-like protein kinase [Arabidopsis
  misc_feature (31)..(619): Homolog of NCBI NO: 30697726 NR Description: leucine rich repeat protein family [Arabidopsis
  misc_feature (37)..(632): Homolog of NCBI NO: 38679443 NR Description: benzothiadiazole-induced somatic embryogenesis
MDNIEVRRRKKKGRSSGRRQGGRVQAVLRAGLVAMAFALLCLCSSTPSAIALTPDGEALLELKLAFNATVQRLTSWRPSDPNPCGWEGISCSVPDLRVQSINLPFMQLGGIISPSIGRLDKLQRLALHQNSLHGPIPAEIKNCTELRAIYLRANYLQGGIPSEIGELVHLTILDLSSNLLRGTIPASIGSLTHLRFLNLSTNFFSGEIPNAGVLGTFKSSSFVGNLELCGLSIQKACRGTLGFPAVLPHSDPLSSAGVSPINNNKTSHFLNGVVIGSMSTLALALVAVLGFLWICLLSIKSSIGGNYVKMDKQTVPDGAKLVTYQWNLPYSSSEIIRRLELLDEEDVVGCGGFGTVYRMVMDDGTSFAVKRIDLSRESRDRTFEKELEILGSIRHINLVNLRGYCRLPTAKLLVYDFVELGSLDCYLHGDEQEEQPLNWNARMKIALGSARGLAYLHHDCSPGIVHRDIKASNILLDRSLEPRVSDFGLARLLVDSAAHVTTVVAGTFGYLAPEYLQNGHATEKSDVYSFGVLMLELVTGKRPTDSCFIKKGLNIVGWLNTLTGEHRLEDIIDERCGDVEVEAVEAILDIAAMCTDADPGQRPSMSAVLKMLEEEILSPCMSELCYEQHLEL

SEQ ID NO: 1092 - protein, 598 aa, Zea mays subsp. mays
  peptide (1)..(598): Ceres Seq. ID no. 15178313
  misc_feature (3)..(598): Homolog of NCBI NO: 38679443 NR Description: benzothiadiazole-induced somatic embryogenesis
  misc_feature (16)..(584): Homolog of NCBI NO: 13897308 NR Description: SERK1 protein [Zea mays]
  misc_feature (13)..(598): Homolog of NCBI NO: 13897310 NR Description: SERK2 protein [Zea mays]
  misc_feature (1)..(598): Homolog of NCBI NO: 21740899 NR Description: OSJNBa0036B21.13 [Oryza sativa (japonica
  misc_feature (3)..(598): Homolog of NCBI NO: 40253600 NR Description: putative somatic embryogenesis receptor kinase 1
  misc_feature (91)..(589): Homolog of NCBI NO: 15227455 NR Description: leucine-rich repeat transmembrane protein kinase,
  misc_feature (91)..(589): Homolog of NCBI NO: 30692520 NR Description: leucine-rich repeat transmembrane protein kinase,
  misc_feature (91)..(589): Homolog of NCBI NO: 25403114 NR Description: probable protein kinase [imported] - Arabidopsis
  misc_feature (22)..(585): Homolog of NCBI NO: 10177448 NR Description: receptor-like protein kinase [Arabidopsis
  misc_feature (1)..(585): Homolog of NCBI NO: 30697726 NR Description: leucine rich repeat protein family [Arabidopsis
MAFALLCLCSSTPSAIALTPDGEALLELKLAFNATVQRLTSWRPSDPNPCGWEGISCSVPDLRVQSINLPFMQLGGIISPSIGRLDKLQRLALHQNSLHGPIPAEIKNCTELRAIYLRANYLQGGIPSEIGELVHLTILDLSSNLLRGTIPASIGSLTHLRFLNLSTNFFSGEIPNAGVLGTFKSSSFVGNLELCGLSIQKACRGTLGFPAVLPHSDPLSSAGVSPINNNKTSHFLNGVVIGSMSTLALALVAVLGFLWICLLSIKSSIGGNYVKMDKQTVPDGAKLVTYQWNLPYSSSEIIRRLELLDEEDVVGCGGFGTVYRMVMDDGTSFAVKRIDLSRESRDRTFEKELEILGSIRHINLVNLRGYCRLPTAKLLVYDFVELGSLDCYLHGDEQEEQPLNWNARMKIALGSARGLAYLHHDCSPGIVHRDIKASNILLDRSLEPRVSDFGLARLLVDSAAHVTTVVAGTFGYLAPEYLQNGHATEKSDVYSFGVLMLELVTGKRPTDSCFIKKGLNIVGWLNTLTGEHRLEDIIDERCGDVEVEAVEAILDIAAMCTDADPGQRPSMSAVLKMLEEEILSPCMSELCYEQHLEL

SEQ ID NO: 1093 - DNA, 960 bp, Zea mays subsp. mays
  misc_feature (1)..(960): Ceres Seq. ID no. 15179139
atgaaagcatcctattaaaaaaaagaagctcgtctctatctcttcaccacttcaactttaaaaaaaaaaacaaaacaaaaccagtttcctctttgtatcagacaggcatgtctatgatcatggcttcctctgctgctgctgcatcgatctctcttgtaaggaatctctctcgccatcatcaaacccctcttttggattactctagttccttccataataacctaaggatctcatccaacggtccagctttgtccacacgatcaagatccaccacctcctcctccatcttcagaaccatgtgcagcagcagcagcgagaactctagacccactaagatccaagaactcaacgtgtacgagttcaacgaaggcgaccgacacagccccgcggttctaaaactcggcaagaacccacaacagctttgcatcggcgacctcgtccctttcactaacaaactctacaccggagacctcaagaaacgcgtcgggatcaccgcaggtctctgcgttttgatccagcacgttcctgagaagaaaggcgaacgcttcgaagcttcttacagcttctacttcggagactacggtcacatttccgttcagggaccttacctgacttacgaggacacgcttctcgccatcaccggtggcaccggcgtcttcgaaggagcttacggacaggtcaagcttcatcagcttgtgtatccgaccaagctgttctacactttttacttgaaaggtgttgtcgctgatttgcctgtggagctcaccggaaaacatgttgagccgtcgaaggatgtgaagccggcggcggaagctcaggctactcagctcggggccactatcctaaactttaccgaataagtaatcattgtgtcgttgagctttctctttctcttggatcttaatgggtctgtttaatgggcctaaataatgggctttaaaataatgagccgcttttcgt

SEQ ID NO: 1094 - protein, 285 aa, Zea mays subsp. mays
  peptide (1)..(285): Ceres Seq. ID no. 15179140
  misc_feature (107)..(284): Pfam Name: Allene oxide cyclase Pfam Description: Allene oxide cyclase
  misc_feature (36)..(284): Homolog of NCBI NO: 8977961 NR Description: allene oxide cyclase [Lycopersicon esculentum]
  misc_feature (73)..(285): Homolog of NCBI NO: 16416376 NR Description: mangrin [Bruguiera sexangula]
  misc_feature (38)..(284): Homolog of NCBI NO: 40644130 NR Description: allene oxide cyclase [Nicotiana tabacum]
  misc_feature (40)..(284): Homolog of NCBI NO: 40644132 NR Description: allene oxide cyclase [Medicago truncatula]
  misc_feature (43)..(284): Homolog of NCBI NO: 15320414 NR Description: ERD12 protein [Arabidopsis thaliana]
  misc_feature (40)..(284): Homolog of NCBI NO: 15230874 NR Description: allene oxide cyclase family [Arabidopsis
  misc_feature (40)..(284): Homolog of NCBI NO: 18404656 NR Description: allene oxide cyclase family [Arabidopsis
  misc_feature (109)..(284): Homolog of NCBI NO: 25518012 NR Description: T6J4.4 protein - Arabidopsis thaliana
  misc_feature (40)..(284): Homolog of NCBI NO: 18404658 NR Description: allene oxide cyclase family [Arabidopsis
  misc_feature (38)..(284): Homolog of NCBI NO: 15222241 NR Description: allene oxide cyclase family [Arabidopsis
ESILLKKRSSSLSLHHFNFKKKNKTKPVSSLYQTGMSMIMASSAAAASISLVRNLSRHHQTPLLDYSSSFHNNLRISSNGPALSTRSRSTTSSSIFRTMCSSSSENSRPTKIQELNVYEFNEGDRHSPAVLKLGKNPQQLCIGDLVPFTNKLYTGDLKKRVGITAGLCVLIQHVPEKKGERFEASYSFYFGDYGHISVQGPYLTYEDTLLAITGGTGVFEGAYGQVKLHQLVYPTKLFYTFYLKGVVADLPVELTGKHVEPSKDVKPAAEAQATQLGATILNFTE

SEQ ID NO: 1095 - protein, 250 aa, Zea mays subsp. mays
  peptide (1)..(250): Ceres Seq. ID no. 15179141
  misc_feature (72)..(249): Pfam Name: Allene oxide cyclase Pfam Description: Allene oxide cyclase
  misc_feature (1)..(249): Homolog of NCBI NO: 8977961 NR Description: allene oxide cyclase [Lycopersicon esculentum]
  misc_feature (38)..(250): Homolog of NCBI NO: 16416376 NR Description: mangrin [Bruguiera sexangula]
  misc_feature (3)..(249): Homolog of NCBI NO: 40644130 NR Description: allene oxide cyclase [Nicotiana tabacum]
  misc_feature (5)..(249): Homolog of NCBI NO: 40644132 NR Description: allene oxide cyclase [Medicago truncatula]
  misc_feature (8)..(249): Homolog of NCBI NO: 15320414 NR Description: ERD12 protein [Arabidopsis thaliana]
  misc_feature (5)..(249): Homolog of NCBI NO: 15230874 NR Description: allene oxide cyclase family [Arabidopsis
  misc_feature (5)..(249): Homolog of NCBI NO: 18404656 NR Description: allene oxide cyclase family [Arabidopsis
  misc_feature (74)..(249): Homolog of NCBI NO: 25518012 NR Description: T6J4.4 protein - Arabidopsis thaliana
  misc_feature (5)..(249): Homolog of NCBI NO: 18404658 NR Description: allene oxide cyclase family [Arabidopsis
  misc_feature (3)..(249): Homolog of NCBI NO: 15222241 NR Description: allene oxide cyclase family [Arabidopsis
MSMIMASSAAAASISLVRNLSRHHQTPLLDYSSSFHNNLRISSNGPALSTRSRSTTSSSIFRTMCSSSSENSRPTKIQELNVYEFNEGDRHSPAVLKLGKNPQQLCIGDLVPFTNKLYTGDLKKRVGITAGLCVLIQHVPEKKGERFEASYSFYFGDYGHISVQGPYLTYEDTLLAITGGTGVFEGAYGQVKLHQLVYPTKLFYTFYLKGVVADLPVELTGKHVEPSKDVKPAAEAQATQLGATILNFTE

SEQ ID NO: 1096 - protein, 248 aa, Zea mays subsp. mays
  peptide (1)..(248): Ceres Seq. ID no. 15179142
  misc_feature (70)..(247): Pfam Name: Allene oxide cyclase Pfam Description: Allene oxide cyclase
  misc_feature (1)..(247): Homolog of NCBI NO: 8977961 NR Description: allene oxide cyclase [Lycopersicon esculentum]
  misc_feature (36)..(248): Homolog of NCBI NO: 16416376 NR Description: mangrin [Bruguiera sexangula]
  misc_feature (1)..(247): Homolog of NCBI NO: 40644130 NR Description: allene oxide cyclase [Nicotiana tabacum]
  misc_feature (3)..(247): Homolog of NCBI NO: 40644132 NR Description: allene oxide cyclase [Medicago truncatula]
  misc_feature (6)..(247): Homolog of NCBI NO: 15320414 NR Description: ERD12 protein [Arabidopsis thaliana]
  misc_feature (3)..(247): Homolog of NCBI NO: 15230874 NR Description: allene oxide cyclase family [Arabidopsis
  misc_feature (3)..(247): Homolog of NCBI NO: 18404656 NR Description: allene oxide cyclase family [Arabidopsis
  misc_feature (72)..(247): Homolog of NCBI NO: 25518012 NR Description: T6J4.4 protein - Arabidopsis thaliana
  misc_feature (3)..(247): Homolog of NCBI NO: 18404658 NR Description: allene oxide cyclase family [Arabidopsis
  misc_feature (1)..(247): Homolog of NCBI NO: 15222241 NR Description: allene oxide cyclase family [Arabidopsis
MIMASSAAAASISLVRNLSRHHQTPLLDYSSSFHNNLRISSNGPALSTRSRSTTSSSIFRTMCSSSSENSRPTKIQELNVYEFNEGDRHSPAVLKLGKNPQQLCIGDLVPFTNKLYTGDLKKRVGITAGLCVLIQHVPEKKGERFEASYSFYFGDYGHISVQGPYLTYEDTLLAITGGTGVFEGAYGQVKLHQLVYPTKLFYTFYLKGVVADLPVELTGKHVEPSKDVKPAAEAQATQLGATILNFTE

SEQ ID NO: 1097 - DNA, 808 bp, Zea mays subsp. mays
  misc_feature (1)..(808): Ceres Seq. ID no. 15178388
acaatttcccaattctaattttgttttctctcacacacacactccttccaatctccaactaaatactattcttcaatttgaagcgtgtctgtagttggttgaagcactgtggtattgttctggttttggtctccgaggtttgtatcggaatccgatgtattatgcaaaagaagctgcgcatgtcgaccccattttcgtagcacatggctgccgctgataacaccaacccaaaggattattacaaagtgctggaggttgaatatgatgcaaccgatgaaaatatcaaattaaattaccgaagactcgcgttgaaatggcatcctgacaagcacggaggtgatagtgctgttactgcaaaatttcaagagattattgaagcttacaatgtattaagtgatcctgccaagcgtttggactatgatttaactgggatatgtgagattgaaaaatatagcttgcaggaatatcttgccagatttaaaagcatgattcttacctgcaatggacttggtatcaatcagacagacagatggtcacaacaattgattgaaaattttgagtccctagataaataaggcatctaaatctcaattttggccagtggagagtgatgaataaggacatctaagcgtgtctttttcctttaacatgctcttaaattccaccccactcgatttcaatgagatttgaaacctccataattgaccatgcaacctggtctgattgaatcatacatactgtaacattatgctactccaatgtgtacgtttagaatgatctgttgtgataaacctttaagtccttgtac

SEQ ID NO: 1098 - protein, 123 aa, Zea mays subsp. mays
  peptide (1)..(123): Ceres Seq. ID no. 15178389
  misc_feature (11)..(76): Pfam Name: DnaJ domain Pfam Description: DnaJ domain
  misc_feature (10)..(76): Homolog of NCBI NO: 16082112 NR Description: heat shock protein DnaJ related protein
  misc_feature (11)..(76): Homolog of NCBI NO: 21618097 NR Description: putative heat shock protein [Arabidopsis thaliana]
  misc_feature (11)..(76): Homolog of NCBI NO: 15231987 NR Description: DnaJ protein family [Arabidopsis thaliana]
  misc_feature (10)..(76): Homolog of NCBI NO: 144832 NR Description: dnaJ
  misc_feature (6)..(76): Homolog of NCBI NO: 16331768 NR Description: DnaJ protein [Synechocystis sp. PCC 6803]
  misc_feature (11)..(76): Homolog of NCBI NO: 40253343 NR Description: putative DnaJ, heat shock protein hsp40
  misc_feature (11)..(76): Homolog of NCBI NO: 34905276 NR Description: putative heat shock protein
  misc_feature (10)..(104): Homolog of NCBI NO: 21555025 NR Description: unknown [Arabidopsis thaliana]
  misc_feature (10)..(104): Homolog of NCBI NO: 18403358 NR Description: DnaJ protein family [Arabidopsis thaliana]
  misc_feature (5)..(116): Homolog of NCBI NO: 15237385 NR Description: DnaJ protein family [Arabidopsis thaliana]
MAAADNTNPKDYYKVLEVEYDATDENIKLNYRRLALKWHPDKHGGDSAVTAKFQEIIEAYNVLSDPAKRLDYDLTGICEIEKYSLQEYLARFKSMILTCNGLGINQTDRWSQQLIENFESLDK

SEQ ID NO: 1099 - DNA, 924 bp, Zea mays subsp. mays
  misc_feature (1)..(924): Ceres Seq. ID no. 15178887
gcgttatccaaacacacacttctcagtcctttcttggcgatagaaatggcttctcaatcttttactttggcgaatctaaggatctcccaaatcgattccttctacagtcagaaaccatcttctccaatacacttcttctccactagaaatccagtaaaatccctgaacctgacgaatccatggatggccggtgattcttctctctctctcgattcttccgcctccgtcttgcgaactaactcgacaacgcgcagaaagatcccaatcgccgtcgttgccagcttacccaccgcgaatccagaatctgcggtttctgatgcgaaaaagccaaaatggtcgtggagaggaatcaaatcatttgcaatgggagagctcgaagctaggaagctcaagtatcccaacaccggtactgaatcacttctcatgggtatcttgattgaaggaactagttttacttccaagtttttgagggcgcataagataacgctttacaaagttcgtgaagaaacaatcaagttactagggaaagcagatttgtattccttcagccctgaacatcctcctttaacccacgatgctcaaagagctcttgactctgctgtcaatcagaatctcaaagcaggtggtgctggggaaataatgccagcccatatattgctgggagtctggtctgaagttgaatctccaggtcataagatactggcaactcttggtttcactgatgaaaaagctaaagagttagagtcctttgcctctgaatctggatttctagatgaatagtgtcttgttacatttatcatcctccatttatgccatcttaattttcatactaaagcctccaaatttgtggttgcagtctgcaatgatgttcttatcggttcatcatactgattcttaattttcacttctttgcttttgcctaac

SEQ ID NO: 1100 - protein, 259 aa, Zea mays subsp. mays
  peptide (1)..(259): Ceres Seq. ID no. 15178888
  misc_feature (123)..(175): Pfam Name: Clp amino terminal domain Pfam Description: Clp amino terminal domain
  misc_feature (62)..(238): Homolog of NCBI NO: 461753 NR Description: ATP-dependent clp protease ATP-binding subunit
  misc_feature (48)..(238): Homolog of NCBI NO: 25289891 NR Description: endopeptidase Clp (EC 3.4.21.92) ATP-binding
  misc_feature (75)..(238): Homolog of NCBI NO: 1168972 NR Description: ATP-dependent clp protease ATP-binding subunit
  misc_feature (75)..(238): Homolog of NCBI NO: 399213 NR Description: ATP-dependent clp protease ATP-binding subunit
  misc_feature (111)..(245): Homolog of NCBI NO: 23039549 NR Description: hypothetical protein [Trichodesmium erythraeum
  misc_feature (16)..(252): Homolog of NCBI NO: 7487579 NR Description: hypothetical protein T30C3.40 - Arabidopsis
  misc_feature (16)..(253): Homolog of NCBI NO: 18416540 NR Description: expressed protein [Arabidopsis thaliana]
  misc_feature (17)..(259): Homolog of NCBI NO: 7485569 NR Description: hypothetical protein F16J13.130 - Arabidopsis
  misc_feature (17)..(259): Homolog of NCBI NO: 18413740 NR Description: expressed protein [Arabidopsis thaliana]
  misc_feature (17)..(259): Homolog of NCBI NO: 21592785 NR Description: unknown [Arabidopsis thaliana]
ALSKHTLLSPFLAIEMASQSFTLANLRISQIDSFYSQKPSSPIHFFSTRNPVKSLNLTNPWMAGDSSLSLDSSASVLRTNSTTRRKIPIAVVASLPTANPESAVSDAKKPKWSWRGIKSFAMGELEARKLKYPNTGTESLLMGILIEGTSFTSKFLRAHKITLYKVREETIKLLGKADLYSFSPEHPPLTHDAQRALDSAVNQNLKAGGAGEIMPAHILLGVWSEVESPGHKILATLGFTDEKAKELESFASESGFLDE

SEQ ID NO: 1101 - protein, 244 aa, Zea mays subsp. mays
  peptide (1)..(244): Ceres Seq. ID no. 15178889
  misc_feature (108)..(160): Pfam Name: Clp amino terminal domain Pfam Description: Clp amino terminal domain
  misc_feature (47)..(223): Homolog of NCBI NO: 461753 NR Description: ATP-dependent clp protease ATP-binding subunit
  misc_feature (33)..(223): Homolog of NCBI NO: 25289891 NR Description: endopeptidase Clp (EC 3.4.21.92) ATP-binding
  misc_feature (60)..(223): Homolog of NCBI NO: 1168972 NR Description: ATP-dependent clp protease ATP-binding subunit
  misc_feature (60)..(223): Homolog of NCBI NO: 399213 NR Description: ATP-dependent clp protease ATP-binding subunit
  misc_feature (96)..(230): Homolog of NCBI NO: 23039549 NR Description: hypothetical protein [Trichodesmium erythraeum
  misc_feature (1)..(237): Homolog of NCBI NO: 7487579 NR Description: hypothetical protein T30C3.40 - Arabidopsis
  misc_feature (1)..(238): Homolog of NCBI NO: 18416540 NR Description: expressed protein [Arabidopsis thaliana]
  misc_feature (2)..(244): Homolog of NCBI NO: 7485569 NR Description: hypothetical protein F16J13.130 - Arabidopsis
  misc_feature (2)..(244): Homolog of NCBI NO: 18413740 NR Description: expressed protein [Arabidopsis thaliana]
  misc_feature (2)..(244): Homolog of NCBI NO: 21592785 NR Description: unknown [Arabidopsis thaliana]
MASQSFTLANLRISQIDSFYSQKPSSPIHFFSTRNPVKSLNLTNPWMAGDSSLSLDSSASVLRTNSTTRRKIPIAVVASLPTANPESAVSDAKKPKWSWRGIKSFAMGELEARKLKYPNTGTESLLMGILIEGTSFTSKFLRAHKITLYKVREETIKLLGKADLYSFSPEHPPLTHDAQRALDSAVNQNLKAGGAGEIMPAHILLGVWSEVESPGHKILATLGFTDEKAKELESFASESGFLDE

SEQ ID NO: 1102 - protein, 198 aa, Zea mays subsp. mays
  peptide (1)..(198): Ceres Seq. ID no. 15178890
  misc_feature (62)..(114): Pfam Name: Clp amino terminal domain Pfam Description: Clp amino terminal domain
  misc_feature (1)..(177): Homolog of NCBI NO: 461753 NR Description: ATP-dependent clp protease ATP-binding subunit
  misc_feature (1)..(177): Homolog of NCBI NO: 25289891 NR Description: endopeptidase Clp (EC 3.4.21.92) ATP-binding
  misc_feature (14)..(177): Homolog of NCBI NO: 1168972 NR Description: ATP-dependent clp protease ATP-binding subunit
  misc_feature (14)..(177): Homolog of NCBI NO: 399213 NR Description: ATP-dependent clp protease ATP-binding subunit
  misc_feature (50)..(184): Homolog of NCBI NO: 23039549 NR Description: hypothetical protein [Trichodesmium erythraeum
  misc_feature (1)..(191): Homolog of NCBI NO: 7487579 NR Description: hypothetical protein T30C3.40 - Arabidopsis
  misc_feature (1)..(192): Homolog of NCBI NO: 18416540 NR Description: expressed protein [Arabidopsis thaliana]
  misc_feature (1)..(198): Homolog of NCBI NO: 7485569 NR Description: hypothetical protein F16J13.130 - Arabidopsis
  misc_feature (1)..(198): Homolog of NCBI NO: 18413740 NR Description: expressed protein [Arabidopsis thaliana]
  misc_feature (1)..(198): Homolog of NCBI NO: 21592785 NR Description: unknown [Arabidopsis thaliana]
MAGDSSLSLDSSASVLRTNSTTRRKIPIAVVASLPTANPESAVSDAKKPKWSWRGIKSFAMGELEARKLKYPNTGTESLLMGILIEGTSFTSKFLRAHKITLYKVREETIKLLGKADLYSFSPEHPPLTHDAQRALDSAVNQNLKAGGAGEIMPAHILLGVWSEVESPGHKILATLGFTDEKAKELESFASESGFLDE

SEQ ID NO: 1103 - DNA, 924 bp, Zea mays subsp. mays
  misc_feature (1)..(924): Ceres Seq. ID no. 15178873
ttgcttctccttccgacacaatggctacgttcctcacacctcttgtttcaatcaaacctacagtcttttcattcccgtcccaatccgtcacctctccacacagacaaaccaatgtactctcactcaaaccgtttccttctcccgcgggagcacagagctccagggtgagattcattccccacgcggtggagactgaagaaaaacccgcttcagaccctaacgcagagtcctcaaggcgtgtctacatcggaaacatacccagaactgtggataacgaacagctctcaaaactcgtcgaagaacacggcgccgctgaaaatgttcaggtgatgtatgataagtattcaggaagaagccgtaggtttggattcgctacaatgaaatcagttgaagatgccaatgctgtgattgacaagttaaatggcactaccattgaagggcgtgaggtgaaggttaacatcacggagaaacctatagcgtcatcatcgtctcctgatttgtcattgcttcagtctgaggattcggcgtttgtagatagtccttataaagtgtatgtagggaatctggcaaagactgttactaaacagatgcttgagaatttgttttctgagaaagggaaagtagtcagtgccaaggtttcaagagtgcctggaacttccaaatcctctgggtttgggtttgtgacattttctacagaagaggatgttgaagctgccattttggctctaaacaactctttgttggaaggacagaagattcgggtgaataaggcatagtgtgagaaagaagaggagtccttgtgccatcacaagaacgtgaaaagaatctctttttgtaatgcaaacatgtagagcttagtatcatcatctttgtatctttgtatcctttctaagatgaaaaaatgaaagcatttctttctgatcg

SEQ ID NO: 1104 - protein, 257 aa, Zea mays subsp. mays
  peptide (1)..(257): Ceres Seq. ID no. 15178874
  misc_feature (183)..(254): Pfam Name: RNA recognition motif. (a.k.a. RRM, RBD, or RNP domain) Pfam Description: RNA recognition motif. (a.k.a. RRM, RBD, or RNP
  misc_feature (9)..(163): Homolog of NCBI NO: 1350821 NR Description: 31 kDa ribonucleoprotein, chloroplast precursor
  misc_feature (65)..(257): Homolog of NCBI NO: 681912 NR Description: cp33 [Arabidopsis thaliana]
  misc_feature (8)..(257): Homolog of NCBI NO: 34913270 NR Description: putative ribonucleoprotein
  misc_feature (65)..(257): Homolog of NCBI NO: 17064758 NR Description: ubiquitin / ribosomal protein CEP52 [Arabidopsis
  misc_feature (65)..(257): Homolog of NCBI NO: 15231200 NR Description: 33 kDa ribonucleoprotein, chloroplast
  misc_feature (177)..(257): Homolog of NCBI NO: 12230585 NR Description: 29 kDa ribonucleoprotein B, chloroplast precursor
  misc_feature (1)..(163): Homolog of NCBI NO: 12230585 NR Description: 29 kDa ribonucleoprotein B, chloroplast precursor
  misc_feature (26)..(257): Homolog of NCBI NO: 7578881 NR Description: plastid-specific ribosomal protein 2 precursor
  misc_feature (7)..(254): Homolog of NCBI NO: 11357772 NR Description: hypothetical protein F4F15.260 - Arabidopsis
  misc_feature (7)..(257): Homolog of NCBI NO: 30693595 NR Description: RNA recognition motif (RRM)-containing protein
ASPSDTMATFLTPLVSIKPTVFSFPSQSVTSPHRQTNVLSLKPFPSPAGAQSSRVRFIPHAVETEEKPASDPNAESSRRVYIGNIPRTVDNEQLSKLVEEHGAAENVQVMYDKYSGRSRRFGFATMKSVEDANAVIDKLNGTTIEGREVKVNITEKPIASSSSPDLSLLQSEDSAFVDSPYKVYVGNLAKTVTKQMLENLFSEKGKVVSAKVSRVPGTSKSSGFGFVTFSTEEDVEAAILALNNSLLEGQKIRVNKA

SEQ ID NO: 1105 - protein, 251 aa, Zea mays subsp. mays
  peptide (1)..(251): Ceres Seq. ID no. 15178875
  misc_feature (177)..(248): Pfam Name: RNA recognition motif. (a.k.a. RRM, RBD, or RNP domain) Pfam Description: RNA recognition motif. (a.k.a. RRM, RBD, or RNP
  misc_feature (3)..(157): Homolog of NCBI NO: 1350821 NR Description: 31 kDa ribonucleoprotein, chloroplast precursor
  misc_feature (59)..(251): Homolog of NCBI NO: 681912 NR Description: cp33 [Arabidopsis thaliana]
  misc_feature (2)..(251): Homolog of NCBI NO: 34913270 NR Description: putative ribonucleoprotein
  misc_feature (59)..(251): Homolog of NCBI NO: 17064758 NR Description: ubiquitin / ribosomal protein CEP52 [Arabidopsis
  misc_feature (59)..(251): Homolog of NCBI NO: 15231200 NR Description: 33 kDa ribonucleoprotein, chloroplast
  misc_feature (171)..(251): Homolog of NCBI NO: 12230585 NR Description: 29 kDa ribonucleoprotein B, chloroplast precursor
  misc_feature (1)..(157): Homolog of NCBI NO: 12230585 NR Description: 29 kDa ribonucleoprotein B, chloroplast precursor
  misc_feature (20)..(251): Homolog of NCBI NO: 7578881 NR Description: plastid-specific ribosomal protein 2 precursor
  misc_feature (1)..(248): Homolog of NCBI NO: 11357772 NR Description: hypothetical protein F4F15.260 - Arabidopsis
  misc_feature (1)..(251): Homolog of NCBI NO: 30693595 NR Description: RNA recognition motif (RRM)-containing protein
MATFLTPLVSIKPTVFSFPSQSVTSPHRQTNVLSLKPFPSPAGAQSSRVRFIPHAVETEEKPASDPNAESSRRVYIGNIPRTVDNEQLSKLVEEHGAAENVQVMYDKYSGRSRRFGFATMKSVEDANAVIDKLNGTTIEGREVKVNITEKPIASSSSPDLSLLQSEDSAFVDSPYKVYVGNLAKTVTKQMLENLFSEKGKVVSAKVSRVPGTSKSSGFGFVTFSTEEDVEAAILALNNSLLEGQKIRVNKA

SEQ ID NO: 1106 - protein, 148 aa, Zea mays subsp. mays
  peptide (1)..(148): Ceres Seq. ID no. 15178876
  misc_feature (74)..(145): Pfam Name: RNA recognition motif. (a.k.a. RRM, RBD, or RNP domain) Pfam Description: RNA recognition motif. (a.k.a. RRM, RBD, or RNP
  misc_feature (1)..(54): Homolog of NCBI NO: 1350821 NR Description: 31 kDa ribonucleoprotein, chloroplast precursor
  misc_feature (1)..(148): Homolog of NCBI NO: 681912 NR Description: cp33 [Arabidopsis thaliana]
  misc_feature (1)..(148): Homolog of NCBI NO: 34913270 NR Description: putative ribonucleoprotein
  misc_feature (1)..(148): Homolog of NCBI NO: 17064758 NR Description: ubiquitin / ribosomal protein CEP52 [Arabidopsis
  misc_feature (1)..(148): Homolog of NCBI NO: 15231200 NR Description: 33 kDa ribonucleoprotein, chloroplast
  misc_feature (68)..(148): Homolog of NCBI NO: 12230585 NR Description: 29 kDa ribonucleoprotein B, chloroplast precursor
  misc_feature (1)..(54): Homolog of NCBI NO: 12230585 NR Description: 29 kDa ribonucleoprotein B, chloroplast precursor
  misc_feature (1)..(148): Homolog of NCBI NO: 7578881 NR Description: plastid-specific ribosomal protein 2 precursor
  misc_feature (1)..(145): Homolog of NCBI NO: 11357772 NR Description: hypothetical protein F4F15.260 - Arabidopsis
  misc_feature (1)..(148): Homolog of NCBI NO: 30693595 NR Description: RNA recognition motif (RRM)-containing protein
MYDKYSGRSRRFGFATMKSVEDANAVIDKLNGTTIEGREVKVNITEKPIASSSSPDLSLLQSEDSAFVDSPYKVYVGNLAKTVTKQMLENLFSEKGKVVSAKVSRVPGTSKSSGFGFVTFSTEEDVEAAILALNNSLLEGQKIRVNKA

SEQ ID NO: 1107 - DNA, 830 bp, Zea mays subsp. mays
  misc_feature (1)..(830): Ceres Seq. ID no. 15178424
agattgttcctacacacgccatttgcattcttctctctcttcagctactaaccaacgaatctctctctctctctaaaacaatggctcaggaagacgtcgctgctgctgctgctgctgctaacggtgctaccacggcggtggagaagtccgttacgttcacggcgtacaagcctcagctgattgtggaagcacagaaggtcggtgacgctgttgcgttctacaaggctgtgtttggcgccgtggagactggacgctctctctaccccaagcgtaaggctgaccaagagctccctcacctcgtctcttccgagctcgagctcgccggaacaaccgtagtcgtttctgacgtatccgttaactctggccctgatgcgaagacggggactatgcctgcgatcctcgaaaccgatgacgtggaagctgccgttgcgaaggccgttgcggctggagctgtcaaggaggaggaggaggaggaggtctcggagggtggagtcaaggggaaagtgacggatccgttcgggttcacgtggatctttgttgctccggcgaagaagagtgagaaggaaggaaacaaagaggtctaactgttaaccgtcggatctgatcatttcgtcggtttctgaacgaactttttaatattattatcctatgctttttattagtttgtcttttgtggaatctccggtatgagtaaaccggattgattaggctaaaatgacttttgttcttcaccaccttttgacataaacttggtgaaagaaataacaaaaatatcggatgttaatgtgattatgcttattagtggcttaactattttccattcgtatctc

SEQ ID NO: 1108 - protein, 193 aa, Zea mays subsp. mays
  peptide (1)..(193): Ceres Seq. ID no. 15178425
  misc_feature (51)..(177): Pfam Name: Glyoxalase/Bleomycin resistance Pfam Description: Glyoxalase/Bleomycin resistance
  misc_feature (38)..(188): Homolog of NCBI NO: 37520521 NR Description: hypothetical protein glr0952 [Gloeobacter
  misc_feature (27)..(186): Homolog of NCBI NO: 28565534 NR Description: early tobacco anther 1 [Nicotiana tabacum]
  misc_feature (27)..(193): Homolog of NCBI NO: 18422918 NR Description: expressed protein [Arabidopsis thaliana]
IVPTHAICILLSLQLLTNESLSLSKTMAQEDVAAAAAAANGATTAVEKSVTFTAYKPQLIVEAQKVGDAVAFYKAVFGAVETGRSLYPKRKADQELPHLVSSELELAGTTVVVSDVSVNSGPDAKTGTMPAILETDDVEAAVAKAVAAGAVKEEEEEEVSEGGVKGKVTDPFGFTWIFVAPAKKSEKEGNKEV

SEQ ID NO: 1109 - protein, 167 aa, Zea mays subsp. mays
  peptide (1)..(167): Ceres Seq. ID no. 15178426
  misc_feature (25)..(151): Pfam Name: Glyoxalase/Bleomycin resistance Pfam Description: Glyoxalase/Bleomycin resistance
  misc_feature (12)..(162): Homolog of NCBI NO: 37520521 NR Description: hypothetical protein glr0952 [Gloeobacter
  misc_feature (1)..(160): Homolog of NCBI NO: 28565534 NR Description: early tobacco anther 1 [Nicotiana tabacum]
  misc_feature (1)..(167): Homolog of NCBI NO: 18422918 NR Description: expressed protein [Arabidopsis thaliana]
MAQEDVAAAAAAANGATTAVEKSVTFTAYKPQLIVEAQKVGDAVAFYKAVFGAVETGRSLYPKRKADQELPHLVSSELELAGTTVVVSDVSVNSGPDAKTGTMPAILETDDVEAAVAKAVAAGAVKEEEEEEVSEGGVKGKVTDPFGFTWIFVAPAKKSEKEGNKEV

SEQ ID NO: 1110 - DNA, 836 bp, Zea mays subsp. mays
  misc_feature (1)..(836): Ceres Seq. ID no. 15175519
acaaattcacacattttttgttgcattatcacaaacacctcgtccctcacaatgcagctagcaatggcggccaacgctgtcgtttcaccgtcgccgttccgacctcagccctttctccggtcatccttctccggcgtctccgtcaagctcactccccaatccataacgctttcacgctccaagcccctcaccgtcttcgccgccaccaagaaggccgtcgccgtcctcaaggggacctccgccgtcgaaggcgtcgccactctcatccaagaagacgatggcccgacgacagtttctgttcgcatcactggccttactccggggcttcatggttttcacctacatgagtatggtgatacgacaaatgggtgtatttctacgggagcacattttaatcctaataaattgacacatggtgctcctgaggatgaagtccgtcatgcgggtgacctgggaaacatagttgctaatgcagagggggttgcagaggctacaattgtggataatcagataccactctctggccccaattcagtagttggaagagccttggtggtccatgagcttgaggatgaccttggaaagggtgggcatgaactcagtttgacaactggaaatgctggtggaagattagcatgtggtgtggttggtttgactccagcataatcagtgcagcgaattttttgtagcagtcgtgttatgttatcagatattatgttctctgtgaagcatgatgactcactgttttcttcagttaccaatgtaaactgtaaagcataatgtccttctaaagatgagtgtgcaaatgaatcatgaaaacatgttgttagtccttt

SEQ ID NO: 1111 - protein, 221 aa, Zea mays subsp. mays
  peptide (1)..(221): Ceres Seq. ID no. 15175520
  misc_feature (70)..(220): Pfam Name: Copper/zinc superoxide dismutase (SODC) Pfam Description: Copper/zinc superoxide dismutase (SODC)
  misc_feature (41)..(220): Homolog of NCBI NO: 134686 NR Description: Superoxide dismutase [Cu-Zn], chloroplast
  misc_feature (22)..(220): Homolog of NCBI NO: 13274148 NR Description: putative CuZn-superoxide dismutase
  misc_feature (25)..(220): Homolog of NCBI NO: 33327349 NR Description: superoxidase dismutase [Lycopersicon esculentum]
  misc_feature (25)..(220): Homolog of NCBI NO: 134682 NR Description: Superoxide dismutase [Cu-Zn], chloroplast
  misc_feature (28)..(220): Homolog of NCBI NO: 134684 NR Description: Superoxide dismutase [Cu-Zn], chloroplast
  misc_feature (29)..(220): Homolog of NCBI NO: 12230570 NR Description: Superoxide dismutase [Cu-Zn], chloroplast
  misc_feature (22)..(220): Homolog of NCBI NO: 12230569 NR Description: Superoxide dismutase [Cu-Zn], chloroplast
  misc_feature (22)..(220): Homolog of NCBI NO: 38073257 NR Description: superoxide dismutase [Trifolium pratense]
  misc_feature (22)..(220): Homolog of NCBI NO: 134683 NR Description: Superoxide dismutase [Cu-Zn], chloroplast
  misc_feature (22)..(220): Homolog of NCBI NO: 20900 NR Description: Cu/Zn superoxide dismutase II [Pisum sativum]
TNSHIFCCIITNTSSLTMQLAMAANAVVSPSPFRPQPFLRSSFSGVSVKLTPQSITLSRSKPLTVFAATKKAVAVLKGTSAVEGVATLIQEDDGPTTVSVRITGLTPGLHGFHLHEYGDTTNGCISTGAHFNPNKLTHGAPEDEVRHAGDLGNIVANAEGVAEATIVDNQIPLSGPNSVVGRALVVHELEDDLGKGGHELSLTTGNAGGRLACGVVGLTPA

SEQ ID NO: 1112 - protein, 204 aa, Zea mays subsp. mays
  peptide (1)..(204): Ceres Seq. ID no. 15175521
  misc_feature (53)..(203): Pfam Name: Copper/zinc superoxide dismutase (SODC) Pfam Description: Copper/zinc superoxide dismutase (SODC)
  misc_feature (24)..(203): Homolog of NCBI NO: 134686 NR Description: Superoxide dismutase [Cu-Zn], chloroplast
  misc_feature (5)..(203): Homolog of NCBI NO: 13274148 NR Description: putative CuZn-superoxide dismutase
  misc_feature (8)..(203): Homolog of NCBI NO: 33327349 NR Description: superoxidase dismutase [Lycopersicon esculentum]
  misc_feature (8)..(203): Homolog of NCBI NO: 134682 NR Description: Superoxide dismutase [Cu-Zn], chloroplast
  misc_feature (11)..(203): Homolog of NCBI NO: 134684 NR Description: Superoxide dismutase [Cu-Zn], chloroplast
  misc_feature (12)..(203): Homolog of NCBI NO: 12230570 NR Description: Superoxide dismutase [Cu-Zn], chloroplast
  misc_feature (5)..(203): Homolog of NCBI NO: 12230569 NR Description: Superoxide dismutase [Cu-Zn], chloroplast
  misc_feature (5)..(203): Homolog of NCBI NO: 38073257 NR Description: superoxide dismutase [Trifolium pratense]
  misc_feature (5)..(203): Homolog of NCBI NO: 134683 NR Description: Superoxide dismutase [Cu-Zn], chloroplast
  misc_feature (5)..(203): Homolog of NCBI NO: 20900 NR Description: Cu/Zn superoxide dismutase II [Pisum sativum]
MQLAMAANAVVSPSPFRPQPFLRSSFSGVSVKLTPQSITLSRSKPLTVFAATKKAVAVLKGTSAVEGVATLIQEDDGPTTVSVRITGLTPGLHGFHLHEYGDTTNGCISTGAHFNPNKLTHGAPEDEVRHAGDLGNIVANAEGVAEATIVDNQIPLSGPNSVVGRALVVHELEDDLGKGGHELSLTTGNAGGRLACGVVGLTPA

SEQ ID NO: 1113 - protein, 200 aa, Zea mays subsp. mays
  peptide (1)..(200): Ceres Seq. ID no. 15175522
  misc_feature (49)..(199): Pfam Name: Copper/zinc superoxide dismutase (SODC) Pfam Description: Copper/zinc superoxide dismutase (SODC)
  misc_feature (20)..(199): Homolog of NCBI NO: 134686 NR Description: Superoxide dismutase [Cu-Zn], chloroplast
  misc_feature (1)..(199): Homolog of NCBI NO: 13274148 NR Description: putative CuZn-superoxide dismutase
  misc_feature (4)..(199): Homolog of NCBI NO: 33327349 NR Description: superoxidase dismutase [Lycopersicon esculentum]
  misc_feature (4)..(199): Homolog of NCBI NO: 134682 NR Description: Superoxide dismutase [Cu-Zn], chloroplast
  misc_feature (7)..(199): Homolog of NCBI NO: 134684 NR Description: Superoxide dismutase [Cu-Zn], chloroplast
  misc_feature (8)..(199): Homolog of NCBI NO: 12230570 NR Description: Superoxide dismutase [Cu-Zn], chloroplast
  misc_feature (1)..(199): Homolog of NCBI NO: 12230569 NR Description: Superoxide dismutase [Cu-Zn], chloroplast
  misc_feature (1)..(199): Homolog of NCBI NO: 38073257 NR Description: superoxide dismutase [Trifolium pratense]
  misc_feature (1)..(199): Homolog of NCBI NO: 134683 NR Description: Superoxide dismutase [Cu-Zn], chloroplast
  misc_feature (1)..(199): Homolog of NCBI NO: 20900 NR Description: Cu/Zn superoxide dismutase II [Pisum sativum]
MAANAVVSPSPFRPQPFLRSSFSGVSVKLTPQSITLSRSKPLTVFAATKKAVAVLKGTSAVEGVATLIQEDDGPTTVSVRITGLTPGLHGFHLHEYGDTTNGCISTGAHFNPNKLTHGAPEDEVRHAGDLGNIVANAEGVAEATIVDNQIPLSGPNSVVGRALVVHELEDDLGKGGHELSLTTGNAGGRLACGVVGLTPA

SEQ ID NO: 1114 - DNA, 961 bp, Zea mays subsp. mays
  misc_feature (1)..(961): Ceres Seq. ID no. 15176514
ctcagtctcccctactatggccttgcctatctccggcacgcgccacctcacgcgctccctcttgtccagtaccaccttactcgcgcctcctaagcttccttcctccgttcgctgcggtgggtttagctccggtcacgatgcggttgtacctcggtttacctcactccgatgccgagctaaccgttcaggctccgcttactcgccgctcaactccggctccaacttcagcgaccgacctccgacggagatggcgcctctgttcccgggatgcgattacgagcactggctgattgttatggacaagcccggcggcgaaggagcgacgaagcaggagatgattgattgttacgtacaaactttagctaaagtcgttggaagtgaggaagaggcgaagaagaggatttacaatgtttcgtgtgagaggtatttggggtttgggtgtgagattgatgaagagacatctactaagcttgaaggtttgcctggtgttctgtttgtgcttccggattcatatgtggatcctgagaacaaagattatggagcggagctatttgttaatggagagatagtccaacgatcaccagagaggcagaggagagttgagccacagccgcagagagcgcaagatagaccgagatacaatgacagaacgcgttactctcgccgcaaagaaaacacacgctgagccgcgactgaagaagatacgcgtacaccgtattgaatcaaatcgaaagcgagtacgatagtggtgatcatgaggatgatgttgctgctgccaggcgaaggttccatgttccaccccgttgctgctaatcgatcaactttggatattgttgcaaatgcttagtttcggtactgtgtaacatctttatatgtaataatgtaaattgaggttacttttactgttttagagaagacactgggatatttgggcatcaaaattcgttttcctttctagaac

SEQ ID NO: 1115 - protein, 227 aa, Zea mays subsp. mays
  peptide (1)..(227): Ceres Seq. ID no. 15176515
  misc_feature (18)..(227): Homolog of NCBI NO: 15226934 NR Description: expressed protein [Arabidopsis thaliana]
  misc_feature (47)..(227): Homolog of NCBI NO: 34897972 NR Description: putative plastid protein [Oryza sativa (japonica
  misc_feature (11)..(227): Homolog of NCBI NO: 15223247 NR Description: plastid protein -related [Arabidopsis thaliana]
  misc_feature (9)..(225): Homolog of NCBI NO: 38344141 NR Description: OSJNBa0041A02.8 [Oryza sativa (japonica
  misc_feature (27)..(227): Homolog of NCBI NO: 25370552 NR Description: DAG protein homolog [imported] - Arabidopsis
  misc_feature (6)..(227): Homolog of NCBI NO: 21617909 NR Description: plastid protein [Arabidopsis thaliana]
  misc_feature (6)..(227): Homolog of NCBI NO: 2440029 NR Description: DAL1 protein [Arabidopsis thaliana]
  misc_feature (6)..(227): Homolog of NCBI NO: 15226108 NR Description: plastid protein [Arabidopsis thaliana]
  misc_feature (64)..(224): Homolog of NCBI NO: 15220382 NR Description: DAG protein -related [Arabidopsis thaliana]
  misc_feature (17)..(225): Homolog of NCBI NO: 18400602 NR Description: expressed protein [Arabidopsis thaliana]
SVSPTMALPISGTRHLTRSLLSSTTLLAPPKLPSSVRCGGFSSGHDAVVPRFTSLRCRANRSGSAYSPLNSGSNFSDRPPTEMAPLFPGCDYEHWLIVMDKPGGEGATKQEMIDCYVQTLAKVVGSEEEAKKRIYNVSCERYLGFGCEIDEETSTKLEGLPGVLFVLPDSYVDPENKDYGAELFVNGEIVQRSPERQRRVEPQPQRAQDRPRYNDRTRYSRRKENTR

SEQ ID NO: 1116 - protein, 222 aa, Zea mays subsp. mays
  peptide (1)..(222): Ceres Seq. ID no. 15176516
  misc_feature (59)..(219): Homolog of NCBI NO: 15220382 NR Description: DAG protein -related [Arabidopsis thaliana]
  misc_feature (12)..(220): Homolog of NCBI NO: 18400602 NR Description: expressed protein [Arabidopsis thaliana]
  misc_feature (13)..(222): Homolog of NCBI NO: 15226934 NR Description: expressed protein [Arabidopsis thaliana]
  misc_feature (42)..(222): Homolog of NCBI NO: 34897972 NR Description: putative plastid protein [Oryza sativa (japonica
  misc_feature (6)..(222): Homolog of NCBI NO: 15223247 NR Description: plastid protein -related [Arabidopsis thaliana]
  misc_feature (4)..(220): Homolog of NCBI NO: 38344141 NR Description: OSJNBa0041A02.8 [Oryza sativa (japonica
  misc_feature (22)..(222): Homolog of NCBI NO: 25370552 NR Description: DAG protein homolog [imported] - Arabidopsis
  misc_feature (1)..(222): Homolog of NCBI NO: 21617909 NR Description: plastid protein [Arabidopsis thaliana]
  misc_feature (1)..(222): Homolog of NCBI NO: 2440029 NR Description: DAL1 protein [Arabidopsis thaliana]
  misc_feature (1)..(222): Homolog of NCBI NO: 15226108 NR Description: plastid protein [Arabidopsis thaliana]
MALPISGTRHLTRSLLSSTTLLAPPKLPSSVRCGGFSSGHDAVVPRFTSLRCRANRSGSAYSPLNSGSNFSDRPPTEMAPLFPGCDYEHWLIVMDKPGGEGATKQEMIDCYVQTLAKVVGSEEEAKKRIYNVSCERYLGFGCEIDEETSTKLEGLPGVLFVLPDSYVDPENKDYGAELFVNGEIVQRSPERQRRVEPQPQRAQDRPRYNDRTRYSRRKENTR

SEQ ID NO: 1117 - protein, 145 aa, Zea mays subsp. mays
  peptide (1)..(145): Ceres Seq. ID no. 15176517
  misc_feature (1)..(142): Homolog of NCBI NO: 15220382 NR Description: DAG protein -related [Arabidopsis thaliana]
  misc_feature (1)..(143): Homolog of NCBI NO: 18400602 NR Description: expressed protein [Arabidopsis thaliana]
  misc_feature (1)..(145): Homolog of NCBI NO: 15226934 NR Description: expressed protein [Arabidopsis thaliana]
  misc_feature (1)..(145): Homolog of NCBI NO: 34897972 NR Description: putative plastid protein [Oryza sativa (japonica
  misc_feature (1)..(145): Homolog of NCBI NO: 15223247 NR Description: plastid protein -related [Arabidopsis thaliana]
  misc_feature (1)..(143): Homolog of NCBI NO: 38344141 NR Description: OSJNBa0041A02.8 [Oryza sativa (japonica
  misc_feature (1)..(145): Homolog of NCBI NO: 25370552 NR Description: DAG protein homolog [imported] - Arabidopsis
  misc_feature (1)..(145): Homolog of NCBI NO: 21617909 NR Description: plastid protein [Arabidopsis thaliana]
  misc_feature (1)..(145): Homolog of NCBI NO: 2440029 NR Description: DAL1 protein [Arabidopsis thaliana]
  misc_feature (1)..(145): Homolog of NCBI NO: 15226108 NR Description: plastid protein [Arabidopsis thaliana]
MAPLFPGCDYEHWLIVMDKPGGEGATKQEMIDCYVQTLAKVVGSEEEAKKRIYNVSCERYLGFGCEIDEETSTKLEGLPGVLFVLPDSYVDPENKDYGAELFVNGEIVQRSPERQRRVEPQPQRAQDRPRYNDRTRYSRRKENTR

SEQ ID NO: 1118 - DNA, 744 bp, Zea mays subsp. mays
  misc_feature (1)..(744): Ceres Seq. ID no. 15178928
atcatcatcgtggaacgtggagctcacatactaaacaagatccgatctaaccccccggttctcgtcggaatctcttcacggttaaccggcgttcctcacccaccttttcgttccagttatggaagacgtgaagggaaaggagcttgttgatgatactcctcctcctgttgaacaaaatgatgaaactgagattcataaacagccatcgtctgagtccgaggaaaatgcgatcaagaaaaagtatggaggattgttgccaaagaagattcctttgatatccaaggatcatgagcgtgcgttttttgactcagctgattgggcattaggcaagcaaaaaggacaaaagccaaaagggcctttggaagctctccgaccaaaactgcagccaaccccgcaccagcaaccaagggcaagacgaatggccttatcttcaggcgataactctgaagacgctgaggctgacaccaacgaacctctggatgaccaacaagctagcgcatcagctgctgacaacgccaaggatgatggaggcatcgtcgatgctgctgacgccaaagacaacatcaagtcatgaacaaacatatcacaagtcagtttacagaagaataagcgaccaggcttgctttgcagtggttgtagtaatatcgagtctctctctttacattatattccatacttgggtaccagcaaatctgtatcaccatacaaaacctagtatctgaaacgtctatttggacgatttgc

SEQ ID NO: 1119 - protein, 151 aa, Zea mays subsp. mays
  peptide (1)..(151): Ceres Seq. ID no. 15178929
  misc_feature (21)..(110): Homolog of NCBI NO: 34910886 NR Description: P0003E08.9 [Oryza sativa (japonica
  misc_feature (30)..(109): Homolog of NCBI NO: 18414599 NR Description: expressed protein [Arabidopsis thaliana]
  misc_feature (1)..(76): Homolog of NCBI NO: 5042462 NR Description: putative negatively light-regulated protein
  misc_feature (43)..(108): Homolog of NCBI NO: 100536 NR Description: hypothetical protein - swollen duckweed
  misc_feature (46)..(114): Homolog of NCBI NO: 10176961 NR Description: gene_id:MHJ24.11~unknown protein [Arabidopsis
  misc_feature (43)..(118): Homolog of NCBI NO: 100535 NR Description: hypothetical protein - swollen duckweed
  misc_feature (38)..(135): Homolog of NCBI NO: 4164473 NR Description: negatively light-regulated protein [Vernicia
  misc_feature (18)..(114): Homolog of NCBI NO: 18424791 NR Description: expressed protein [Arabidopsis thaliana]
  misc_feature (1)..(121): Homolog of NCBI NO: 34902768 NR Description: unnamed protein product [Oryza sativa (japonica
  misc_feature (1)..(151): Homolog of NCBI NO: 18409295 NR Description: expressed protein [Arabidopsis thaliana]
MEDVKGKELVDDTPPPVEQNDETEIHKQPSSESEENAIKKKYGGLLPKKIPLISKDHERAFFDSADWALGKQKGQKPKGPLEALRPKLQPTPHQQPRARRMALSSGDNSEDAEADTNEPLDDQQASASAADNAKDDGGIVDAADAKDNIKS

SEQ ID NO: 1120 - protein, 80 aa, Zea mays subsp. mays
  peptide (1)..(80): Ceres Seq. ID no. 15178930
MTNKLAHQLLTTPRMMEASSMLLTPKTTSSHEQTYHKSVYRRISDQACFAVVVVISSLSLYIIFHTWVPANLYHHTKPSI

SEQ ID NO: 1121 - DNA, 680 bp, Zea mays subsp. mays
  misc_feature (1)..(680): Ceres Seq. ID no. 15177478
acataaaccctagaaacgtctaagtgcgatctctctctctcttcctaaagatatgcgggtggtgaatccatccttgtgtatcgacggtgcacaaccattggtgtacctccctcctcctcgctcttctcattttcccgctaatggaaaattccatgggcgttgttactatcctacgagcgtttctatgcaatcccagagcaaaagatctgtctttgcatgtaacgctgccctgaatgcaaaatgcagtcaagggcaaacacagactgttactcgggaatcaccgacaattacacaagctcctacacatggaaaggagaaatccccaaagcttgatgacggtggaagcgggttcccaccccgggatgatggtggtggtgggggcggaggaggcggtggagagagcttctctggtggattcttccttttcgggtttcttatgttcatgggttacttgaaagatttggagggcgaacatgaaaccagccactagctagagaggggaggaaggggaaacagacagacagagagatctctagacgaaatagagataataaaaagtttatactagtgctagcaattaggcacatatttgtatgaatcagacagatttttgttatctcgacataaaacaaaatgcttcatctttataacaaatgttcaaagatttggaactgaggttt

SEQ ID NO: 1122 - protein, 145 aa, Zea mays subsp. mays
  peptide (1)..(145): Ceres Seq. ID no. 15177479
  misc_feature (50)..(142): Homolog of NCBI NO: 18405726 NR Description: expressed protein [Arabidopsis thaliana]
  misc_feature (47)..(145): Homolog of NCBI NO: 25372889 NR Description: protein F26G16.9 [imported] - Arabidopsis
MRVVNPSLCIDGAQPLVYLPPPRSSHFPANGKFHGRCYYPTSVSMQSQSKRSVFACNAALNAKCSQGQTQTVTRESPTITQAPTHGKEKSPKLDDGGSGFPPRDDGGGGGGGGGGESFSGGFFLFGFLMFMGYLKDLEGEHETSH

SEQ ID NO: 1123 - protein, 101 aa, Zea mays subsp. mays
  peptide (1)..(101): Ceres Seq. ID no. 15177480
  misc_feature (6)..(98): Homolog of NCBI NO: 18405726 NR Description: expressed protein [Arabidopsis thaliana]
  misc_feature (3)..(101): Homolog of NCBI NO: 25372889 NR Description: protein F26G16.9 [imported] - Arabidopsis
MQSQSKRSVFACNAALNAKCSQGQTQTVTRESPTITQAPTHGKEKSPKLDDGGSGFPPRDDGGGGGGGGGGESFSGGFFLFGFLMFMGYLKDLEGEHETSH

SEQ ID NO: 1124 - protein, 73 aa, Zea mays subsp. mays
  peptide (1)..(73): Ceres Seq. ID no. 15177481
MQNAVKGKHRLLLGNHRQLHKLLHMERRNPQSLMTVEAGSHPGMMVVVGAEEAVERASLVDSSFSGFLCSWVT

SEQ ID NO: 1125 - DNA, 978 bp, Zea mays subsp. mays
  misc_feature (1)..(978): Ceres Seq. ID no. 15178931
atccatttcatcaacttcaacgagagagagagagagagagagagagtaaagggagagtaaccaaaccctaatttctatctccttctcctctgaactgaaaagttccctctgctcgaaaagctcccatggcgtttcgaagaaactgtgggttggagctcttggtagcttctttaactctaaccttcgctctgattcagctagtggaggcgaactcagatggagatgctctatacgctcttcgacagagcttgtcggatccagaccatgtgctccagagctgggatcagaatcttgtcaatccttgcacctggttccatgtctcctgtaaccaagacagccgcgtcactcgtgtggatttgggtaattcaaacctttctggacatcttacccctgagcttggcaagctcgaacatctacagtatctggagctgtacaaaaacaacatccaaggaactataccttctgaacttggaaaccttaaaagtctcatcagcttggatctttacaacaacaatcttaccgggcagattcctacttctttggggaagttgaagtctctggtctttctccgcctcaatgacaaccggttgactggttcaatccctagagagctcaccaaaattccaagccttaaagtctttgatgtgtcgaacaatgatttgtgtggaactatcccaatagaaggaccttttgaacacattcctttggagaactttgagaacaactcgagattggagggaccggagttactcggtcttgcaagctacgacaccaactgcaactgagacaactgagacaacacttcaccacttttatcaaatctcacatctattattattgtaataagtatatatatgtcagtagttgaaaaacaaagaagcaaaaaaagagcccaaagactggtgtctgtttaagtaaaaacatatacatgcgactttcgtgtgttttgcattgagaagtaatattggtattggtagc

SEQ ID NO: 1126 - protein, 219 aa, Zea mays subsp. mays
  peptide (1)..(219): Ceres Seq. ID no. 15178932
  misc_feature (168)..(200): Pfam Name: Leucine Rich Repeat Pfam Description: Leucine Rich Repeat
  misc_feature (11)..(206): Homolog of NCBI NO: 15081616 NR Description: At1g71830/F14O23_24 [Arabidopsis thaliana]
  misc_feature (26)..(206): Homolog of NCBI NO: 40253600 NR Description: putative somatic embryogenesis receptor kinase 1
  misc_feature (4)..(206): Homolog of NCBI NO: 21740899 NR Description: OSJNBa0036B21.13 [Oryza sativa (japonica
  misc_feature (13)..(218): Homolog of NCBI NO: 27497122 NR Description: floral organ regulator 1 [Oryza sativa (japonica
  misc_feature (28)..(218): Homolog of NCBI NO: 34903344 NR Description: unnamed protein product [Oryza sativa (japonica
  misc_feature (13)..(218): Homolog of NCBI NO: 29468120 NR Description: leucine-rich repeat protein [Oryza sativa]
  misc_feature (16)..(219): Homolog of NCBI NO: 7489030 NR Description: leucine-rich repeat protein LRP - tomato
  misc_feature (21)..(219): Homolog of NCBI NO: 30385250 NR Description: leucine-rich repeat protein [x Citrofortunella
  misc_feature (5)..(218): Homolog of NCBI NO: 34146800 NR Description: At3g43740 [Arabidopsis thaliana]
  misc_feature (5)..(218): Homolog of NCBI NO: 15242153 NR Description: leucine rich repeat protein (LRP), putative
MAFRRNCGLELLVASLTLTFALIQLVEANSDGDALYALRQSLSDPDHVLQSWDQNLVNPCTWFHVSCNQDSRVTRVDLGNSNLSGHLTPELGKLEHLQYLELYKNNIQGTIPSELGNLKSLISLDLYNNNLTGQIPTSLGKLKSLVFLRLNDNRLTGSIPRELTKIPSLKVFDVSNNDLCGTIPIEGPFEHIPLENFENNSRLEGPELLGLASYDTNCN

SEQ ID NO: 1127 - protein, 111 aa, Zea mays subsp. mays
  peptide (1)..(111): Ceres Seq. ID no. 15178933
MEMLYTLFDRACRIQTMCSRAGIRILSILAPGSMSPVTKTAASLVWIWVIQTFLDILPLSLASSNIYSIWSCTKTTSKELYLLNLETLKVSSAWIFTTTILPGRFLLLWGS

SEQ ID NO: 1128 - protein, 109 aa, Zea mays subsp. mays
  peptide (1)..(109): Ceres Seq. ID no. 15178934
MLYTLFDRACRIQTMCSRAGIRILSILAPGSMSPVTKTAASLVWIWVIQTFLDILPLSLASSNIYSIWSCTKTTSKELYLLNLETLKVSSAWIFTTTILPGRFLLLWGS

SEQ ID NO: 1129 - DNA, 785 bp, Zea mays subsp. mays
  misc_feature (1)..(785): Ceres Seq. ID no. 15174289
aaaatctagggttgatgagccaccgtgtatcgatcctctcttctcatttatctcccgtcatggcttcagagaaagaggctgctttagccgccactccttccgattctcccaccatatttgacaagatcatcagtaaagaaattccatccacagttgtttttgaggatgacaaggtcttggcctttagggacataactccacagggtcctgttcacatcctcctcattccaaaagtgagggatggtttaactggcctctctaaggctgaggagaggcacatcgacatcttgggccgccttctctacactgccaagcttgtagccaaacaagaaggcctagatgaaggtttcagaattgtgatcaacgatggtcctcaaggctatcagtcggtgtatcacattcatgttcatctcattggaggacgccaaatgaactggcctcctggctaaaagggtttgatcatctactagtgattgttgtcctggttataagaggaaccctaccctgagtttgctattgtcttcttctttctgaataaaaagagtgtgacataactttttatgattgttatgcgaaaccttggtctatggtttgaagagaatatttgactgttctcttttctggaaccctcttttttattgttgacttggtaaaacatttcaatggtaaaaaagcgtcaaataaatgagtgaatgttagagagttttctgtgtaagatttttagtgtaataatcatctttaggaaaataactaaggaatatactttgtaatattccctctatttc

SEQ ID NO: 1130 - protein, 148 aa, Zea mays subsp. mays
  peptide (1)..(148): Ceres Seq. ID no. 15174290
  misc_feature (20)..(148): Homolog of NCBI NO: 23612841 NR Description: protein kinase c inhibitor-like protein, putative
  misc_feature (20)..(148): Homolog of NCBI NO: 31217157 NR Description: ENSANGP00000012999 [Anopheles gambiae]
  misc_feature (128)..(148): Homolog of NCBI NO: 25518144 NR Description: F28K20.9 protein - Arabidopsis thaliana
  misc_feature (25)..(137): Homolog of NCBI NO: 25518144 NR Description: F28K20.9 protein - Arabidopsis thaliana
  misc_feature (25)..(148): Homolog of NCBI NO: 15221629 NR Description: protein kinase C inhibitor (Zinc-binding protein)
  misc_feature (20)..(148): Homolog of NCBI NO: 1177047 NR Description: 14 KD ZINC-BINDING PROTEIN (PROTEIN KINASE C
  misc_feature (37)..(148): Homolog of NCBI NO: 1177046 NR Description: 14 KD ZINC-BINDING PROTEIN (PROTEIN KINASE C
  misc_feature (20)..(148): Homolog of NCBI NO: 629858 NR Description: protein kinase C inhibitor - maize
  misc_feature (20)..(148): Homolog of NCBI NO: 11260559 NR Description: protein kinase C inhibitor-like protein -
  misc_feature (5)..(148): Homolog of NCBI NO: 18410510 NR Description: protein kinase C inhibitor-related protein
NLGLMSHRVSILSSHLSPVMASEKEAALAATPSDSPTIFDKIISKEIPSTVVFEDDKVLAFRDITPQGPVHILLIPKVRDGLTGLSKAEERHIDILGRLLYTAKLVAKQEGLDEGFRIVINDGPQGYQSVYHIHVHLIGGRQMNWPPG

SEQ ID NO: 1131 - protein, 144 aa, Zea mays subsp. mays
  peptide (1)..(144): Ceres Seq. ID no. 15174291
  misc_feature (16)..(144): Homolog of NCBI NO: 23612841 NR Description: protein kinase c inhibitor-like protein, putative
  misc_feature (16)..(144): Homolog of NCBI NO: 31217157 NR Description: ENSANGP00000012999 [Anopheles gambiae]
  misc_feature (124)..(144): Homolog of NCBI NO: 25518144 NR Description: F28K20.9 protein - Arabidopsis thaliana
  misc_feature (21)..(133): Homolog of NCBI NO: 25518144 NR Description: F28K20.9 protein - Arabidopsis thaliana
  misc_feature (21)..(144): Homolog of NCBI NO: 15221629 NR Description: protein kinase C inhibitor (Zinc-binding protein)
  misc_feature (16)..(144): Homolog of NCBI NO: 1177047 NR Description: 14 KD ZINC-BINDING PROTEIN (PROTEIN KINASE C
  misc_feature (33)..(144): Homolog of NCBI NO: 1177046 NR Description: 14 KD ZINC-BINDING PROTEIN (PROTEIN KINASE C
  misc_feature (16)..(144): Homolog of NCBI NO: 629858 NR Description: protein kinase C inhibitor - maize
  misc_feature (16)..(144): Homolog of NCBI NO: 11260559 NR Description: protein kinase C inhibitor-like protein -
  misc_feature (1)..(144): Homolog of NCBI NO: 18410510 NR Description: protein kinase C inhibitor-related protein
MSHRVSILSSHLSPVMASEKEAALAATPSDSPTIFDKIISKEIPSTVVFEDDKVLAFRDITPQGPVHILLIPKVRDGLTGLSKAEERHIDILGRLLYTAKLVAKQEGLDEGFRIVINDGPQGYQSVYHIHVHLIGGRQMNWPPG

SEQ ID NO: 1132 - protein, 129 aa, Zea mays subsp. mays
  peptide (1)..(129): Ceres Seq. ID no. 15174292
  misc_feature (1)..(129): Homolog of NCBI NO: 31217157 NR Description: ENSANGP00000012999 [Anopheles gambiae]
  misc_feature (109)..(129): Homolog of NCBI NO: 25518144 NR Description: F28K20.9 protein - Arabidopsis thaliana
  misc_feature (6)..(118): Homolog of NCBI NO: 25518144 NR Description: F28K20.9 protein - Arabidopsis thaliana
  misc_feature (6)..(129): Homolog of NCBI NO: 15221629 NR Description: protein kinase C inhibitor (Zinc-binding protein)
  misc_feature (1)..(129): Homolog of NCBI NO: 1177047 NR Description: 14 KD ZINC-BINDING PROTEIN (PROTEIN KINASE C
  misc_feature (18)..(129): Homolog of NCBI NO: 1177046 NR Description: 14 KD ZINC-BINDING PROTEIN (PROTEIN KINASE C
  misc_feature (1)..(129): Homolog of NCBI NO: 629858 NR Description: protein kinase C inhibitor - maize
  misc_feature (1)..(129): Homolog of NCBI NO: 11260559 NR Description: protein kinase C inhibitor-like protein -
  misc_feature (1)..(129): Homolog of NCBI NO: 18410510 NR Description: protein kinase C inhibitor-related protein
  misc_feature (1)..(129): Homolog of NCBI NO: 23612841 NR Description: protein kinase c inhibitor-like protein, putative
MASEKEAALAATPSDSPTIFDKIISKEIPSTVVFEDDKVLAFRDITPQGPVHILLIPKVRDGLTGLSKAEERHIDILGRLLYTAKLVAKQEGLDEGFRIVINDGPQGYQSVYHIHVHLIGGRQMNWPPG

SEQ ID NO: 1133 - DNA, 714 bp, Zea mays subsp. mays
  misc_feature (1)..(714): Ceres Seq. ID no. 15178866
acctttccccgagttccgacaatggcttcagcatcagcgacagccactcttctcaagcccactcctcttccaccccataaaccgatcatcaccgcctccgtatctcctcctctccctcctccacgtcgccacaacctcctccgccgagatttgctctccttatccgccgcatcgacgctacttctaacgcaatctctcccgtttctagctccgtcgccggcatccgccgccgaggacgaagagtacgtgaaagatacgtcggcggtgatctccaaagttcggacgacgctctcgatggagaggacagatccgaatgtggcggatgcggtggcggagctgagagaagtgtcgaactcgtgggttgctaagtacaggaaggagaaagctcttctcgggaaagcgtcgttcagggatatttactcggcgttgaatgctgtgtctggacattatgtgagttttggtccgacggctccgatcccggcgaagaggaaggcgaggattcttgaagagatggagactgctgagaaagctctctctagaggaagataaatttacagtgagacctaaccatttcttcttcttcttctccagttccttgtcgatgaagttttctttttacctttaaatgcttatatgagaagagaaacttgaaattgctcgtttgtttttgtaaaatacttcatgataatttacttaattatcatttacaataac

SEQ ID NO: 1134 - protein, 182 aa, Zea mays subsp. mays
  peptide (1)..(182): Ceres Seq. ID no. 15178867
  misc_feature (47)..(181): Homolog of NCBI NO: 33866304 NR Description: possible photosystem II Psb27 protein
  misc_feature (57)..(181): Homolog of NCBI NO: 23125315 NR Description: hypothetical protein [Nostoc punctiforme]
  misc_feature (72)..(181): Homolog of NCBI NO: 17228753 NR Description: photosystem II 11 kD protein [Nostoc sp. PCC
  misc_feature (60)..(180): Homolog of NCBI NO: 22300006 NR Description: photosystem II 11 kD protein [Thermosynechococcus
  misc_feature (8)..(102): Homolog of NCBI NO: 11692876 NR Description: At1g03600 [Arabidopsis thaliana]
  misc_feature (8)..(182): Homolog of NCBI NO: 18379115 NR Description: photosystem II protein family [Arabidopsis
TFPRVPTMASASATATLLKPTPLPPHKPIITASVSPPLPPPRRHNLLRRDLLSLSAASTLLLTQSLPFLAPSPASAAEDEEYVKDTSAVISKVRTTLSMERTDPNVADAVAELREVSNSWVAKYRKEKALLGKASFRDIYSALNAVSGHYVSFGPTAPIPAKRKARILEEMETAEKALSRGR

SEQ ID NO: 1135 - protein, 175 aa, Zea mays subsp. mays
  peptide (1)..(175): Ceres Seq. ID no. 15178868
  misc_feature (40)..(174): Homolog of NCBI NO: 33866304 NR Description: possible photosystem II Psb27 protein
  misc_feature (50)..(174): Homolog of NCBI NO: 23125315 NR Description: hypothetical protein [Nostoc punctiforme]
  misc_feature (65)..(174): Homolog of NCBI NO: 17228753 NR Description: photosystem II 11 kD protein [Nostoc sp. PCC
  misc_feature (53)..(173): Homolog of NCBI NO: 22300006 NR Description: photosystem II 11 kD protein [Thermosynechococcus
  misc_feature (1)..(95): Homolog of NCBI NO: 11692876 NR Description: At1g03600 [Arabidopsis thaliana]
  misc_feature (1)..(175): Homolog of NCBI NO: 18379115 NR Description: photosystem II protein family [Arabidopsis
MASASATATLLKPTPLPPHKPIITASVSPPLPPPRRHNLLRRDLLSLSAASTLLLTQSLPFLAPSPASAAEDEEYVKDTSAVISKVRTTLSMERTDPNVADAVAELREVSNSWVAKYRKEKALLGKASFRDIYSALNAVSGHYVSFGPTAPIPAKRKARILEEMETAEKALSRGR

SEQ ID NO: 1136 - DNA, 1045 bp, Zea mays subsp. mays
  misc_feature (1)..(1045): Ceres Seq. ID no. 15176130
attttgaaaaaatcaaaactttctataatttgtttcaagtaagaagaagaaaggagaagaatcaatgaatccagattccgattaccctcacctccccaacatcaagatccaccacccttcctcccctcgccactcccaccaccactcctcctccactccctccgccgccactcccacccccaccgccggagcccgccgtaaaatcggagtcgccgttgacctctccgaagaaagcgccttcgccgtccgctgggccgtcgatcactacatccgccccggagacgccgtcgtcatcctccacgtctcccccacctccgtcctcttcggcgccgactggggccccctccctctccagtctccgcctcctccgggccaccccacccaggaggatttcgacgccttcacgtcctccaaggtctccgatctcgcgaagcccctgaaggaggcggggttccctcacaagatccagatagtgaaggaccacgacatgagggagaggctgtgtttggaaatcgagaggctgaatctgagcgcggtgatcatggggagcagagggtttggagctgagaagaagagagggagcgatgggaagcttggctctgttagtgattattgtgttcaccactgtgtttgtcctgttgttgtcgtgaggtatcctgatgatcgtgacggtcctgctgctcctggggaggtgggtggaggtacgagggaagctattgtcactgtgaaggcggggagggatgatgatggcgaggatgatgaagctcataaggctaagattgctgctgcttccgctcatcatgaacacgtcaaagatgaataatgcgccttagtatctcattggattcaccctcttgcaaggttggatgattcgctatcttttgcaatcatcaagtccctggaatctcctctgaatttattatttcttcaatgtctttttttatatattattgactcgtatgtatgattttcgcattaaaacaatgaaattgctactaacattaaaaaaaaaaaaaatccttttaggattataatcttcatagtg

SEQ ID NO: 1137 - protein, 252 aa, Zea mays subsp. mays
  peptide (1)..(252): Ceres Seq. ID no. 15176131
  misc_feature (43)..(196): Pfam Name: Universal stress protein family Pfam Description: Universal stress protein family
  misc_feature (39)..(161): Homolog of NCBI NO: 15232490 NR Description: CHP-rich zinc finger protein, putative
  misc_feature (107)..(237): Homolog of NCBI NO: 33146953 NR Description: CHP-rich zinc finger protein-like
  misc_feature (107)..(237): Homolog of NCBI NO: 28971968 NR Description: CHP-rich zinc finger protein-like
  misc_feature (17)..(216): Homolog of NCBI NO: 34910112 NR Description: B1100D10.31 [Oryza sativa (japonica
  misc_feature (30)..(237): Homolog of NCBI NO: 30682187 NR Description: expressed protein [Arabidopsis thaliana]
  misc_feature (30)..(237): Homolog of NCBI NO: 25402657 NR Description: protein T23J18.3 [imported] - Arabidopsis
  misc_feature (1)..(230): Homolog of NCBI NO: 18423628 NR Description: expressed protein [Arabidopsis thaliana]
  misc_feature (1)..(230): Homolog of NCBI NO: 8885586 NR Description: gene_id:F24B18.5~pir||T05756~similar to unknown
  misc_feature (1)..(250): Homolog of NCBI NO: 7486798 NR Description: hypothetical protein M4I22.130 - Arabidopsis
  misc_feature (1)..(252): Homolog of NCBI NO: 18416966 NR Description: expressed protein [Arabidopsis thaliana]
MNPDSDYPHLPNIKIHHPSSPRHSHHHSSSTPSAATPTPTAGARRKIGVAVDLSEESAFAVRWAVDHYIRPGDAVVILHVSPTSVLFGADWGPLPLQSPPPPGHPTQEDFDAFTSSKVSDLAKPLKEAGFPHKIQIVKDHDMRERLCLEIERLNLSAVIMGSRGFGAEKKRGSDGKLGSVSDYCVHHCVCPVVVVRYPDDRDGPAAPGEVGGGTREAIVTVKAGRDDDGEDDEAHKAKIAAASAHHEHVKDE

SEQ ID NO: 1138 - DNA, 2191 bp, Zea mays subsp. mays
  misc_feature (1)..(2191): Ceres Seq. ID no. 15179424
  misc_feature: MA Experiment ID: 108535 Result: Up-regulated in Transcription
  misc_feature: MA Experiment 108535 PARAMETER Experiment Name: Zm_Meristem_P Parameter: Age (day) Value: 8
  misc_feature: MA Experiment 108535 PARAMETER Experiment Name: Zm_Meristem_P Parameter: Organism Value: Zea mays
  misc_feature: MA Experiment 108535 PARAMETER Experiment Name: Zm_Meristem_P Parameter: Plant Line Value: 35A19
  misc_feature: MA Experiment 108535 PARAMETER Experiment Name: Zm_Meristem_P Parameter: Tissue Value: Root Meristem vs. Above Root Meristem
  misc_feature: MA Experiment ID: 108543 Result: Up-regulated in Transcription
  misc_feature: MA Experiment ID: 108556 Result: Down-regulated in Transcription
  misc_feature: MA Experiment 108556 PARAMETER Experiment Name: Zm_Drought_P Parameter: Age (day) Value: 9
  misc_feature: MA Experiment 108556 PARAMETER Experiment Name: Zm_Drought_P Parameter: Organism Value: Zea mays
  misc_feature: MA Experiment 108556 PARAMETER Experiment Name: Zm_Drought_P Parameter: Plant Line Value: 35A19
  misc_feature: MA Experiment 108556 PARAMETER Experiment Name: Zm_Drought_P Parameter: Timepoint (hr) Value: 24
  misc_feature: MA Experiment 108556 PARAMETER Experiment Name: Zm_Drought_P Parameter: Tissue Value: Aerial
  misc_feature: MA Experiment 108556 PARAMETER Experiment Name: Zm_Drought_P Parameter: Treatment Value: Drought vs. No Drought
  misc_feature: MA Experiment ID: 20000477 Result: Down-regulated in Transcription
  misc_feature: MA Experiment 20000477 PARAMETER Experiment Name: Zm_5mM_SA_P Parameter: Age (day) Value: 10
  misc_feature: MA Experiment 20000477 PARAMETER Experiment Name: Zm_5mM_SA_P Parameter: Organism Value: Zea mays
  misc_feature: MA Experiment 20000477 PARAMETER Experiment Name: Zm_5mM_SA_P Parameter: Plant Line Value: 35A19
  misc_feature: MA Experiment 20000477 PARAMETER Experiment Name: Zm_5mM_SA_P Parameter: Timepoint (hr) Value: 48
  misc_feature: MA Experiment 20000477 PARAMETER Experiment Name: Zm_5mM_SA_P Parameter: Tissue Value: Aerial
  misc_feature: MA Experiment 20000477 PARAMETER Experiment Name: Zm_5mM_SA_P Parameter: Treatment Value: 5mM SA vs. No Treatment
  misc_feature: MA Experiment ID: 20000479 Result: Down-regulated in Transcription
  misc_feature: MA Experiment 20000479 PARAMETER Experiment Name: Zm_Drought_P Parameter: Age (day) Value: 10
  misc_feature: MA Experiment 20000479 PARAMETER Experiment Name: Zm_Drought_P Parameter: Organism Value: Zea mays
  misc_feature: MA Experiment 20000479 PARAMETER Experiment Name: Zm_Drought_P Parameter: Plant Line Value: 35A19
  misc_feature: MA Experiment 20000479 PARAMETER Experiment Name: Zm_Drought_P Parameter: Timepoint (hr) Value: 48
  misc_feature: MA Experiment 20000479 PARAMETER Experiment Name: Zm_Drought_P Parameter: Tissue Value: Aerial
  misc_feature: MA Experiment 20000479 PARAMETER Experiment Name: Zm_Drought_P Parameter: Treatment Value: Drought vs. No Drought
  misc_feature: MA Experiment ID: 20000480 Result: Down-regulated in Transcription
  misc_feature: MA Experiment 20000480 PARAMETER Experiment Name: Zm_Drought_P Parameter: Age (day) Value: 11
  misc_feature: MA Experiment 20000480 PARAMETER Experiment Name: Zm_Drought_P Parameter: Organism Value: Zea mays
  misc_feature: MA Experiment 20000480 PARAMETER Experiment Name: Zm_Drought_P Parameter: Plant Line Value: 35A19
  misc_feature: MA Experiment 20000480 PARAMETER Experiment Name: Zm_Drought_P Parameter: Timepoint (hr) Value: 72
  misc_feature: MA Experiment 20000480 PARAMETER Experiment Name: Zm_Drought_P Parameter: Tissue Value: Aerial
  misc_feature: MA Experiment 20000480 PARAMETER Experiment Name: Zm_Drought_P Parameter: Treatment Value: Drought vs. No Drought
  misc_feature: MA Experiment ID: 20000487 Result: Down-regulated in Transcription
  misc_feature: MA Experiment 20000487 PARAMETER Experiment Name: Zm_50mM_NH4NO3_L_to_H_P Parameter: Organism Value: Zea mays
  misc_feature: MA Experiment 20000487 PARAMETER Experiment Name: Zm_50mM_NH4NO3_L_to_H_P Parameter: Timepoint (hr) Value: 4
  misc_feature: MA Experiment 20000487 PARAMETER Experiment Name: Zm_50mM_NH4NO3_L_to_H_P Parameter: Tissue Value: Leaves
  misc_feature: MA Experiment 20000487 PARAMETER Experiment Name: Zm_50mM_NH4NO3_L_to_H_P Parameter: Treatment Value: 50mM NH4NO3 vs. 100mM Mannitol
  misc_feature: MA Experiment ID: 20000492 Result: Up-regulated in Transcription
  misc_feature: MA Experiment 20000492 PARAMETER Experiment Name: Zm_Hybrid_Seed_Dev_P Parameter: DAP Value: 12
  misc_feature: MA Experiment 20000492 PARAMETER Experiment Name: Zm_Hybrid_Seed_Dev_P Parameter: Organism Value: Zea mays
  misc_feature: MA Experiment 20000492 PARAMETER Experiment Name: Zm_Hybrid_Seed_Dev_P Parameter: Plant Line Value: 35A19
  misc_feature: MA Experiment 20000492 PARAMETER Experiment Name: Zm_Hybrid_Seed_Dev_P Parameter: Tissue Value: Fert Kernel vs. Unfert Floret
  misc_feature: MA Experiment ID: 20000632 Result: Down-regulated in Transcription
  misc_feature: MA Experiment 20000632 PARAMETER Experiment Name: Zm_Herbicide-Treatments_P Parameter: Timepoint (hr) Value: 4
  misc_feature: MA Experiment 20000632 PARAMETER Experiment Name: Zm_Herbicide-Treatments_P Parameter: Tissue Value: Aerial
  misc_feature: MA Experiment 20000632 PARAMETER Experiment Name: Zm_Herbicide-Treatments_P Parameter: Treatment Value: Glean vs. No Treatment
gctggtgcttctacggggcctggcgatttgaattcgagtggtgcgtgtatagagcgtgagagagagaaaagagagtggctcttgcgctctgcagtccagttcttgaatccagagctgcgattcgtgctcgcctgacgccgatgggccggagcctgagcccgctgctacggcaggagctggacaacctggacaaggacgctgacagccgccgcgccgccatgaaggcgctcaagtcgtacgccagacacctggactccaagtccatcccgcacttcctcgccgaggtctccgacaccaccgcggccggcgccggcgccggcagcggcatgcccaccggcggcgagttcaccatctcgctctacgaggtgctggcgcgggtgcacggccgcaacatcgtgccgcagatcggcaacatcatggccaccatcatgtgcacgctctcctccagcgggggctccttcccgctccaccaggcctgctccaaggtggtgcccgccatcgcgcggcacggcatcgacccctccgcgcccgacggggagaaggccggcatcatcgcctccctctgcaggccgctctgcagcgcgctcatgggggggagccaggacgtcggcgccgcctccggcgcggcgctgtgcctgaaggcgctcgtcgagtccagcaactggaggttcgcgtccggggagctggtgaacgaggtctgcctcaaggtggccggggcgatgcacgacagcgcgacgcggtcgaacgcgcacatgggcctcgccatggccctggtgaagcacaacggcctgatcgcggaggcgtacgcgaggtccatcgtgcgctccgggctgcagatccttgatggggacacggcggatagcagctcccagaagcgcctctcggcgatccagatgatcaatttcttcatgaagttcgttgaccccaggtgcctgtcttcagagcttggcagggtgattgatgtgatggagcggtgccagaatgaccgcatgcctttcgtccgaggtgctgcgtttgaggcatcacagagtgcgaggaacatcgccgcgcagaagggatcaagacatgaggttggcacgagcccgatggttggctccaatttccacaagagaagggagaagagcccatgccggagcctctggggtgccaagcgcagccctgcagcctccaccatggctgctgcttctccagtccagttcagatccccggaatcgcaggttgtggattcatccatcatgaacggcagcacgctccacgactcaccggtctcagtcgggcagtcctcttgcaactttgatcagagtcggcgcacgaaccggaggttgtggagcaatgatgccgttgatgtttctctgaaggatggcttgttcattcagctttgctcaaacagcaattcctatgaagatgacttgggcgaggtctgtgacagtgaagtgactgatgctaactttgagtgtaccaacacatttgcagggtttgtgtcaccaagccacaatggttccatatcaagggacaagactcccagtcccagggcttcagacaggccgataaatattgatgacgtgaagatatactcaacaccaaggaagcttctccgattgcttcaaagctcatacgactctgactctgctagcaacatcggacagtccactgcaaagctcagaggcttgtcgtcaccagatcaggaacacaagggactagtgatctcatctgaacagatgcaatctctgcattcagacaacaagggtgatgagatgaaagatgagaacgaaaccatttatatgcagaacagcaaaggtcggactcagactctatccaatgctgatgcatcagtactttccactaccgaggctgagaacacatccatcaagacttcccctgaaattgagctcaatggggatgatgtctgtattacaagcagcatagggaagaccaggaagtatagagcaaaattcactttgtttctgagcgtgatcgtgatctttttagcaatcatcaccatgctcatcaggatagagaatgatgatgattcagcgtaccttgtccccacttaatattttgtatgcttcattgctgtctgtttaaattcctatttttattttatcactatagagtggtttgtgttttgaacaattttgcagtcatctatccatgaatgacagcaaataattaaattagaattttcatgctc

SEQ ID NO: 1139 - protein, 637 aa, Zea mays subsp. mays
  peptide (1)..(637): Ceres Seq. ID no. 15179425
  misc_feature (1)..(304): Homolog of NCBI NO: 15229201 NR Description: expressed protein [Arabidopsis thaliana]
  misc_feature (1)..(422): Homolog of NCBI NO: 25405725 NR Description: hypothetical protein F20D21.21 [imported] -
  misc_feature (1)..(422): Homolog of NCBI NO: 22330247 NR Description: hypothetical protein [Arabidopsis thaliana]
MGRSLSPLLRQELDNLDKDADSRRAAMKALKSYARHLDSKSIPHFLAEVSDTTAAGAGAGSGMPTGGEFTISLYEVLARVHGRNIVPQIGNIMATIMCTLSSSGGSFPLHQACSKVVPAIARHGIDPSAPDGEKAGIIASLCRPLCSALMGGSQDVGAASGAALCLKALVESSNWRFASGELVNEVCLKVAGAMHDSATRSNAHMGLAMALVKHNGLIAEAYARSIVRSGLQILDGDTADSSSQKRLSAIQMINFFMKFVDPRCLSSELGRVIDVMERCQNDRMPFVRGAAFEASQSARNIAAQKGSRHEVGTSPMVGSNFHKRREKSPCRSLWGAKRSPAASTMAAASPVQFRSPESQVVDSSIMNGSTLHDSPVSVGQSSCNFDQSRRTNRRLWSNDAVDVSLKDGLFIQLCSNSNSYEDDLGEVCDSEVTDANFECTNTFAGFVSPSHNGSISRDKTPSPRASDRPINIDDVKIYSTPRKLLRLLQSSYDSDSASNIGQSTAKLRGLSSPDQEHKGLVISSEQMQSLHSDNKGDEMKDENETIYMQNSKGRTQTLSNADASVLSTTEAENTSIKTSPEIELNGDDVCITSSIGKTRKYRAKFTLFLSVIVIFLAIITMLIRIENDDDSAYLVPT

SEQ ID NO: 1140 - protein, 611 aa, Zea mays subsp. mays
  peptide (1)..(611): Ceres Seq. ID no. 15179426
  misc_feature (1)..(278): Homolog of NCBI NO: 15229201 NR Description: expressed protein [Arabidopsis thaliana]
  misc_feature (1)..(396): Homolog of NCBI NO: 25405725 NR Description: hypothetical protein F20D21.21 [imported] -
  misc_feature (1)..(396): Homolog of NCBI NO: 22330247 NR Description: hypothetical protein [Arabidopsis thaliana]
MKALKSYARHLDSKSIPHFLAEVSDTTAAGAGAGSGMPTGGEFTISLYEVLARVHGRNIVPQIGNIMATIMCTLSSSGGSFPLHQACSKVVPAIARHGIDPSAPDGEKAGIIASLCRPLCSALMGGSQDVGAASGAALCLKALVESSNWRFASGELVNEVCLKVAGAMHDSATRSNAHMGLAMALVKHNGLIAEAYARSIVRSGLQILDGDTADSSSQKRLSAIQMINFFMKFVDPRCLSSELGRVIDVMERCQNDRMPFVRGAAFEASQSARNIAAQKGSRHEVGTSPMVGSNFHKRREKSPCRSLWGAKRSPAASTMAAASPVQFRSPESQVVDSSIMNGSTLHDSPVSVGQSSCNFDQSRRTNRRLWSNDAVDVSLKDGLFIQLCSNSNSYEDDLGEVCDSEVTDANFECTNTFAGFVSPSHNGSISRDKTPSPRASDRPINIDDVKIYSTPRKLLRLLQSSYDSDSASNIGQSTAKLRGLSSPDQEHKGLVISSEQMQSLHSDNKGDEMKDENETIYMQNSKGRTQTLSNADASVLSTTEAENTSIKTSPEIELNGDDVCITSSIGKTRKYRAKFTLFLSVIVIFLAIITMLIRIENDDDSAYLVPT

SEQ ID NO: 1141 - protein, 575 aa, Zea mays subsp. mays
  peptide (1)..(575): Ceres Seq. ID no. 15179427
  misc_feature (1)..(242): Homolog of NCBI NO: 15229201 NR Description: expressed protein [Arabidopsis thaliana]
  misc_feature (1)..(360): Homolog of NCBI NO: 25405725 NR Description: hypothetical protein F20D21.21 [imported] -
  misc_feature (1)..(360): Homolog of NCBI NO: 22330247 NR Description: hypothetical protein [Arabidopsis thaliana]
MPTGGEFTISLYEVLARVHGRNIVPQIGNIMATIMCTLSSSGGSFPLHQACSKVVPAIARHGIDPSAPDGEKAGIIASLCRPLCSALMGGSQDVGAASGAALCLKALVESSNWRFASGELVNEVCLKVAGAMHDSATRSNAHMGLAMALVKHNGLIAEAYARSIVRSGLQILDGDTADSSSQKRLSAIQMINFFMKFVDPRCLSSELGRVIDVMERCQNDRMPFVRGAAFEASQSARNIAAQKGSRHEVGTSPMVGSNFHKRREKSPCRSLWGAKRSPAASTMAAASPVQFRSPESQVVDSSIMNGSTLHDSPVSVGQSSCNFDQSRRTNRRLWSNDAVDVSLKDGLFIQLCSNSNSYEDDLGEVCDSEVTDANFECTNTFAGFVSPSHNGSISRDKTPSPRASDRPINIDDVKIYSTPRKLLRLLQSSYDSDSASNIGQSTAKLRGLSSPDQEHKGLVISSEQMQSLHSDNKGDEMKDENETIYMQNSKGRTQTLSNADASVLSTTEAENTSIKTSPEIELNGDDVCITSSIGKTRKYRAKFTLFLSVIVIFLAIITMLIRIENDDDSAYLVPT

SEQ ID NO: 1142 - DNA, 842 bp, Zea mays subsp. mays
  misc_feature (1)..(842): Ceres Seq. ID no. 15178836
ctgaaactcttatcttttctccagacagagcaaaacagtctcacgatggctactaccacgtcatctccgccgtgtcatatctccgtctcattcctccgtcagcttcctccttgcaccactgttcagttcttcggtttctcaccgacccagcgtaaactgggcgggttaacggtagcccggaacaatctggcgcaggattttctcggggacttcggagctcgtgacccgtacccggcggagatagcgagccagttcggagataaggtgttgggaccccaaagcacagagcacaagattctgattcctaatgcctctgttctctccctctcgcagctcgaatgctcccctgtttcgccttctcaggctcctttatcccccgatgaggccaaaacgctcctccataaggttttgggatggagtatagtggaggatgaagcgggcggtctgaaaataagatgcatgtggaaggtgagggattttgggtgcggcgttgaactcataaacaggatccataaggtggctgacgcttctggtcattacccttctctccatttggaaagtcctacccaagttagagctgaactatctacctcttccattggtgggctgagcatgaacgatttcataatggcggcaaagatagatgatatcaagacttctgatctttcctcaaggaaaagagtctgggcataacaaacgtggatttttcattacttatctcatatttgtgacatttttgtatgataacaatataatataagtgatgtattcgttggtctttatgttaagttattatatagaaactatgtattattcatcatcatattggaaatcattttagc

SEQ ID NO: 1143 - protein, 230 aa, Zea mays subsp. mays
  peptide (1)..(230): Ceres Seq. ID no. 15178837
  misc_feature (118)..(219): Pfam Name: Pterin 4 alpha carbinolamine dehydratase Pfam Description: Pterin 4 alpha carbinolamine dehydratase
  misc_feature (105)..(215): Homolog of NCBI NO: 30248108 NR Description: Pterin 4 alpha carbinolamine dehydratase
  misc_feature (109)..(217): Homolog of NCBI NO: 21673181 NR Description: pterin-4-alpha-carbinolamine dehydratase
  misc_feature (110)..(217): Homolog of NCBI NO: 32473155 NR Description: probable pterin-4-alpha-carbinolamine dehydratase
  misc_feature (105)..(228): Homolog of NCBI NO: 30690915 NR Description: expressed protein [Arabidopsis thaliana]
  misc_feature (105)..(228): Homolog of NCBI NO: 26449459 NR Description: unknown protein [Arabidopsis thaliana]
  misc_feature (16)..(230): Homolog of NCBI NO: 21617915 NR Description: unknown [Arabidopsis thaliana]
  misc_feature (16)..(230): Homolog of NCBI NO: 15241386 NR Description: expressed protein [Arabidopsis thaliana]
LKLLSFLQTEQNSLTMATTTSSPPCHISVSFLRQLPPCTTVQFFGFSPTQRKLGGLTVARNNLAQDFLGDFGARDPYPAEIASQFGDKVLGPQSTEHKILIPNASVLSLSQLECSPVSPSQAPLSPDEAKTLLHKVLGWSIVEDEAGGLKIRCMWKVRDFGCGVELINRIHKVADASGHYPSLHLESPTQVRAELSTSSIGGLSMNDFIMAAKIDDIKTSDLSSRKRVWA

SEQ ID NO: 1144 - protein, 215 aa, Zea mays subsp. mays
  peptide (1)..(215): Ceres Seq. ID no. 15178838
  misc_feature (103)..(204): Pfam Name: Pterin 4 alpha carbinolamine dehydratase Pfam Description: Pterin 4 alpha carbinolamine dehydratase
  misc_feature (90)..(200): Homolog of NCBI NO: 30248108 NR Description: Pterin 4 alpha carbinolamine dehydratase
  misc_feature (94)..(202): Homolog of NCBI NO: 21673181 NR Description: pterin-4-alpha-carbinolamine dehydratase
  misc_feature (95)..(202): Homolog of NCBI NO: 32473155 NR Description: probable pterin-4-alpha-carbinolamine dehydratase
  misc_feature (90)..(213): Homolog of NCBI NO: 30690915 NR Description: expressed protein [Arabidopsis thaliana]
  misc_feature (90)..(213): Homolog of NCBI NO: 26449459 NR Description: unknown protein [Arabidopsis thaliana]
  misc_feature (1)..(215): Homolog of NCBI NO: 21617915 NR Description: unknown [Arabidopsis thaliana]
  misc_feature (1)..(215): Homolog of NCBI NO: 15241386 NR Description: expressed protein [Arabidopsis thaliana]
MATTTSSPPCHISVSFLRQLPPCTTVQFFGFSPTQRKLGGLTVARNNLAQDFLGDFGARDPYPAEIASQFGDKVLGPQSTEHKILIPNASVLSLSQLECSPVSPSQAPLSPDEAKTLLHKVLGWSIVEDEAGGLKIRCMWKVRDFGCGVELINRIHKVADASGHYPSLHLESPTQVRAELSTSSIGGLSMNDFIMAAKIDDIKTSDLSSRKRVWA

SEQ ID NO: 1145 - DNA, 1011 bp, Zea mays subsp. mays
  misc_feature (1)..(1011): Ceres Seq. ID no. 15178847
ataaaaactaaaaattaagaaatagcgtcgaacgttctctctccctctctcaagtaacagagatccaaatagatggagaagggagagtcaacaagcacgtcttactccgacaccaacggctcaaacgaaccagatcacgacttcgaatgcaacatctgcttcgagttagctcaagaccccatcgtcactctctgcggccacctcttctgctggccttgcttgtaccgttggcttcaccaccactctcactcccaagaatgccctgtctgcaaagctctcgtccaagacgacaagctcgtccctctctacggccgcggcaagaaccagaccgaccctaggaccaaacgttaccccgggatgcggattcccaacaggccagctggtcagagacccgagacggcctctcctcctcctcagcagcctcagaacgacgcggcgagtaactttttcaactacgggattggtttgatgggtgggtttatgcccatggcgactaccaggattgggaacttcagctttggggttggtgggttgttgccttctttgtttaactttcagttccatgggtttcctgacgcggcgctctatggcaccgcgccgggttacccttttggtggttaccataacggtttccgtggagttcctggtggtaacaatgaaccgacggcgcctggtggagggcacccaagcgatgcagctctgaagaatatcctcattgtcgttggaatctgcgtgttcttcttccttttattgtgaaaacagtttgggtttttttttttattatccaggtatgatagttgcaaactctcttacttggtttgaacaatgtcttgtatatacgttacggtaatagcctgagtatgtgtctccttttcctacgtttgttttttgctatttgaagaagattacttggatcttctatacacaactctcgttttttaatcttatttgcttttgacgttgtatctgcatcttatgagaactagttggtgtggaaaataactattgcat

SEQ ID NO: 1146 - protein, 227 aa, Zea mays subsp. mays
  peptide (1)..(227): Ceres Seq. ID no. 15178848
  misc_feature (26)..(66): Pfam Name: Zinc finger, C3HC4 type (RING finger) Pfam Description: Zinc finger, C3HC4 type (RING finger)
  misc_feature (4)..(154): Homolog of NCBI NO: 31215747 NR Description: ENSANGP00000012621 [Anopheles gambiae]
  misc_feature (6)..(165): Homolog of NCBI NO: 29841097 NR Description: similar to GenBank Accession Number AJ428489
  misc_feature (1)..(201): Homolog of NCBI NO: 39581891 NR Description: Hypothetical protein CBG20152 [Caenorhabditis
  misc_feature (5)..(226): Homolog of NCBI NO: 17554742 NR Description: RiNg Finger protein (24.9 kD) (rnf-5)
  misc_feature (14)..(147): Homolog of NCBI NO: 15222064 NR Description: zinc finger (C3HC4-type RING finger) protein
  misc_feature (4)..(226): Homolog of NCBI NO: 29150403 NR Description: unknown protein [Oryza sativa (japonica
  misc_feature (4)..(227): Homolog of NCBI NO: 34909840 NR Description: P0403C05.28 [Oryza sativa (japonica
  misc_feature (9)..(227): Homolog of NCBI NO: 18394721 NR Description: zinc finger (C3HC4-type RING finger) protein
  misc_feature (1)..(226): Homolog of NCBI NO: 21553849 NR Description: putative RING zinc finger protein [Arabidopsis
  misc_feature (1)..(226): Homolog of NCBI NO: 15224062 NR Description: zinc finger (C3HC4-type RING finger) protein
MEKGESTSTSYSDTNGSNEPDHDFECNICFELAQDPIVTLCGHLFCWPCLYRWLHHHSHSQECPVCKALVQDDKLVPLYGRGKNQTDPRTKRYPGMRIPNRPAGQRPETASPPPQQPQNDAASNFFNYGIGLMGGFMPMATTRIGNFSFGVGGLLPSLFNFQFHGFPDAALYGTAPGYPFGGYHNGFRGVPGGNNEPTAPGGGHPSDAALKNILIVVGICVFFFLLL

SEQ ID NO: 1147 - protein, 132 aa, Zea mays subsp. mays
  peptide (1)..(132): Ceres Seq. ID no. 15178849
  misc_feature (1)..(59): Homolog of NCBI NO: 31215747 NR Description: ENSANGP00000012621 [Anopheles gambiae]
  misc_feature (1)..(70): Homolog of NCBI NO: 29841097 NR Description: similar to GenBank Accession Number AJ428489
  misc_feature (1)..(106): Homolog of NCBI NO: 39581891 NR Description: Hypothetical protein CBG20152 [Caenorhabditis
  misc_feature (1)..(131): Homolog of NCBI NO: 17554742 NR Description: RiNg Finger protein (24.9 kD) (rnf-5)
  misc_feature (1)..(52): Homolog of NCBI NO: 15222064 NR Description: zinc finger (C3HC4-type RING finger) protein
  misc_feature (1)..(131): Homolog of NCBI NO: 29150403 NR Description: unknown protein [Oryza sativa (japonica
  misc_feature (1)..(132): Homolog of NCBI NO: 34909840 NR Description: P0403C05.28 [Oryza sativa (japonica
  misc_feature (1)..(132): Homolog of NCBI NO: 18394721 NR Description: zinc finger (C3HC4-type RING finger) protein
  misc_feature (1)..(131): Homolog of NCBI NO: 21553849 NR Description: putative RING zinc finger protein [Arabidopsis
  misc_feature (1)..(131): Homolog of NCBI NO: 15224062 NR Description: zinc finger (C3HC4-type RING finger) protein
MRIPNRPAGQRPETASPPPQQPQNDAASNFFNYGIGLMGGFMPMATTRIGNFSFGVGGLLPSLFNFQFHGFPDAALYGTAPGYPFGGYHNGFRGVPGGNNEPTAPGGGHPSDAALKNILIVVGICVFFFLLL

SEQ ID NO: 1148 - DNA, 1445 bp, Zea mays subsp. mays
  misc_feature (1)..(1445): Ceres Seq. ID no. 15176709
ctctcttcgctcagctcccacaagaaagggcgaagaatctctccctcctccttgaccttctcttcgccatcgattccctttgaggtgcaaaaatggttgaacagactcagcaacaaccctcgattctccagaaggcttcttctggccagctcatgcgctccggggtttctcaggacatccatggctacgcatctggtttccagaggcgtgcgacctacggaaactactcgaacgctgcgtttcagtaccctctcgcggcctcttccaggattgtggcgactactactacttctcctgtttttgtgcaagctccaagtgagaaaggattctctagcttcgctattgatttcttgatgggtggtgtttccgctgctgtctctaagaccgcggctgctccaattgagcgtgtgaagcttttgattcagaaccaggatgagatgcttaaggctggtaggttatctgagccttacaagggtattggtgattgtttcggaaggactattaaggatgaagggtttggttctttgtggagaggaaacactgctaacgttatccgttacttccccactcaggcattgaactttgcgttcaaagattacttcaagaggcttttcaactttaagaaggacagggatggttactggaagtggtttgctggtaacttgggatctggaggtgctgctggtgcatcttcccttctcttcgtgtactctcttgactatgcacgtacccgtctcgccaacgactccaaggcagccaagaagggaggtgaaaggcagttcaatggtcttgttgatgtctacaagaagactctcaagtccgatggtatcgctggactttaccgtggattcaacatctcctgtgttggtatcattgtctaccgtggtctctactttggtctgtatgactctttgaagcctctcctccccgctgacctccaggacagtttcttcgcttcctttgcccttggatggctcatcaccaacggtgctggtcttgcatcgtacccaatcgacacagtccgtagaagaatgatgatgacctccggtgaagccgtcaagtacaagagctccatggatgcattccaacagatcctgaagaaggaaggacccaagtctctgttcaagggtgctggtgccaacatcctccgtgctattgcaggtgctggtgtgctctctggatacgacaagctccagttacttcttctcggaaagaagtacggatctggatccggctaagcaatactaatccaccaaacagttaaaaagcttcggctttatttttatttttctcgatttaatttgcagttttttcagactttttttaaaaaaggtcaagatgttgatgaaatcttttgctataaaaactagagaggaggcaaggggaatttttcttattgaataaattttgtatggggatggagtttgacttcctcctttgaaccc

SEQ ID NO: 1149 - protein, 381 aa, Zea mays subsp. mays
  peptide (1)..(381): Ceres Seq. ID no. 15176710
  misc_feature (1)..(379): Homolog of NCBI NO: 2780194 NR Description: adenine nucleotide translocator [Lupinus albus]
  misc_feature (7)..(379): Homolog of NCBI NO: 100424 NR Description: ADP,ATP carrier protein precursor - potato
  misc_feature (7)..(379): Homolog of NCBI NO: 1890116 NR Description: ADP/ATP translocator [Lycopersicon esculentum]
  misc_feature (7)..(379): Homolog of NCBI NO: 113457 NR Description: ADP,ATP carrier protein, mitochondrial precursor
  misc_feature (7)..(379): Homolog of NCBI NO: 3334115 NR Description: ADP,ATP carrier protein 1, mitochondrial (ADP/ATP translocase 1) (Adenine nucleotide translocator 1) (ANT
  misc_feature (7)..(379): Homolog of NCBI NO: 99658 NR Description: ADP,ATP carrier protein - Arabidopsis thaliana
  misc_feature (1)..(379): Homolog of NCBI NO: 15231937 NR Description: mitochondrial ADP,ATP carrier protein 1
  misc_feature (1)..(379): Homolog of NCBI NO: 15240640 NR Description: mitochondrial ADP,ATP carrier protein 2
  misc_feature (1)..(379): Homolog of NCBI NO: 478810 NR Description: ADP,ATP carrier protein - Arabidopsis thaliana
  misc_feature (1)..(379): Homolog of NCBI NO: 444790 NR Description: nucleotide translocator
MVEQTQQQPSILQKASSGQLMRSGVSQDIHGYASGFQRRATYGNYSNAAFQYPLAASSRIVATTTTSPVFVQAPSEKGFSSFAIDFLMGGVSAAVSKTAAAPIERVKLLIQNQDEMLKAGRLSEPYKGIGDCFGRTIKDEGFGSLWRGNTANVIRYFPTQALNFAFKDYFKRLFNFKKDRDGYWKWFAGNLGSGGAAGASSLLFVYSLDYARTRLANDSKAAKKGGERQFNGLVDVYKKTLKSDGIAGLYRGFNISCVGIIVYRGLYFGLYDSLKPLLPADLQDSFFASFALGWLITNGAGLASYPIDTVRRRMMMTSGEAVKYKSSMDAFQQILKKEGPKSLFKGAGANILRAIAGAGVLSGYDKLQLLLLGKKYGSGSG

SEQ ID NO: 1150 - protein, 361 aa, Zea mays subsp. mays
  peptide (1)..(361): Ceres Seq. ID no. 15176711
  misc_feature (1)..(359): Homolog of NCBI NO: 15240640 NR Description: mitochondrial ADP,ATP carrier protein 2
  misc_feature (1)..(359): Homolog of NCBI NO: 478810 NR Description: ADP,ATP carrier protein - Arabidopsis thaliana
  misc_feature (1)..(359): Homolog of NCBI NO: 444790 NR Description: nucleotide translocator
  misc_feature (1)..(359): Homolog of NCBI NO: 2780194 NR Description: adenine nucleotide translocator [Lupinus albus]
  misc_feature (1)..(359): Homolog of NCBI NO: 100424 NR Description: ADP,ATP carrier protein precursor - potato
  misc_feature (1)..(359): Homolog of NCBI NO: 1890116 NR Description: ADP/ATP translocator [Lycopersicon esculentum]
  misc_feature (1)..(359): Homolog of NCBI NO: 113457 NR Description: ADP,ATP carrier protein, mitochondrial precursor
  misc_feature (1)..(359): Homolog of NCBI NO: 3334115 NR Description: ADP,ATP carrier protein 1, mitochondrial (ADP/ATP translocase 1) (Adenine nucleotide translocator 1) (ANT
  misc_feature (1)..(359): Homolog of NCBI NO: 99658 NR Description: ADP,ATP carrier protein - Arabidopsis thaliana
  misc_feature (1)..(359): Homolog of NCBI NO: 15231937 NR Description: mitochondrial ADP,ATP carrier protein 1
MRSGVSQDIHGYASGFQRRATYGNYSNAAFQYPLAASSRIVATTTTSPVFVQAPSEKGFSSFAIDFLMGGVSAAVSKTAAAPIERVKLLIQNQDEMLKAGRLSEPYKGIGDCFGRTIKDEGFGSLWRGNTANVIRYFPTQALNFAFKDYFKRLFNFKKDRDGYWKWFAGNLGSGGAAGASSLLFVYSLDYARTRLANDSKAAKKGGERQFNGLVDVYKKTLKSDGIAGLYRGFNISCVGIIVYRGLYFGLYDSLKPLLPADLQDSFFASFALGWLITNGAGLASYPIDTVRRRMMMTSGEAVKYKSSMDAFQQILKKEGPKSLFKGAGANILRAIAGAGVLSGYDKLQLLLLGKKYGSGSG

SEQ ID NO: 1151 - protein, 294 aa, Zea mays subsp. mays
  peptide (1)..(294): Ceres Seq. ID no. 15176712
  misc_feature (1)..(292): Homolog of NCBI NO: 2780194 NR Description: adenine nucleotide translocator [Lupinus albus]
  misc_feature (1)..(292): Homolog of NCBI NO: 100424 NR Description: ADP,ATP carrier protein precursor - potato
  misc_feature (1)..(292): Homolog of NCBI NO: 1890116 NR Description: ADP/ATP translocator [Lycopersicon esculentum]
  misc_feature (1)..(292): Homolog of NCBI NO: 113457 NR Description: ADP,ATP carrier protein, mitochondrial precursor
  misc_feature (1)..(292): Homolog of NCBI NO: 3334115 NR Description: ADP,ATP carrier protein 1, mitochondrial (ADP/ATP translocase 1) (Adenine nucleotide translocator 1) (ANT
  misc_feature (1)..(292): Homolog of NCBI NO: 99658 NR Description: ADP,ATP carrier protein - Arabidopsis thaliana
  misc_feature (1)..(292): Homolog of NCBI NO: 15231937 NR Description: mitochondrial ADP,ATP carrier protein 1
  misc_feature (1)..(292): Homolog of NCBI NO: 15240640 NR Description: mitochondrial ADP,ATP carrier protein 2
  misc_feature (1)..(292): Homolog of NCBI NO: 478810 NR Description: ADP,ATP carrier protein - Arabidopsis thaliana
  misc_feature (1)..(292): Homolog of NCBI NO: 444790 NR Description: nucleotide translocator
MGGVSAAVSKTAAAPIERVKLLIQNQDEMLKAGRLSEPYKGIGDCFGRTIKDEGFGSLWRGNTANVIRYFPTQALNFAFKDYFKRLFNFKKDRDGYWKWFAGNLGSGGAAGASSLLFVYSLDYARTRLANDSKAAKKGGERQFNGLVDVYKKTLKSDGIAGLYRGFNISCVGIIVYRGLYFGLYDSLKPLLPADLQDSFFASFALGWLITNGAGLASYPIDTVRRRMMMTSGEAVKYKSSMDAFQQILKKEGPKSLFKGAGANILRAIAGAGVLSGYDKLQLLLLGKKYGSGSG

SEQ ID NO: 1152 - DNA, 1062 bp, Zea mays subsp. mays
  misc_feature (1)..(1062): Ceres Seq. ID no. 15178797
attcaaaacaaaacaccatacaacatggatcataagacaaacacgacactgcttttctcgctcttgttttccatcacgtacctcatcaccatcgcgacatcgaaagatctatgtaaccaaaacgacaaaaacaccctccttaaaatcaagaagtccctaaacaacccttaccacctcgcctcgtggcacccggaaaccgactgctgctcctggtactgcctcgaatgcggcgacgccaccgttaaccaccgcgtcatctccctaaccatattcgccggtcagatatccggtcagattccgcctgaagtgggtgacttaccgtatcttcagaatcttatgttccacaggatcactaacatcaccggtcagatcccatccaccatcaccaagcttaagtatctccgttctctcatgcttagctggttgaacctcaccggcccggttcctgatttccttagtcagctcatgaatcttgaatacttaagccttgccttcaatcagctctctggttccatacctagctctctcgctttgttacctaaactttcgtacattgatgttagtaggaataaacttacaggtacaatacctgaatcatttggatcgtttccagcagaagttcctcaccttatcttttcacacaatcagctctccggttctatacccaaatcactaggcaaccttgattttaaccggatagatttctcaaggaacaagctcacaggcgatgcttcgatgttgtttggagccaacaaaacgacgttttccattgacttatcaagaaacatgttccagtttgatctgtccagagttgtgctccatgagtcacttggtgtactggacttgaaccacaatgggatcacagggagtattccggttcagtggactgaatattctctccaaatcttaaatgttagctataacagactgtgtggacccatccccactggaggaagtcttcagagatttgattcttatacatattttcataacaagtgtttatgtggtgcacctcttgatagtagttgcaagtaataaaccaagcttatctctagttttccc

SEQ ID NO: 1153 - protein, 344 aa, Zea mays subsp. mays
  peptide (1)..(344): Ceres Seq. ID no. 15178798
  misc_feature (13)..(344): Homolog of NCBI NO: 18148376 NR Description: polygalacturonase-inhibitor protein [Citrus sp.
  misc_feature (13)..(344): Homolog of NCBI NO: 18148925 NR Description: polygalacturonase-inhibitor protein [Citrus sp.
  misc_feature (50)..(341): Homolog of NCBI NO: 22324853 NR Description: polygalacturonase inhibitory protein [Brassica
  misc_feature (15)..(341): Homolog of NCBI NO: 22256016 NR Description: polygalacturonase inhibitor protein [Brassica
  misc_feature (9)..(344): Homolog of NCBI NO: 22324851 NR Description: polygalacturonase inhibitory protein [Brassica
  misc_feature (18)..(344): Homolog of NCBI NO: 7800201 NR Description: polygalacturonase inhibiting protein 2; PGIP2
  misc_feature (9)..(344): Homolog of NCBI NO: 15240183 NR Description: polygalacturonase inhibiting protein (PGIP2)
  misc_feature (16)..(344): Homolog of NCBI NO: 15240182 NR Description: polygalacturonase inhibiting protein (PGIP1)
  misc_feature (9)..(344): Homolog of NCBI NO: 21593869 NR Description: polygalacturonase inhibiting protein 1
  misc_feature (9)..(344): Homolog of NCBI NO: 26094811 NR Description: polygalacturonase inhibitor protein [Brassica
IQNKTPYNMDHKTNTTLLFSLLFSITYLITIATSKDLCNQNDKNTLLKIKKSLNNPYHLASWHPETDCCSWYCLECGDATVNHRVISLTIFAGQISGQIPPEVGDLPYLQNLMFHRITNITGQIPSTITKLKYLRSLMLSWLNLTGPVPDFLSQLMNLEYLSLAFNQLSGSIPSSLALLPKLSYIDVSRNKLTGTIPESFGSFPAEVPHLIFSHNQLSGSIPKSLGNLDFNRIDFSRNKLTGDASMLFGANKTTFSIDLSRNMFQFDLSRVVLHESLGVLDLNHNGITGSIPVQWTEYSLQILNVSYNRLCGPIPTGGSLQRFDSYTYFHNKCLCGAPLDSSCK

SEQ ID NO: 1154 - protein, 336 aa, Zea mays subsp. mays
  peptide (1)..(336): Ceres Seq. ID no. 15178799
  misc_feature (5)..(336): Homolog of NCBI NO: 18148376 NR Description: polygalacturonase-inhibitor protein [Citrus sp.
  misc_feature (5)..(336): Homolog of NCBI NO: 18148925 NR Description: polygalacturonase-inhibitor protein [Citrus sp.
  misc_feature (42)..(333): Homolog of NCBI NO: 22324853 NR Description: polygalacturonase inhibitory protein [Brassica
  misc_feature (7)..(333): Homolog of NCBI NO: 22256016 NR Description: polygalacturonase inhibitor protein [Brassica
  misc_feature (1)..(336): Homolog of NCBI NO: 22324851 NR Description: polygalacturonase inhibitory protein [Brassica
  misc_feature (10)..(336): Homolog of NCBI NO: 7800201 NR Description: polygalacturonase inhibiting protein 2; PGIP2
  misc_feature (1)..(336): Homolog of NCBI NO: 15240183 NR Description: polygalacturonase inhibiting protein (PGIP2)
  misc_feature (8)..(336): Homolog of NCBI NO: 15240182 NR Description: polygalacturonase inhibiting protein (PGIP1)
  misc_feature (1)..(336): Homolog of NCBI NO: 21593869 NR Description: polygalacturonase inhibiting protein 1
  misc_feature (1)..(336): Homolog of NCBI NO: 26094811 NR Description: polygalacturonase inhibitor protein [Brassica
MDHKTNTTLLFSLLFSITYLITIATSKDLCNQNDKNTLLKIKKSLNNPYHLASWHPETDCCSWYCLECGDATVNHRVISLTIFAGQISGQIPPEVGDLPYLQNLMFHRITNITGQIPSTITKLKYLRSLMLSWLNLTGPVPDFLSQLMNLEYLSLAFNQLSGSIPSSLALLPKLSYIDVSRNKLTGTIPESFGSFPAEVPHLIFSHNQLSGSIPKSLGNLDFNRIDFSRNKLTGDASMLFGANKTTFSIDLSRNMFQFDLSRVVLHESLGVLDLNHNGITGSIPVQWTEYSLQILNVSYNRLCGPIPTGGSLQRFDSYTYFHNKCLCGAPLDSSCK

SEQ ID NO: 1155 - protein, 232 aa, Zea mays subsp. mays
  peptide (1)..(232): Ceres Seq. ID no. 15178800
  misc_feature (1)..(232): Homolog of NCBI NO: 18148376 NR Description: polygalacturonase-inhibitor protein [Citrus sp.
  misc_feature (1)..(232): Homolog of NCBI NO: 18148925 NR Description: polygalacturonase-inhibitor protein [Citrus sp.
  misc_feature (1)..(229): Homolog of NCBI NO: 22324853 NR Description: polygalacturonase inhibitory protein [Brassica
  misc_feature (1)..(229): Homolog of NCBI NO: 22256016 NR Description: polygalacturonase inhibitor protein [Brassica
  misc_feature (1)..(232): Homolog of NCBI NO: 22324851 NR Description: polygalacturonase inhibitory protein [Brassica
  misc_feature (1)..(232): Homolog of NCBI NO: 7800201 NR Description: polygalacturonase inhibiting protein 2; PGIP2
  misc_feature (1)..(232): Homolog of NCBI NO: 15240183 NR Description: polygalacturonase inhibiting protein (PGIP2)
  misc_feature (1)..(232): Homolog of NCBI NO: 15240182 NR Description: polygalacturonase inhibiting protein (PGIP1)
  misc_feature (1)..(232): Homolog of NCBI NO: 21593869 NR Description: polygalacturonase inhibiting protein 1
  misc_feature (1)..(232): Homolog of NCBI NO: 26094811 NR Description: polygalacturonase inhibitor protein [Brassica
MFHRITNITGQIPSTITKLKYLRSLMLSWLNLTGPVPDFLSQLMNLEYLSLAFNQLSGSIPSSLALLPKLSYIDVSRNKLTGTIPESFGSFPAEVPHLIFSHNQLSGSIPKSLGNLDFNRIDFSRNKLTGDASMLFGANKTTFSIDLSRNMFQFDLSRVVLHESLGVLDLNHNGITGSIPVQWTEYSLQILNVSYNRLCGPIPTGGSLQRFDSYTYFHNKCLCGAPLDSSCK

SEQ ID NO: 1156 - DNA, 881 bp, Zea mays subsp. mays
  misc_feature (1)..(881): Ceres Seq. ID no. 15178112
acaccttgtttgactcaacaacgactcgtctaaccctttagcagcagccatgacaactcctccttgccggaccataaacgctaataatgctatcgccgcgccatcgccttcgggaatgatcttccacggtaagaggctcgtgaaatcaagctcacctggcttgaatctcccgacgaagagattggcttggagcttaagttctccggggaggtttctctcttctccagtggcctctagttctacatcggcggctgtgacatcgaattctacgaatcgactggaagctttagaagaagggattgagaaggtcatttatcaatgtagattcatggcgtttcttggaactttaggatctcttttgggatcggttctgtgtttcatcaagggatgtcagtacgtcggagactcgtttgtgcagtactctgtgaaccgtgggaaggtgatattacttctggtagaagccatagatacataccttctaggaactgtgatgttagtcttcgggatgggcctttacgagctcttcattagcaacctcacaacttcggaaaccatttcacacgacagtgtttccaatagatcgagtctctttggcatgttccccttaaaggagcgacctcaatggttagaggtgaaaacagttagtgagctgaaaacgaagctgggacatgttatagtgatgctactgttgattggtttgttcgacaagagcaggaaagttgccatcacttctgtcgcggatttgctatgtatctctgcttctatctttctttcttcggcttgtctcttcttgctctctaggctcaatggctcacactgagttaatcctgttgccttttttaaacacatgacactttgtattatgtgtataatgttttagt

SEQ ID NO: 1157 - protein, 256 aa, Zea mays subsp. mays
  peptide (1)..(256): Ceres Seq. ID no. 15178113
  misc_feature (81)..(253): Homolog of NCBI NO: 31126772 NR Description: unknown protein [Oryza sativa (japonica
  misc_feature (79)..(253): Homolog of NCBI NO: 34395260 NR Description: unknown protein [Oryza sativa (japonica
  misc_feature (20)..(253): Homolog of NCBI NO: 20465418 NR Description: unknown protein [Arabidopsis thaliana]
  misc_feature (20)..(253): Homolog of NCBI NO: 15240692 NR Description: expressed protein [Arabidopsis thaliana]
  misc_feature (60)..(253): Homolog of NCBI NO: 34899026 NR Description: contains ESTs
  misc_feature (28)..(256): Homolog of NCBI NO: 7487716 NR Description: hypothetical protein T5K18.170 - Arabidopsis
  misc_feature (28)..(256): Homolog of NCBI NO: 15810053 NR Description: AT4g19390/T5K18_170 [Arabidopsis thaliana]
  misc_feature (28)..(256): Homolog of NCBI NO: 18415304 NR Description: expressed protein [Arabidopsis thaliana]
MTTPPCRTINANNAIAAPSPSGMIFHGKRLVKSSSPGLNLPTKRLAWSLSSPGRFLSSPVASSSTSAAVTSNSTNRLEALEEGIEKVIYQCRFMAFLGTLGSLLGSVLCFIKGCQYVGDSFVQYSVNRGKVILLLVEAIDTYLLGTVMLVFGMGLYELFISNLTTSETISHDSVSNRSSLFGMFPLKERPQWLEVKTVSELKTKLGHVIVMLLLIGLFDKSRKVAITSVADLLCISASIFLSSACLFLLSRLNGSH

SEQ ID NO: 1158 - protein, 234 aa, Zea mays subsp. mays
  peptide (1)..(234): Ceres Seq. ID no. 15178114
  misc_feature (59)..(231): Homolog of NCBI NO: 31126772 NR Description: unknown protein [Oryza sativa (japonica
  misc_feature (57)..(231): Homolog of NCBI NO: 34395260 NR Description: unknown protein [Oryza sativa (japonica
  misc_feature (1)..(231): Homolog of NCBI NO: 20465418 NR Description: unknown protein [Arabidopsis thaliana]
  misc_feature (1)..(231): Homolog of NCBI NO: 15240692 NR Description: expressed protein [Arabidopsis thaliana]
  misc_feature (38)..(231): Homolog of NCBI NO: 34899026 NR Description: contains ESTs
  misc_feature (6)..(234): Homolog of NCBI NO: 7487716 NR Description: hypothetical protein T5K18.170 - Arabidopsis
  misc_feature (6)..(234): Homolog of NCBI NO: 15810053 NR Description: AT4g19390/T5K18_170 [Arabidopsis thaliana]
  misc_feature (6)..(234): Homolog of NCBI NO: 18415304 NR Description: expressed protein [Arabidopsis thaliana]
MIFHGKRLVKSSSPGLNLPTKRLAWSLSSPGRFLSSPVASSSTSAAVTSNSTNRLEALEEGIEKVIYQCRFMAFLGTLGSLLGSVLCFIKGCQYVGDSFVQYSVNRGKVILLLVEAIDTYLLGTVMLVFGMGLYELFISNLTTSETISHDSVSNRSSLFGMFPLKERPQWLEVKTVSELKTKLGHVIVMLLLIGLFDKSRKVAITSVADLLCISASIFLSSACLFLLSRLNGSH

SEQ ID NO: 1159 - protein, 163 aa, Zea mays subsp. mays
  peptide (1)..(163): Ceres Seq. ID no. 15178115
  misc_feature (1)..(160): Homolog of NCBI NO: 31126772 NR Description: unknown protein [Oryza sativa (japonica
  misc_feature (1)..(160): Homolog of NCBI NO: 34395260 NR Description: unknown protein [Oryza sativa (japonica
  misc_feature (1)..(160): Homolog of NCBI NO: 20465418 NR Description: unknown protein [Arabidopsis thaliana]
  misc_feature (1)..(160): Homolog of NCBI NO: 15240692 NR Description: expressed protein [Arabidopsis thaliana]
  misc_feature (1)..(160): Homolog of NCBI NO: 34899026 NR Description: contains ESTs
  misc_feature (1)..(163): Homolog of NCBI NO: 7487716 NR Description: hypothetical protein T5K18.170 - Arabidopsis
  misc_feature (1)..(163): Homolog of NCBI NO: 15810053 NR Description: AT4g19390/T5K18_170 [Arabidopsis thaliana]
  misc_feature (1)..(163): Homolog of NCBI NO: 18415304 NR Description: expressed protein [Arabidopsis thaliana]
MAFLGTLGSLLGSVLCFIKGCQYVGDSFVQYSVNRGKVILLLVEAIDTYLLGTVMLVFGMGLYELFISNLTTSETISHDSVSNRSSLFGMFPLKERPQWLEVKTVSELKTKLGHVIVMLLLIGLFDKSRKVAITSVADLLCISASIFLSSACLFLLSRLNGSH

SEQ ID NO: 1160 - DNA, 1081 bp, Zea mays subsp. mays
  misc_feature (1)..(1081): Ceres Seq. ID no. 15176822
aaaagcagcaagcttcatcatctccctctctctgtccgatctaatcgatccctcaatcactcaacgaagtctcatctttcgatctaatcgacaccccttttcgataatctcattgagatgagctctgaagcgtcggcggctggagacggcggcgaaacgagcggtgggccagcacccgcatacgacaaacagaaggagaaggcgcgcgtgagcaggacgtctctgatcctgtggcacgcgcaccagaacgacgcagccgcagtccggaagctcctggaggaagatccgtctctggttcacgccagagactacgacaagcgaacgcctctccacgtggcgtcgcttcacgggtggatcgacgtcgtcaaatgtctgatcgagtttggtgctgatgtcaacgctcaggacaggtggaagaacacgcctctggctgatgcagaaggtgctaggaagcagaaaatgatcgagctattgaaatctcatggcggtttatcttatggtcaaaacggaagtcactttgaaccaaagcctgtgccaccaccaattccaaagaagtgtgactgggagattgaacctgctgagcttgatttctctaacgccgccatgattgggaagggttcatttggtgagattgtgaaagcttattggagaggaacaccagtagctgtcaaacgtattcttccttctctctcagatgatagacttgttattcaggacttcaggcatgaggttgatttgctagttaagcttcgccattcgaatatagtgcagttcttaggagccgtaaccgaaagaaagccacttatgttaatcacagagtacttacgcgggggagatcttcaccaatacctcaaggagaagggaggtcttactccagcaactgctgtcaactttgccttggatatcgctaggtactttcaatctttttaacagtttgagatattatgtgaaaacttatacatggcctgactgagtgaatctattctattaaaacagcagtgtgacccattgataaaagtagagtccaattattatttttccaaaaaactgattattttataactgcttatattaaataact

SEQ ID NO: 1161 - protein, 270 aa, Zea mays subsp. mays
  peptide (1)..(270): Ceres Seq. ID no. 15176823
  misc_feature (158)..(265): Pfam Name: Protein kinase domain Pfam Description: Protein kinase domain
  misc_feature (34)..(265): Homolog of NCBI NO: 15232181 NR Description: hypothetical protein [Arabidopsis thaliana]
  misc_feature (37)..(265): Homolog of NCBI NO: 18415205 NR Description: protein kinase - like protein [Arabidopsis
  misc_feature (37)..(265): Homolog of NCBI NO: 7488240 NR Description: protein kinase homolog F13C5.120 - Arabidopsis
  misc_feature (34)..(265): Homolog of NCBI NO: 18411024 NR Description: expressed protein [Arabidopsis thaliana]
  misc_feature (34)..(265): Homolog of NCBI NO: 11358145 NR Description: hypothetical protein T20N10.110 - Arabidopsis
  misc_feature (9)..(265): Homolog of NCBI NO: 33146898 NR Description: putative ankyrin-kinase [Oryza sativa (japonica
  misc_feature (9)..(265): Homolog of NCBI NO: 34913284 NR Description: putative protein kinase [Oryza sativa (japonica
  misc_feature (1)..(265): Homolog of NCBI NO: 8778397 NR Description: F16A14.22 [Arabidopsis thaliana]
  misc_feature (1)..(265): Homolog of NCBI NO: 18700097 NR Description: At1g14000/F7A19_9 [Arabidopsis thaliana]
  misc_feature (1)..(265): Homolog of NCBI NO: 15223025 NR Description: protein kinase -related [Arabidopsis thaliana]
MSSEASAAGDGGETSGGPAPAYDKQKEKARVSRTSLILWHAHQNDAAAVRKLLEEDPSLVHARDYDKRTPLHVASLHGWIDVVKCLIEFGADVNAQDRWKNTPLADAEGARKQKMIELLKSHGGLSYGQNGSHFEPKPVPPPIPKKCDWEIEPAELDFSNAAMIGKGSFGEIVKAYWRGTPVAVKRILPSLSDDRLVIQDFRHEVDLLVKLRHSNIVQFLGAVTERKPLMLITEYLRGGDLHQYLKEKGGLTPATAVNFALDIARYFQSF

SEQ ID NO: 1162 - protein, 156 aa, Zea mays subsp. mays
  peptide (1)..(156): Ceres Seq. ID no. 15176824
  misc_feature (44)..(151): Pfam Name: Protein kinase domain Pfam Description: Protein kinase domain
  misc_feature (1)..(151): Homolog of NCBI NO: 15232181 NR Description: hypothetical protein [Arabidopsis thaliana]
  misc_feature (1)..(151): Homolog of NCBI NO: 18415205 NR Description: protein kinase - like protein [Arabidopsis
  misc_feature (1)..(151): Homolog of NCBI NO: 7488240 NR Description: protein kinase homolog F13C5.120 - Arabidopsis
  misc_feature (1)..(151): Homolog of NCBI NO: 18411024 NR Description: expressed protein [Arabidopsis thaliana]
  misc_feature (1)..(151): Homolog of NCBI NO: 11358145 NR Description: hypothetical protein T20N10.110 - Arabidopsis
  misc_feature (1)..(151): Homolog of NCBI NO: 33146898 NR Description: putative ankyrin-kinase [Oryza sativa (japonica
  misc_feature (1)..(151): Homolog of NCBI NO: 34913284 NR Description: putative protein kinase [Oryza sativa (japonica
  misc_feature (1)..(151): Homolog of NCBI NO: 8778397 NR Description: F16A14.22 [Arabidopsis thaliana]
  misc_feature (1)..(151): Homolog of NCBI NO: 18700097 NR Description: At1g14000/F7A19_9 [Arabidopsis thaliana]
  misc_feature (1)..(151): Homolog of NCBI NO: 15223025 NR Description: protein kinase -related [Arabidopsis thaliana]
MIELLKSHGGLSYGQNGSHFEPKPVPPPIPKKCDWEIEPAELDFSNAAMIGKGSFGEIVKAYWRGTPVAVKRILPSLSDDRLVIQDFRHEVDLLVKLRHSNIVQFLGAVTERKPLMLITEYLRGGDLHQYLKEKGGLTPATAVNFALDIARYFQSF

SEQ ID NO: 1163 - DNA, 1217 bp, Zea mays subsp. mays
  misc_feature (1)..(1217): Ceres Seq. ID no. 15178142
ccctccccgctcaccaccagtcaccaacgcccaccgggcctcgtccctcgtggcggcaactgggcggccgtcgctgccgccctacgccaggtgccgaggcgaccttcaggcccttggctggcgacgagcaccagtgcaccaccaatactctgagcctggctgccgaaagtgccttttggggttcttgtaatcttgttacattaggattcatttttgatgacttcatcaagaagcaagagcaagagcagaagtaggagccgcagtcgcagcaggagcaggagccgcagtcctcggcgaagagataggttgcgcagtgaacgtgcaccccaccgcagtcgtagccggagccgcagcccataccgtcgcagagaacgacgtggtcacagggattttgcatgcaagaactgccggagacctgggcacttcgctaaggagtgtccatctgcacctatgtgcaataactgtaaccttccaggccactttgcagcagaatgcaccttacaaactgtttgctggaactgcaaagagtctgggcacattgccagtgagtgcaagaacgaggccctatgccacgcctgcaacaagacaggtcacttggcacgtgactgccctacttcaggtgctaacgtcaagctatgcaacaaatgctttaaatcaggccacatcgccgttgactgcaccaacgaacgggcctgcaacaactgccgtcagccagggcacatagctcgggagtgcaagaacgacccggtctgcaacctgtgcaatgtctccggccacgtcgcgcgcgtctgcccaaagacgactctggcttcagtgatacagggcggcccgttccgagatatcctgtgccgcatctgcggtcagccggggcacatcagccgcaactgcatggcgaccatcatctgcgacacatgcggtgggagggggcacatgtcttatgagtgcccatcggcaagaatattcgggctccgcaggctctgaagatcttttcgccaagggctccgctttgttctgatggctgagtttcgccaggatgtttcatttgtttctgacagtattggaacagttttccttctgccgttgtagttgaggaatgattctgtaggatgtgttgcgggtgaaaactccttttttcccccttttaatcaggatagccctttgtgggctcaaacattgctgtaacggctcgtgtgaaaattgccaggtcatgatttaac

SEQ ID NO: 1164 - protein, 254 aa, Zea mays subsp. mays
  peptide (1)..(254): Ceres Seq. ID no. 15178143
  misc_feature (5)..(54): Pfam Name: Protamine P1 Pfam Description: Protamine P1
  misc_feature (60)..(246): Homolog of NCBI NO: 729704 NR Description: DNA-binding protein HEXBP (Hexamer-binding
  misc_feature (96)..(246): Homolog of NCBI NO: 6324074 NR Description: GIG3 suppressor; Gis2p [Saccharomyces cerevisiae]
  misc_feature (98)..(254): Homolog of NCBI NO: 37536582 NR Description: putative zinc finger protein
  misc_feature (55)..(113): Homolog of NCBI NO: 32421763 NR Description: hypothetical protein [Neurospora crassa]
  misc_feature (99)..(245): Homolog of NCBI NO: 32421763 NR Description: hypothetical protein [Neurospora crassa]
  misc_feature (60)..(194): Homolog of NCBI NO: 6324074 NR Description: GIG3 suppressor; Gis2p [Saccharomyces cerevisiae]
  misc_feature (24)..(253): Homolog of NCBI NO: 25404984 NR Description: protein F10A5.22 [imported] - Arabidopsis
  misc_feature (22)..(248): Homolog of NCBI NO: 37536582 NR Description: putative zinc finger protein
  misc_feature (6)..(253): Homolog of NCBI NO: 21537255 NR Description: DNA-binding protein [Arabidopsis thaliana]
  misc_feature (3)..(253): Homolog of NCBI NO: 18410883 NR Description: DNA-binding protein [Arabidopsis thaliana]
MTSSRSKSKSRSRSRSRSRSRSRSPRRRDRLRSERAPHRSRSRSRSPYRRRERRGHRDFACKNCRRPGHFAKECPSAPMCNNCNLPGHFAAECTLQTVCWNCKESGHIASECKNEALCHACNKTGHLARDCPTSGANVKLCNKCFKSGHIAVDCTNERACNNCRQPGHIARECKNDPVCNLCNVSGHVARVCPKTTLASVIQGGPFRDILCRICGQPGHISRNCMATIICDTCGGRGHMSYECPSARIFGLRRL

SEQ ID NO: 1165 - protein, 176 aa, Zea mays subsp. mays
  peptide (1)..(176): Ceres Seq. ID no. 15178144
  misc_feature (1)..(168): Homolog of NCBI NO: 729704 NR Description: DNA-binding protein HEXBP (Hexamer-binding
  misc_feature (18)..(168): Homolog of NCBI NO: 6324074 NR Description: GIG3 suppressor; Gis2p [Saccharomyces cerevisiae]
  misc_feature (20)..(176): Homolog of NCBI NO: 37536582 NR Description: putative zinc finger protein
  misc_feature (1)..(35): Homolog of NCBI NO: 32421763 NR Description: hypothetical protein [Neurospora crassa]
  misc_feature (21)..(167): Homolog of NCBI NO: 32421763 NR Description: hypothetical protein [Neurospora crassa]
  misc_feature (1)..(116): Homolog of NCBI NO: 6324074 NR Description: GIG3 suppressor; Gis2p [Saccharomyces cerevisiae]
  misc_feature (1)..(175): Homolog of NCBI NO: 25404984 NR Description: protein F10A5.22 [imported] - Arabidopsis
  misc_feature (1)..(170): Homolog of NCBI NO: 37536582 NR Description: putative zinc finger protein
  misc_feature (1)..(175): Homolog of NCBI NO: 21537255 NR Description: DNA-binding protein [Arabidopsis thaliana]
  misc_feature (1)..(175): Homolog of NCBI NO: 18410883 NR Description: DNA-binding protein [Arabidopsis thaliana]
MCNNCNLPGHFAAECTLQTVCWNCKESGHIASECKNEALCHACNKTGHLARDCPTSGANVKLCNKCFKSGHIAVDCTNERACNNCRQPGHIARECKNDPVCNLCNVSGHVARVCPKTTLASVIQGGPFRDILCRICGQPGHISRNCMATIICDTCGGRGHMSYECPSARIFGLRRL

SEQ ID NO: 1166 - DNA, 1575 bp, Zea mays subsp. mays
  misc_feature (1)..(1575): Ceres Seq. ID no. 15180586
ctcacaggctcacacgatactttccccctccactagggttccccgtccgttccccctcggccgcatcagctgtttgaggcggcaaccaagggccgcggaagcatctgcgtcgagccatggataaggggatcttcaccaacgatggctccttcatggagaggttcaagcagatgcagcaggaggcgcaggagaagaaggccgctgctgcctccgcctcatcggctcccaagcatgcgaaccccaagcaggggtttgctgttgcggcaaacaagaggccattcgagctgaagaacgctgctccggtagcctcagctggtaagctggcctttagtctcaagaaggccaaggtcgccgttgcacctgtgtttgcagccgacgaggaggatgaggatgccgtggatgttgagagggaggagcccgccaaacgccagaagtctgtgcaagctgatgctcctgcggcagctgccccgtccggggctgttgccccacccccaccaaatgatatgacagtgagacaagtcgctgacaaactggcaagctttgttgccaaaaacgggagacagtttgagaatatcacacggcagaggaatcctggagatacaccattcaagtttctatttgacaaacactgtccagactacaaatattatgagtttcagcttgctgaagaggaaagggctcttgctcagtcaaaggaggctgaagcatcgaaagctaactctggcactgcaagcttcaaggcaccaggtggtacttatagaagctcatttgaacagaagtctaactatcagacacctgcatcagctttgtacggggcatatgagggtagttcttcccaaggaagctcttctagttacggtgatcatacagctccaccatcagatcctgtagcattgatggaattctatgcaaagaaggctgcactggaagaacggaagaggccaccaaggcagtcgaaagatgaaatgccgccacctccttctcttcaaggtcctcctaagaagggacaccacatgggtgatttcattcctcaagaagaacttgaaaagtttatggcacggtgtaatgatgctgcagcacaaaaggctaccaaagaagccgctgagaaggctaagattcaggcggacaatattgggcacaaacttttatctaagatgggttggagggaaggcgagggtcttgggagcgagagaagaggccgtgcagatcccgttatggctggagatgtgaagaaggatcatcttggtgttggggctgtccagcctggtgaggtcacatctgaagatgacatctatgagcaatacaagaaacggatgatgcttggataccgctataggccaaaccctctgaacaatccaaggaaatcatactactgatgcgggggagttcgtctgaggggagataaatgtcaagaagttcgttattcagcatatttcttggaatgccacagatgcaaggcttccgggggttctacaaagctttgttctttgtgtagtgtgtttatctttgtggatttaaatgtctgttcaaacgtgtatcatgtttcagacaatgatgtattgctttcttggatct

SEQ ID NO: 1167 - protein, 419 aa, Zea mays subsp. mays
  peptide (1)..(419): Ceres Seq. ID no. 15180587
  misc_feature (133)..(187): Pfam Name: Surp module Pfam Description: Surp module
  misc_feature (298)..(419): Homolog of NCBI NO: 7512956 NR Description: hypothetical protein F23858_1 - human (fragment)
  misc_feature (103)..(301): Homolog of NCBI NO: 7512956 NR Description: hypothetical protein F23858_1 - human (fragment)
  misc_feature (129)..(192): Homolog of NCBI NO: 34877669 NR Description: similar to splicing factor 4 [Rattus norvegicus]
  misc_feature (298)..(419): Homolog of NCBI NO: 34877669 NR Description: similar to splicing factor 4 [Rattus norvegicus]
  misc_feature (298)..(419): Homolog of NCBI NO: 6807742 NR Description: hypothetical protein [Homo sapiens]
  misc_feature (126)..(301): Homolog of NCBI NO: 6807742 NR Description: hypothetical protein [Homo sapiens]
  misc_feature (1)..(293): Homolog of NCBI NO: 18409491 NR Description: gamma response I protein [Arabidopsis thaliana]
  misc_feature (224)..(419): Homolog of NCBI NO: 18409491 NR Description: gamma response I protein [Arabidopsis thaliana]
  misc_feature (259)..(419): Homolog of NCBI NO: 11357298 NR Description: gamma response I protein - Arabidopsis thaliana
  misc_feature (1)..(293): Homolog of NCBI NO: 11357298 NR Description: gamma response I protein - Arabidopsis thaliana
MDKGIFTNDGSFMERFKQMQQEAQEKKAAAASASSAPKHANPKQGFAVAANKRPFELKNAAPVASAGKLAFSLKKAKVAVAPVFAADEEDEDAVDVEREEPAKRQKSVQADAPAAAAPSGAVAPPPPNDMTVRQVADKLASFVAKNGRQFENITRQRNPGDTPFKFLFDKHCPDYKYYEFQLAEEERALAQSKEAEASKANSGTASFKAPGGTYRSSFEQKSNYQTPASALYGAYEGSSSQGSSSSYGDHTAPPSDPVALMEFYAKKAALEERKRPPRQSKDEMPPPPSLQGPPKKGHHMGDFIPQEELEKFMARCNDAAAQKATKEAAEKAKIQADNIGHKLLSKMGWREGEGLGSERRGRADPVMAGDVKKDHLGVGAVQPGEVTSEDDIYEQYKKRMMLGYRYRPNPLNNPRKSYY

SEQ ID NO: 1168 - protein, 407 aa, Zea mays subsp. mays
  peptide (1)..(407): Ceres Seq. ID no. 15180588
  misc_feature (121)..(175): Pfam Name: Surp module Pfam Description: Surp module
  misc_feature (286)..(407): Homolog of NCBI NO: 7512956 NR Description: hypothetical protein F23858_1 - human (fragment)
  misc_feature (91)..(289): Homolog of NCBI NO: 7512956 NR Description: hypothetical protein F23858_1 - human (fragment)
  misc_feature (117)..(180): Homolog of NCBI NO: 34877669 NR Description: similar to splicing factor 4 [Rattus norvegicus]
  misc_feature (286)..(407): Homolog of NCBI NO: 34877669 NR Description: similar to splicing factor 4 [Rattus norvegicus]
  misc_feature (286)..(407): Homolog of NCBI NO: 6807742 NR Description: hypothetical protein [Homo sapiens]
  misc_feature (114)..(289): Homolog of NCBI NO: 6807742 NR Description: hypothetical protein [Homo sapiens]
  misc_feature (1)..(281): Homolog of NCBI NO: 18409491 NR Description: gamma response I protein [Arabidopsis thaliana]
  misc_feature (212)..(407): Homolog of NCBI NO: 18409491 NR Description: gamma response I protein [Arabidopsis thaliana]
  misc_feature (247)..(407): Homolog of NCBI NO: 11357298 NR Description: gamma response I protein - Arabidopsis thaliana
  misc_feature (1)..(281): Homolog of NCBI NO: 11357298 NR Description: gamma response I protein - Arabidopsis thaliana
MERFKQMQQEAQEKKAAAASASSAPKHANPKQGFAVAANKRPFELKNAAPVASAGKLAFSLKKAKVAVAPVFAADEEDEDAVDVEREEPAKRQKSVQADAPAAAAPSGAVAPPPPNDMTVRQVADKLASFVAKNGRQFENITRQRNPGDTPFKFLFDKHCPDYKYYEFQLAEEERALAQSKEAEASKANSGTASFKAPGGTYRSSFEQKSNYQTPASALYGAYEGSSSQGSSSSYGDHTAPPSDPVALMEFYAKKAALEERKRPPRQSKDEMPPPPSLQGPPKKGHHMGDFIPQEELEKFMARCNDAAAQKATKEAAEKAKIQADNIGHKLLSKMGWREGEGLGSERRGRADPVMAGDVKKDHLGVGAVQPGEVTSEDDIYEQYKKRMMLGYRYRPNPLNNPRKSYY

SEQ ID NO: 1169 - protein, 401 aa, Zea mays subsp. mays
  peptide (1)..(401): Ceres Seq. ID no. 15180589
  misc_feature (115)..(169): Pfam Name: Surp module Pfam Description: Surp module
  misc_feature (280)..(401): Homolog of NCBI NO: 7512956 NR Description: hypothetical protein F23858_1 - human (fragment)
  misc_feature (85)..(283): Homolog of NCBI NO: 7512956 NR Description: hypothetical protein F23858_1 - human (fragment)
  misc_feature (111)..(174): Homolog of NCBI NO: 34877669 NR Description: similar to splicing factor 4 [Rattus norvegicus]
  misc_feature (280)..(401): Homolog of NCBI NO: 34877669 NR Description: similar to splicing factor 4 [Rattus norvegicus]
  misc_feature (280)..(401): Homolog of NCBI NO: 6807742 NR Description: hypothetical protein [Homo sapiens]
  misc_feature (108)..(283): Homolog of NCBI NO: 6807742 NR Description: hypothetical protein [Homo sapiens]
  misc_feature (1)..(275): Homolog of NCBI NO: 18409491 NR Description: gamma response I protein [Arabidopsis thaliana]
  misc_feature (206)..(401): Homolog of NCBI NO: 18409491 NR Description: gamma response I protein [Arabidopsis thaliana]
  misc_feature (241)..(401): Homolog of NCBI NO: 11357298 NR Description: gamma response I protein - Arabidopsis thaliana
  misc_feature (1)..(275): Homolog of NCBI NO: 11357298 NR Description: gamma response I protein - Arabidopsis thaliana
MQQEAQEKKAAAASASSAPKHANPKQGFAVAANKRPFELKNAAPVASAGKLAFSLKKAKVAVAPVFAADEEDEDAVDVEREEPAKRQKSVQADAPAAAAPSGAVAPPPPNDMTVRQVADKLASFVAKNGRQFENITRQRNPGDTPFKFLFDKHCPDYKYYEFQLAEEERALAQSKEAEASKANSGTASFKAPGGTYRSSFEQKSNYQTPASALYGAYEGSSSQGSSSSYGDHTAPPSDPVALMEFYAKKAALEERKRPPRQSKDEMPPPPSLQGPPKKGHHMGDFIPQEELEKFMARCNDAAAQKATKEAAEKAKIQADNIGHKLLSKMGWREGEGLGSERRGRADPVMAGDVKKDHLGVGAVQPGEVTSEDDIYEQYKKRMMLGYRYRPNPLNNPRKSYY

SEQ ID NO: 1170 - DNA, 980 bp, Zea mays subsp. mays
  misc_feature (1)..(980): Ceres Seq. ID no. 15177927
atatccacacctgagtcccctccgccgcctgccgcactctcccgcgacgccaccaccacacgttcacggtagcgagagcttatcgtcgtcggcggcgaagatggtgtcgctgaagctgcagaagcggctcgccgcgagcgtcctcaagtgtgggaaaggcaaagtctggcttgaccccaatgaagtcagcgagatctccatggctaactcccgccagaacatccggaagttggttaagaatgggtttatcatcaggaagcctcagaaggttcactctaggtcccgtgcaagaagggcacatgaggccaagcagaagggaaggcactctggatatggcaagcgcaggggtaccagggaggctaggctccccaccaagattctgtggatgaggaggatgcgtgttctgaggcgcctgctctgcaagtaccgtgaggccaagaagatcgacaagcacatgtatcatgacatgtacatgaaggtcaagggtaatatgtttaagaacaagagggtgcttatggagagtatccacaagtccaaggctgagaaggccagagagaagacactttctgatcagtttgaggccaagcgtgcaaagagcaaggcaagccgtgagaggaagattgctaggagggaggagaggctggcccagggcccaagagaaccaacagcacctgtcgcagccccagctccatctactggggtgccaaagaaagcaaagaagtgaagtatggaaacaaagctgtagctttttggtactatataagcatgactttggagcacctgaagtattttgctgttatatagtttcgtgtctcaaatattctgagtcttgtatgtattctgcctgcgtttcagattcagattttttttttattttggacccaatcaaccctgcactgccttgtcgaggaccgtggtccgtggatggcaatggttcttacttcttactggttatattatatatgctgcaagattgctng

SEQ ID NO: 1171 - protein, 240 aa, Zea mays subsp. mays
  peptide (1)..(240): Ceres Seq. ID no. 15177928
  misc_feature (35)..(182): Pfam Name: Ribosomal protein L19e Pfam Description: Ribosomal protein L19e
  misc_feature (34)..(215): Homolog of NCBI NO: 28630352 NR Description: ribosomal protein L19 [Branchiostoma lanceolatum]
  misc_feature (34)..(215): Homolog of NCBI NO: 28200276 NR Description: ribosomal protein L19 [Branchiostoma belcheri
  misc_feature (34)..(232): Homolog of NCBI NO: 7440943 NR Description: ribosomal protein L19.T2H3.3 - Arabidopsis
  misc_feature (34)..(240): Homolog of NCBI NO: 15235290 NR Description: 60S ribosomal protein L19 (RPL19C) [Arabidopsis
  misc_feature (34)..(240): Homolog of NCBI NO: 15228314 NR Description: 60S ribosomal protein L19 (RPL19B) [Arabidopsis
  misc_feature (34)..(240): Homolog of NCBI NO: 18087585 NR Description: At1g02780/T14P4_3 [Arabidopsis thaliana]
  misc_feature (34)..(231): Homolog of NCBI NO: 40287526 NR Description: 60S ribosomal protein L19 [Capsicum annuum]
  misc_feature (34)..(240): Homolog of NCBI NO: 15218602 NR Description: 60S ribosomal protein L19 (RPL19A) [Arabidopsis
  misc_feature (34)..(233): Homolog of NCBI NO: 32401377 NR Description: ribosomal protein L19 [Triticum aestivum]
  misc_feature (34)..(240): Homolog of NCBI NO: 29837764 NR Description: putative ribosomal protein L19
YPHLSPLRRLPHSPATPPPHVHGSESLSSSAAKMVSLKLQKRLAASVLKCGKGKVWLDPNEVSEISMANSRQNIRKLVKNGFIIRKPQKVHSRSRARRAHEAKQKGRHSGYGKRRGTREARLPTKILWMRRMRVLRRLLCKYREAKKIDKHMYHDMYMKVKGNMFKNKRVLMESIHKSKAEKAREKTLSDQFEAKRAKSKASRERKIARREERLAQGPREPTAPVAAPAPSTGVPKKAKK

SEQ ID NO: 1172 - protein, 207 aa, Zea mays subsp. mays
  peptide (1)..(207): Ceres Seq. ID no. 15177929
  misc_feature (2)..(149): Pfam Name: Ribosomal protein L19e Pfam Description: Ribosomal protein L19e
  misc_feature (1)..(182): Homolog of NCBI NO: 28630352 NR Description: ribosomal protein L19 [Branchiostoma lanceolatum]
  misc_feature (1)..(182): Homolog of NCBI NO: 28200276 NR Description: ribosomal protein L19 [Branchiostoma belcheri
  misc_feature (1)..(199): Homolog of NCBI NO: 7440943 NR Description: ribosomal protein L19.T2H3.3 - Arabidopsis
  misc_feature (1)..(207): Homolog of NCBI NO: 15235290 NR Description: 60S ribosomal protein L19 (RPL19C) [Arabidopsis
  misc_feature (1)..(207): Homolog of NCBI NO: 15228314 NR Description: 60S ribosomal protein L19 (RPL19B) [Arabidopsis
  misc_feature (1)..(207): Homolog of NCBI NO: 18087585 NR Description: At1g02780/T14P4_3 [Arabidopsis thaliana]
  misc_feature (1)..(198): Homolog of NCBI NO: 40287526 NR Description: 60S ribosomal protein L19 [Capsicum annuum]
  misc_feature (1)..(207): Homolog of NCBI NO: 15218602 NR Description: 60S ribosomal protein L19 (RPL19A) [Arabidopsis
  misc_feature (1)..(200): Homolog of NCBI NO: 32401377 NR Description: ribosomal protein L19 [Triticum aestivum]
  misc_feature (1)..(207): Homolog of NCBI NO: 29837764 NR Description: putative ribosomal protein L19
MVSLKLQKRLAASVLKCGKGKVWLDPNEVSEISMANSRQNIRKLVKNGFIIRKPQKVHSRSRARRAHEAKQKGRHSGYGKRRGTREARLPTKILWMRRMRVLRRLLCKYREAKKIDKHMYHDMYMKVKGNMFKNKRVLMESIHKSKAEKAREKTLSDQFEAKRAKSKASRERKIARREERLAQGPREPTAPVAAPAPSTGVPKKAKK

SEQ ID NO: 1173 - protein, 174 aa, Zea mays subsp. mays
  peptide (1)..(174): Ceres Seq. ID no. 15177930
  misc_feature (1)..(116): Pfam Name: Ribosomal protein L19e Pfam Description: Ribosomal protein L19e
  misc_feature (1)..(149): Homolog of NCBI NO: 28630352 NR Description: ribosomal protein L19 [Branchiostoma lanceolatum]
  misc_feature (1)..(149): Homolog of NCBI NO: 28200276 NR Description: ribosomal protein L19 [Branchiostoma belcheri
  misc_feature (1)..(166): Homolog of NCBI NO: 7440943 NR Description: ribosomal protein L19.T2H3.3 - Arabidopsis
  misc_feature (1)..(174): Homolog of NCBI NO: 15235290 NR Description: 60S ribosomal protein L19 (RPL19C) [Arabidopsis
  misc_feature (1)..(174): Homolog of NCBI NO: 15228314 NR Description: 60S ribosomal protein L19 (RPL19B) [Arabidopsis
  misc_feature (1)..(174): Homolog of NCBI NO: 18087585 NR Description: At1g02780/T14P4_3 [Arabidopsis thaliana]
  misc_feature (1)..(165): Homolog of NCBI NO: 40287526 NR Description: 60S ribosomal protein L19 [Capsicum annuum]
  misc_feature (1)..(174): Homolog of NCBI NO: 15218602 NR Description: 60S ribosomal protein L19 (RPL19A) [Arabidopsis
  misc_feature (1)..(167): Homolog of NCBI NO: 32401377 NR Description: ribosomal protein L19 [Triticum aestivum]
  misc_feature (1)..(174): Homolog of NCBI NO: 29837764 NR Description: putative ribosomal protein L19
MANSRQNIRKLVKNGFIIRKPQKVHSRSRARRAHEAKQKGRHSGYGKRRGTREARLPTKILWMRRMRVLRRLLCKYREAKKIDKHMYHDMYMKVKGNMFKNKRVLMESIHKSKAEKAREKTLSDQFEAKRAKSKASRERKIARREERLAQGPREPTAPVAAPAPSTGVPKKAKK

SEQ ID NO: 1174 - DNA, 1966 bp, Zea mays subsp. mays
  misc_feature (1)..(1966): Ceres Seq. ID no. 15179554
  misc_feature: MA Experiment ID: 108689 Result: Up-regulated in Transcription
  misc_feature: MA Experiment 108689 PARAMETER Experiment Name: Zm_Drought_Roots_P Parameter: Age (day) Value: 9
  misc_feature: MA Experiment 108689 PARAMETER Experiment Name: Zm_Drought_Roots_P Parameter: Organism Value: Zea mays
  misc_feature: MA Experiment 108689 PARAMETER Experiment Name: Zm_Drought_Roots_P Parameter: Plant Line Value: 35A19
  misc_feature: MA Experiment 108689 PARAMETER Experiment Name: Zm_Drought_Roots_P Parameter: Timepoint (hr) Value: 24
  misc_feature: MA Experiment 108689 PARAMETER Experiment Name: Zm_Drought_Roots_P Parameter: Tissue Value: Roots
  misc_feature: MA Experiment 108689 PARAMETER Experiment Name: Zm_Drought_Roots_P Parameter: Treatment Value: Drought vs. No Drought
aggatcccgttctcagtcgccagccactggtcacagccaccgtctccctccttccccaacctcgccgctatcaggtggtggatgcagcagcgcggccgctccttcaacagccgctctcggagcttctcccgcgcccgcgtcgccatcgagggatcttaatctcacagccatccctcgatcatttcgtttgaactcggttctgaaattctgactgacgaacgcacgcaacgacctaccgtgatggacgccgccgccgccgccaccgttgtttctcttaacgggaagatgggggccgaggagaggaaggcgcagaagagctactgggaggagcattccaagaacctcaccgtcgaggccatgatgctggactcccgcgccgctgatctcgacaaggaggagcgccctgaggtcctgtctttgcttccttcatatgaaggaaaatctgtactagagcttggtgctggaataggccgtttcactggagaactcgctaaaacagctgggaatgttcttgctctggattttattgaaagtgcaattaaaaagaatgaaagcattaatggtcactacaagaatgcatcctttatgtgtgctgatgtgacatcccaggacctagtgcttcaagctaactccatcgatctgatattttcaaattggttattgatgtatctttcagatgaagaggttgaacagctagttcagagaatggtgaaatggttgaaggttggtggctatatcttctttagggaatcttgcttccatcaatctggagattcaaaaaggaaagttaatccgacacactatagggaaccaagtttttatactaaggttttcaaagaatgccatacctttgatcaagatgggaattctttcgaactttctctggttacttgcaagtgtattggtgcttatgttaaaaacaagaaaaaccaaaaccagatatgttggctatggcaaaaggtccattcaacggaagataaaggatttcaaagatttttggacaatgtgcagtacaaagccagcggaatattacgttacgagcgcatttttggagaaggttatgtgagcactggtggagttgagactacaaaagaatttgtggacaagctggatctcaaacctggacataaggtgcttgatgttggatgtggaattgggggaggtgacttttatatggccgaaaaatatgatgctcatgttgttggtattgatctttccataaacatggtatcatttgcacttgagcgtgccattgggcgcagttgctcagtggagtttgaagttgctgattgcactacgaagacatacccagacaacacatttgatgtcatatacagccgtgatactatccttcacatacatgacaaaccctctttgttcaaaagtttcttcaactggctgaagcctgggggcaaggtccttatcagtgactactgcaggagtcctgggaaaccatcagaggaatttgcagcatacattaagcagagaggttatgacctacatgctgtggaggcttatggacagatgttgaagagtgctggttttcgtgatgtcattgctgaggatcgaactgatcagttccttggtgttttagataaggagttagctgaatttgaaaagaacaaggatgatttcctgtctgacttcacccaggaggactacgatgatatcgtgaacggttggaaggcaaaactgcagaggagttctgctggtgaacagaggtgggggctgttcatcgccaccaaatgatgatgaagatgtgggctggacatgaaaataaagcatccttttattataattgatgccgcattacttattctgaacccaggttgcctgggtcagtacctactaccctgtttatcgtagtacgtggagagaactcgtccagttttacattcccgtcactgctttgccggagtgctgtggcaatccataaagtctaataaagtaacaataagctgtctgc

SEQ ID NO: 1175 - protein, 502 aa, Zea mays subsp. mays
  peptide (1)..(502): Ceres Seq. ID no. 15179555
  misc_feature (1)..(502): Homolog of NCBI NO: 34911440 NR Description: putative phosphoethanolamine methyltransferase
  misc_feature (19)..(502): Homolog of NCBI NO: 30684743 NR Description: phosphoethanolamine N-methyltransferase, putative
  misc_feature (8)..(502): Homolog of NCBI NO: 17887465 NR Description: phosphoethanolamine methyltransferase [Triticum
  misc_feature (130)..(502): Homolog of NCBI NO: 39582205 NR Description: Hypothetical protein CBG08775 [Caenorhabditis
  misc_feature (19)..(502): Homolog of NCBI NO: 15219502 NR Description: phosphoethanolamine N-methyltransferase -related
  misc_feature (16)..(502): Homolog of NCBI NO: 24212082 NR Description: Phosphoethanolamine N-methyltransferase
  misc_feature (30)..(502): Homolog of NCBI NO: 15221909 NR Description: phosphoethanolamine N-methyltransferase -related
  misc_feature (19)..(502): Homolog of NCBI NO: 9294501 NR Description: methyl transferase-like protein [Arabidopsis
  misc_feature (20)..(502): Homolog of NCBI NO: 32478660 NR Description: phosphoethanolamine N-methyltransferase [Brassica
  misc_feature (19)..(502): Homolog of NCBI NO: 20260388 NR Description: unknown protein [Arabidopsis thaliana]
MDAAAAATVVSLNGKMGAEERKAQKSYWEEHSKNLTVEAMMLDSRAADLDKEERPEVLSLLPSYEGKSVLELGAGIGRFTGELAKTAGNVLALDFIESAIKKNESINGHYKNASFMCADVTSQDLVLQANSIDLIFSNWLLMYLSDEEVEQLVQRMVKWLKVGGYIFFRESCFHQSGDSKRKVNPTHYREPSFYTKVFKECHTFDQDGNSFELSLVTCKCIGAYVKNKKNQNQICWLWQKVHSTEDKGFQRFLDNVQYKASGILRYERIFGEGYVSTGGVETTKEFVDKLDLKPGHKVLDVGCGIGGGDFYMAEKYDAHVVGIDLSINMVSFALERAIGRSCSVEFEVADCTTKTYPDNTFDVIYSRDTILHIHDKPSLFKSFFNWLKPGGKVLISDYCRSPGKPSEEFAAYIKQRGYDLHAVEAYGQMLKSAGFRDVIAEDRTDQFLGVLDKELAEFEKNKDDFLSDFTQEDYDDIVNGWKAKLQRSSAGEQRWGLFIATK

SEQ ID NO: 1176 - protein, 487 aa, Zea mays subsp. mays
  peptide (1)..(487): Ceres Seq. ID no. 15179556
  misc_feature (115)..(487): Homolog of NCBI NO: 39582205 NR Description: Hypothetical protein CBG08775 [Caenorhabditis
  misc_feature (4)..(487): Homolog of NCBI NO: 15219502 NR Description: phosphoethanolamine N-methyltransferase -related
  misc_feature (1)..(487): Homolog of NCBI NO: 24212082 NR Description: Phosphoethanolamine N-methyltransferase
  misc_feature (15)..(487): Homolog of NCBI NO: 15221909 NR Description: phosphoethanolamine N-methyltransferase -related
  misc_feature (4)..(487): Homolog of NCBI NO: 9294501 NR Description: methyl transferase-like protein [Arabidopsis
  misc_feature (5)..(487): Homolog of NCBI NO: 32478660 NR Description: phosphoethanolamine N-methyltransferase [Brassica
  misc_feature (4)..(487): Homolog of NCBI NO: 20260388 NR Description: unknown protein [Arabidopsis thaliana]
  misc_feature (4)..(487): Homolog of NCBI NO: 30684743 NR Description: phosphoethanolamine N-methyltransferase, putative
  misc_feature (1)..(487): Homolog of NCBI NO: 17887465 NR Description: phosphoethanolamine methyltransferase [Triticum
  misc_feature (1)..(487): Homolog of NCBI NO: 34911440 NR Description: putative phosphoethanolamine methyltransferase
MGAEERKAQKSYWEEHSKNLTVEAMMLDSRAADLDKEERPEVLSLLPSYEGKSVLELGAGIGRFTGELAKTAGNVLALDFIESAIKKNESINGHYKNASFMCADVTSQDLVLQANSIDLIFSNWLLMYLSDEEVEQLVQRMVKWLKVGGYIFFRESCFHQSGDSKRKVNPTHYREPSFYTKVFKECHTFDQDGNSFELSLVTCKCIGAYVKNKKNQNQICWLWQKVHSTEDKGFQRFLDNVQYKASGILRYERIFGEGYVSTGGVETTKEFVDKLDLKPGHKVLDVGCGIGGGDFYMAEKYDAHVVGIDLSINMVSFALERAIGRSCSVEFEVADCTTKTYPDNTFDVIYSRDTILHIHDKPSLFKSFFNWLKPGGKVLISDYCRSPGKPSEEFAAYIKQRGYDLHAVEAYGQMLKSAGFRDVIAEDRTDQFLGVLDKELAEFEKNKDDFLSDFTQEDYDDIVNGWKAKLQRSSAGEQRWGLFIATK

SEQ ID NO: 1177 - protein, 463 aa, Zea mays subsp. mays
  peptide (1)..(463): Ceres Seq. ID no. 15179557
  misc_feature (91)..(463): Homolog of NCBI NO: 39582205 NR Description: Hypothetical protein CBG08775 [Caenorhabditis
  misc_feature (1)..(463): Homolog of NCBI NO: 15219502 NR Description: phosphoethanolamine N-methyltransferase -related
  misc_feature (1)..(463): Homolog of NCBI NO: 24212082 NR Description: Phosphoethanolamine N-methyltransferase
  misc_feature (1)..(463): Homolog of NCBI NO: 15221909 NR Description: phosphoethanolamine N-methyltransferase -related
  misc_feature (1)..(463): Homolog of NCBI NO: 9294501 NR Description: methyl transferase-like protein [Arabidopsis
  misc_feature (1)..(463): Homolog of NCBI NO: 32478660 NR Description: phosphoethanolamine N-methyltransferase [Brassica
  misc_feature (1)..(463): Homolog of NCBI NO: 20260388 NR Description: unknown protein [Arabidopsis thaliana]
  misc_feature (1)..(463): Homolog of NCBI NO: 30684743 NR Description: phosphoethanolamine N-methyltransferase, putative
  misc_feature (1)..(463): Homolog of NCBI NO: 17887465 NR Description: phosphoethanolamine methyltransferase [Triticum
  misc_feature (1)..(463): Homolog of NCBI NO: 34911440 NR Description: putative phosphoethanolamine methyltransferase
MMLDSRAADLDKEERPEVLSLLPSYEGKSVLELGAGIGRFTGELAKTAGNVLALDFIESAIKKNESINGHYKNASFMCADVTSQDLVLQANSIDLIFSNWLLMYLSDEEVEQLVQRMVKWLKVGGYIFFRESCFHQSGDSKRKVNPTHYREPSFYTKVFKECHTFDQDGNSFELSLVTCKCIGAYVKNKKNQNQICWLWQKVHSTEDKGFQRFLDNVQYKASGILRYERIFGEGYVSTGGVETTKEFVDKLDLKPGHKVLDVGCGIGGGDFYMAEKYDAHVVGIDLSINMVSFALERAIGRSCSVEFEVADCTTKTYPDNTFDVIYSRDTILHIHDKPSLFKSFFNWLKPGGKVLISDYCRSPGKPSEEFAAYIKQRGYDLHAVEAYGQMLKSAGFRDVIAEDRTDQFLGVLDKELAEFEKNKDDFLSDFTQEDYDDIVNGWKAKLQRSSAGEQRWGLFIATK

SEQ ID NO: 1178 - DNA, 1436 bp, Zea mays subsp. mays
  misc_feature (1)..(1436): Ceres Seq. ID no. 15180578
agtactagcagtagcactgcgccgcagcaatggtggtttccctcgccgaataaatctcaccggtcgcgcttcttggcgtgttcctccgctcgcctgggcttcgatctccagccctcgcgtgagcgcgggtgcggccgcggcgccgtggtcatggcgacggaggagtgggagctgcgggaggaggacgcctacgcctacgagttcgagttcgacctcgagaaccccttcaccagccccgccgacgagccgatcgccagtctcctcgacgccgagggccaccacgcgccctctatctccgccgcggcctcggccacccgccgcgccgccgccgccttcatctccaaggtgcgtttcggcggcgagctcgccgtgcacccgcgcgtcgcctacctcgcgctcaactacgtggatcgcttcctctccaagaggcaattggcgtgcgagcagcagccgtgggcgccgcgcctgctcgccatcagctgcctctccctcgccgccaagatgcagcgcgtcgcaacattctccaccgccgacattcagagggacgaagacttcatgttcgacgcggtgaccatccgtcgcatggagcgggtggtgcttggcgcgcttgagtggcgcgcgcgctccgtcacgccgctcgccttcctcggcttcttcctctccgcatgctatccgccgccgcagcaccccccacaggtagccgctgtcaaggcgcgcgccgtcgacctccttctccacgctcagcctgaggtgaagatggcggagttctcaccctccgtggtggcggcggcagcgctgctggccgccgccggagaggtcgccgccgcgaacctccacgcgttccaagccagcttggccgcctgtccctttgtaaatagcgagaagctgcgggagtgcggtgaggtgctggcagcggcgggcggcgtcgggcgggggcgagccgctccgagcgcggacacgcctgtgacggtgctcggtcaccagcgcagcgccagctccgcctcggagaccgactggattaacggcggcgacgcgaagaaacgctgcatgggcccaccatcgcaatgggggtaggcggcaggccgcaggccgagtcaagcgggtattgtcgcagctggatcgaagagtcggagattttactgcagccctgctcctttttttccaaattgtttttaccctttttcttttcccaattctttccttctactttaatgctctcgaggtaaagtgacgaggagtggtggtggtggctgtcatttactagtattcctttttcctagcatgtctttattttagcctagttatggtaatttttgcggcggtgctttggaaggtgaggacggtggatgaacatactgggatggaagagggggatgatgtgaaatggtaaaaaaaataaaaccaaaaggctggcatgttgctttgtcacctcaaat

SEQ ID NO: 1179 - protein, 357 aa, Zea mays subsp. mays
  peptide (1)..(357): Ceres Seq. ID no. 15180579
  misc_feature (99)..(208): Pfam Name: Cyclin, N-terminal domain Pfam Description: Cyclin, N-terminal domain
  misc_feature (76)..(317): Homolog of NCBI NO: 18916916 NR Description: cyclin [Oryza sativa (japonica cultivar-group)]
  misc_feature (106)..(345): Homolog of NCBI NO: 15229665 NR Description: cyclin family [Arabidopsis thaliana]
  misc_feature (80)..(336): Homolog of NCBI NO: 19070611 NR Description: D-type cyclin [Zea mays]
  misc_feature (64)..(332): Homolog of NCBI NO: 19070615 NR Description: D-type cyclin [Zea mays]
  misc_feature (99)..(305): Homolog of NCBI NO: 1076311 NR Description: cyclin delta-1 - Arabidopsis thaliana
  misc_feature (79)..(305): Homolog of NCBI NO: 3915635 NR Description: Cyclin delta-1
  misc_feature (79)..(348): Homolog of NCBI NO: 15223075 NR Description: cyclin delta-1 (CYCD1) [Arabidopsis thaliana]
  misc_feature (67)..(299): Homolog of NCBI NO: 25989347 NR Description: cyclin D1 [Helianthus tuberosus]
  misc_feature (67)..(355): Homolog of NCBI NO: 6448480 NR Description: cyclin D1 [Antirrhinum majus]
  misc_feature (72)..(348): Homolog of NCBI NO: 15236274 NR Description: cyclin family [Arabidopsis thaliana]
STSSSTAPQQWWFPSPNKSHRSRFLACSSARLGFDLQPSRERGCGRGAVVMATEEWELREEDAYAYEFEFDLENPFTSPADEPIASLLDAEGHHAPSISAAASATRRAAAAFISKVRFGGELAVHPRVAYLALNYVDRFLSKRQLACEQQPWAPRLLAISCLSLAAKMQRVATFSTADIQRDEDFMFDAVTIRRMERVVLGALEWRARSVTPLAFLGFFLSACYPPPQHPPQVAAVKARAVDLLLHAQPEVKMAEFSPSVVAAAALLAAAGEVAAANLHAFQASLAACPFVNSEKLRECGEVLAAAGGVGRGRAAPSADTPVTVLGHQRSASSASETDWINGGDAKKRCMGPPSQWG

SEQ ID NO: 1180 - protein, 307 aa, Zea mays subsp. mays
  peptide (1)..(307): Ceres Seq. ID no. 15180580
  misc_feature (49)..(158): Pfam Name: Cyclin, N-terminal domain Pfam Description: Cyclin, N-terminal domain
  misc_feature (26)..(267): Homolog of NCBI NO: 18916916 NR Description: cyclin [Oryza sativa (japonica cultivar-group)]
  misc_feature (56)..(295): Homolog of NCBI NO: 15229665 NR Description: cyclin family [Arabidopsis thaliana]
  misc_feature (30)..(286): Homolog of NCBI NO: 19070611 NR Description: D-type cyclin [Zea mays]
  misc_feature (14)..(282): Homolog of NCBI NO: 19070615 NR Description: D-type cyclin [Zea mays]
  misc_feature (49)..(255): Homolog of NCBI NO: 1076311 NR Description: cyclin delta-1 - Arabidopsis thaliana
  misc_feature (29)..(255): Homolog of NCBI NO: 3915635 NR Description: Cyclin delta-1
  misc_feature (29)..(298): Homolog of NCBI NO: 15223075 NR Description: cyclin delta-1 (CYCD1) [Arabidopsis thaliana]
  misc_feature (17)..(249): Homolog of NCBI NO: 25989347 NR Description: cyclin D1 [Helianthus tuberosus]
  misc_feature (17)..(305): Homolog of NCBI NO: 6448480 NR Description: cyclin D1 [Antirrhinum majus]
  misc_feature (22)..(298): Homolog of NCBI NO: 15236274 NR Description: cyclin family [Arabidopsis thaliana]
MATEEWELREEDAYAYEFEFDLENPFTSPADEPIASLLDAEGHHAPSISAAASATRRAAAAFISKVRFGGELAVHPRVAYLALNYVDRFLSKRQLACEQQPWAPRLLAISCLSLAAKMQRVATFSTADIQRDEDFMFDAVTIRRMERVVLGALEWRARSVTPLAFLGFFLSACYPPPQHPPQVAAVKARAVDLLLHAQPEVKMAEFSPSVVAAAALLAAAGEVAAANLHAFQASLAACPFVNSEKLRECGEVLAAAGGVGRGRAAPSADTPVTVLGHQRSASSASETDWINGGDAKKRCMGPPSQWG

SEQ ID NO: 1181 - protein, 190 aa, Zea mays subsp. mays
  peptide (1)..(190): Ceres Seq. ID no. 15180581
  misc_feature (43)..(180): Pfam Name: Cyclin, C-terminal domain Pfam Description: Cyclin, C-terminal domain
  misc_feature (1)..(150): Homolog of NCBI NO: 18916916 NR Description: cyclin [Oryza sativa (japonica cultivar-group)]
  misc_feature (1)..(178): Homolog of NCBI NO: 15229665 NR Description: cyclin family [Arabidopsis thaliana]
  misc_feature (1)..(169): Homolog of NCBI NO: 19070611 NR Description: D-type cyclin [Zea mays]
  misc_feature (1)..(165): Homolog of NCBI NO: 19070615 NR Description: D-type cyclin [Zea mays]
  misc_feature (1)..(138): Homolog of NCBI NO: 1076311 NR Description: cyclin delta-1 - Arabidopsis thaliana
  misc_feature (1)..(138): Homolog of NCBI NO: 3915635 NR Description: Cyclin delta-1
  misc_feature (1)..(181): Homolog of NCBI NO: 15223075 NR Description: cyclin delta-1 (CYCD1) [Arabidopsis thaliana]
  misc_feature (1)..(132): Homolog of NCBI NO: 25989347 NR Description: cyclin D1 [Helianthus tuberosus]
  misc_feature (1)..(188): Homolog of NCBI NO: 6448480 NR Description: cyclin D1 [Antirrhinum majus]
  misc_feature (1)..(181): Homolog of NCBI NO: 15236274 NR Description: cyclin family [Arabidopsis thaliana]
MQRVATFSTADIQRDEDFMFDAVTIRRMERVVLGALEWRARSVTPLAFLGFFLSACYPPPQHPPQVAAVKARAVDLLLHAQPEVKMAEFSPSVVAAAALLAAAGEVAAANLHAFQASLAACPFVNSEKLRECGEVLAAAGGVGRGRAAPSADTPVTVLGHQRSASSASETDWINGGDAKKRCMGPPSQWG

SEQ ID NO: 1182 - DNA, 2625 bp, Zea mays subsp. mays
  misc_feature (1)..(2625): Ceres Seq. ID no. 13586013
gcagcgaagcaggcctccttcttcacaagcgcttctgctaacaggcatcgtcgcatctctgtataggtatttctgaaaccagccgtcgtacgtccatcccaccgggagcaccggcgacgatgccgccgcgaacggtgtccgatgggggagacgacaacggcaccgacgttgctagccgaacgtcgtcgcaccgccgcacggagcacgggcatgggtacaaagtcggcgtcccaccggagaagaacctcctcgccgagatctctgacgcggtgaaggagacgttcttcgccgacgacccgctgcggcagtacaaggaccagcccaggtccaagaagatctggctcggcctgcagcacatcttcccggtgctcgactggagcaggcattactccctcggcaagttcaagggtgacttcatcgctgggctcaccattgccagcctctgcataccccaggacatcgggtattctaagcttgctaacttgccagcagaggtgggactatacagtagcttcgtgccgcctctgatatacgcagtgatgggcagctccagggacatagccatcggcccagtggccgtggtgtcgctgctgctcggtactctccttcagaatgagatcgaccccaagacacacccgctcgagtacaggcgcctagccttcacagcaacctttttcgcaggggtcactcaggcagccctcggattcttcaggctagggtttatcatagagttcttgtctcatgctgccattgtcggattcatggccggcgctgccatcaccattgcgcttcagcagctgaaaggattccttggaattgcaaacttcaccaagaaatccgatattgtatctgttatgaaatcagtttggggaaatgttcaccatgggtggaattggcagacaatactgataggagcgaccttcctggcattccttctggttgccaagtacattgggaaaaggaataaaaagctcttctgggtgtccgcaatcgcacctctcacttcggtgatcatatccacattttttgtgtacatcactcgtgcagataagcatggcgttgcaattgtcaagaacataaggaaaggcatcaacccaccttcagctagtctaatatacttcaccggcccatacttggcgacaggattcaaaattgggatagtagctggaatgataggcctaacggaagcgattgcaattggaagaacatttgcagccctcaaggattaccggatagatgggaacaaagaaatgatggctctagggaccatgaacattgttggttcactgacttcttgctacgtagccacaggttctttctcgcggtcagcagttaattacatggctggctgcaaaacagcagtgtcaaacgttgttatgtcaattgtcgtaatgcttactttgctactgatcaccccattgttcaagtacactccaaatgccatcctttcctcgatcatcatatcagcagtgcttggtttaattgactatgaatcggcttaccttatctggaaagttgacaaactggactttctagcatgcatgggagcattttttggagtcatattttcatcggtggagtatggcttgctcattgcggttgcaatatctcttgctaaaattcttctccaagtaacacggccaagaacagttttacttggaaaccttccacaaacaactatatacaggaatgtagaacagtatcctgatgctaccaaggttccaggggtgctgattgttagagtggactcagctatatacttcacaaactctaactatgttaaagagagaatcctgaggtggctaagagatgaggaggagcaacaacaggaccagaagttaacaaaaactgagtttctaattgttgacctgtctcctgtaattgatatcgacacaagtggaatccatgctttggaggagttggcgaaagctcttgaaaaacgcaaaattcagctggttcttaccaatcccgggccggcggtgatccagaagctccgctcagcgaaattcacggacatgattggtgaagacaacatattcctcacggtcggcgacgctgtgaagaaatttgctcctaagatggtcgataatgtctgatggagtttctgggtcatgacagtacgagcgagaagtctatctattttgtggcaaagttcagtggcaattatggatttatagagcagaaacaaaacagaacagaacgggagtaaataacatggttcgcggaatggtaaataaagaagatgctccggagttggagtgcatcacgtttgcgaggtgtggttggatagaaaacagatggtggcctagttgggcgtctatgtcagtccttgtggttgtggagtctgttccgcgttggcaagcactcagtgatggagatcaaatgcttcatggatcagcagatatgggtgcctgatgattaacatatcatcattgatcgtgaaagaagagttacctcgttggggtttcaggctttgtgtatatcttacagtacttagcccctttccttgtagtttatgtttttatgacgagcttttacatttggcttatatatgtatattctgtaatgttgatgcattgttaactgttaagtgttcctgaccaaaaaaaagggatgcaaaaacgt

SEQ ID NO: 1183 - protein, 658 aa, Zea mays subsp. mays
  peptide (1)..(658): Ceres Seq. ID no. 13586014
  misc_feature (194)..(505): Pfam Name: Sulfate transporter family Pfam Description: Sulfate transporter family
  misc_feature (1)..(656): Homolog of NCBI NO: 16197732 NR Description: sulfate transporter [Brassica napus]
  misc_feature (4)..(658): Homolog of NCBI NO: 24421085 NR Description: sulphate transporter [Triticum aestivum]
  misc_feature (3)..(658): Homolog of NCBI NO: 24421087 NR Description: sulphate transporter [Triticum aestivum]
  misc_feature (3)..(658): Homolog of NCBI NO: 24421089 NR Description: sulphate transporter [Triticum aestivum]
  misc_feature (3)..(658): Homolog of NCBI NO: 24421075 NR Description: sulphate transporter [Aegilops speltoides]
  misc_feature (3)..(658): Homolog of NCBI NO: 4850271 NR Description: putative high affinity sulfate transporter
  misc_feature (3)..(658): Homolog of NCBI NO: 7489442 NR Description: sulfate transport protein ST1, high affinity -
  misc_feature (3)..(658): Homolog of NCBI NO: 20162445 NR Description: putative sulphate transporter [Oryza sativa]
  misc_feature (3)..(658): Homolog of NCBI NO: 24414264 NR Description: Putative sulfate transporter
  misc_feature (3)..(658): Homolog of NCBI NO: 1217967 NR Description: high affinity sulphate transporter
MPPRTVSDGGDDNGTDVASRTSSHRRTEHGHGYKVGVPPEKNLLAEISDAVKETFFADDPLRQYKDQPRSKKIWLGLQHIFPVLDWSRHYSLGKFKGDFIAGLTIASLCIPQDIGYSKLANLPAEVGLYSSFVPPLIYAVMGSSRDIAIGPVAVVSLLLGTLLQNEIDPKTHPLEYRRLAFTATFFAGVTQAALGFFRLGFIIEFLSHAAIVGFMAGAAITIALQQLKGFLGIANFTKKSDIVSVMKSVWGNVHHGWNWQTILIGATFLAFLLVAKYIGKRNKKLFWVSAIAPLTSVIISTFFVYITRADKHGVAIVKNIRKGINPPSASLIYFTGPYLATGFKIGIVAGMIGLTEAIAIGRTFAALKDYRIDGNKEMMALGTMNIVGSLTSCYVATGSFSRSAVNYMAGCKTAVSNVVMSIVVMLTLLLITPLFKYTPNAILSSIIISAVLGLIDYESAYLIWKVDKLDFLACMGAFFGVIFSSVEYGLLIAVAISLAKILLQVTRPRTVLLGNLPQTTIYRNVEQYPDATKVPGVLIVRVDSAIYFTNSNYVKERILRWLRDEEEQQQDQKLTKTEFLIVDLSPVIDIDTSGIHALEELAKALEKRKIQLVLTNPGPAVIQKLRSAKFTDMIGEDNIFLTVGDAVKKFAPKMVDNV

SEQ ID NO: 1184 - protein, 518 aa, Zea mays subsp. mays
  peptide (1)..(518): Ceres Seq. ID no. 13586015
  misc_feature (54)..(365): Pfam Name: Sulfate transporter family Pfam Description: Sulfate transporter family
  misc_feature (1)..(516): Homolog of NCBI NO: 16197732 NR Description: sulfate transporter [Brassica napus]
  misc_feature (1)..(518): Homolog of NCBI NO: 24421085 NR Description: sulphate transporter [Triticum aestivum]
  misc_feature (1)..(518): Homolog of NCBI NO: 24421087 NR Description: sulphate transporter [Triticum aestivum]
  misc_feature (1)..(518): Homolog of NCBI NO: 24421089 NR Description: sulphate transporter [Triticum aestivum]
  misc_feature (1)..(518): Homolog of NCBI NO: 24421075 NR Description: sulphate transporter [Aegilops speltoides]
  misc_feature (1)..(518): Homolog of NCBI NO: 4850271 NR Description: putative high affinity sulfate transporter
  misc_feature (1)..(518): Homolog of NCBI NO: 7489442 NR Description: sulfate transport protein ST1, high affinity -
  misc_feature (1)..(518): Homolog of NCBI NO: 20162445 NR Description: putative sulphate transporter [Oryza sativa]
  misc_feature (1)..(518): Homolog of NCBI NO: 24414264 NR Description: Putative sulfate transporter
  misc_feature (1)..(518): Homolog of NCBI NO: 1217967 NR Description: high affinity sulphate transporter
MGSSRDIAIGPVAVVSLLLGTLLQNEIDPKTHPLEYRRLAFTATFFAGVTQAALGFFRLGFIIEFLSHAAIVGFMAGAAITIALQQLKGFLGIANFTKKSDIVSVMKSVWGNVHHGWNWQTILIGATFLAFLLVAKYIGKRNKKLFWVSAIAPLTSVIISTFFVYITRADKHGVAIVKNIRKGINPPSASLIYFTGPYLATGFKIGIVAGMIGLTEAIAIGRTFAALKDYRIDGNKEMMALGTMNIVGSLTSCYVATGSFSRSAVNYMAGCKTAVSNVVMSIVVMLTLLLITPLFKYTPNAILSSIIISAVLGLIDYESAYLIWKVDKLDFLACMGAFFGVIFSSVEYGLLIAVAISLAKILLQVTRPRTVLLGNLPQTTIYRNVEQYPDATKVPGVLIVRVDSAIYFTNSNYVKERILRWLRDEEEQQQDQKLTKTEFLIVDLSPVIDIDTSGIHALEELAKALEKRKIQLVLTNPGPAVIQKLRSAKFTDMIGEDNIFLTVGDAVKKFAPKMVDNV

SEQ ID NO: 1185 - protein, 444 aa, Zea mays subsp. mays
  peptide (1)..(444): Ceres Seq. ID no. 13586016
  misc_feature (1)..(291): Pfam Name: Sulfate transporter family Pfam Description: Sulfate transporter family
  misc_feature (1)..(442): Homolog of NCBI NO: 16197732 NR Description: sulfate transporter [Brassica napus]
  misc_feature (1)..(444): Homolog of NCBI NO: 24421085 NR Description: sulphate transporter [Triticum aestivum]
  misc_feature (1)..(444): Homolog of NCBI NO: 24421087 NR Description: sulphate transporter [Triticum aestivum]
  misc_feature (1)..(444): Homolog of NCBI NO: 24421089 NR Description: sulphate transporter [Triticum aestivum]
  misc_feature (1)..(444): Homolog of NCBI NO: 24421075 NR Description: sulphate transporter [Aegilops speltoides]
  misc_feature (1)..(444): Homolog of NCBI NO: 4850271 NR Description: putative high affinity sulfate transporter
  misc_feature (1)..(444): Homolog of NCBI NO: 7489442 NR Description: sulfate transport protein ST1, high affinity -
  misc_feature (1)..(444): Homolog of NCBI NO: 20162445 NR Description: putative sulphate transporter [Oryza sativa]
  misc_feature (1)..(444): Homolog of NCBI NO: 24414264 NR Description: Putative sulfate transporter
  misc_feature (1)..(444): Homolog of NCBI NO: 1217967 NR Description: high affinity sulphate transporter
MAGAAITIALQQLKGFLGIANFTKKSDIVSVMKSVWGNVHHGWNWQTILIGATFLAFLLVAKYIGKRNKKLFWVSAIAPLTSVIISTFFVYITRADKHGVAIVKNIRKGINPPSASLIYFTGPYLATGFKIGIVAGMIGLTEAIAIGRTFAALKDYRIDGNKEMMALGTMNIVGSLTSCYVATGSFSRSAVNYMAGCKTAVSNVVMSIVVMLTLLLITPLFKYTPNAILSSIIISAVLGLIDYESAYLIWKVDKLDFLACMGAFFGVIFSSVEYGLLIAVAISLAKILLQVTRPRTVLLGNLPQTTIYRNVEQYPDATKVPGVLIVRVDSAIYFTNSNYVKERILRWLRDEEEQQQDQKLTKTEFLIVDLSPVIDIDTSGIHALEELAKALEKRKIQLVLTNPGPAVIQKLRSAKFTDMIGEDNIFLTVGDAVKKFAPKMVDNV

SEQ ID NO: 1186 - DNA, 1014 bp, Zea mays subsp. mays
  misc_feature (1)..(1014): Ceres Seq. ID no. 15180055
gtcggtagccgtcggttcacttctccaggtaaggaaagggttcgtactcatggcgccgccgcagccaaagtcgggccttttcgttggcatcaacaagggtcatgtcgtcaccaagcgcgagctgcctccccgcccgtgccaccgcaaggggaaatcaacgaagagggtgtctatggtcaggggcctgatcagagaggttgctgggtttgctccttatgagaagcgtatcactgagcagcggcgcttgcgcgagcggagccatggcggacgacgactacaacgaaattgacatggggtatgaggatgagcccccagaaccggagattgaggaaggagctgaagaagagcctgagaacaacgaagatgcccctgatgacgtcataggtggtgagggtgaagataaggaacaggaaaagaccaagcgtgaacgcaaaacaacaaaatacatgacgaagtacgaacgtgcgcgcatcctgggtacacgagccttgcagataagcatgaatgctccagtcatggttgagcttgagggagaaactgaccctcttgagattgcaatgaaggagctgagagcgcgcaagatacccttcacgatcagacggtacttacctgatggaagctatgaagactggggagtagacgagctcattgtggaggactcctggaaacgccaggttggtggagactgaagacggatctacttggcatggaaagggtatgtggtgcagtgggtgtttcctgtagttacaagtcttcgttgccactatgagtggatactgtggcgaatgaaccaagacgaaatgatgttatgttaacgtctgtggttgccttgaactctggaaccgtaatgctagcatggttgttggttgcgctatgcttgttttgtttgtttcagtttcagacatgcagttgcagcgtagccaaatgcgtgctttgtgtgcctaatatctgacactggatgtgatcagtgttgtttatgccaaaggttgagagctgggctccggtggttcctgg

SEQ ID NO: 1187 - protein, 157 aa, Zea mays subsp. mays
  peptide (1)..(157): Ceres Seq. ID no. 15180056
  misc_feature (76)..(129): Pfam Name: RNA polymerase Rpb6 Pfam Description: RNA polymerase Rpb6
  misc_feature (19)..(148): Homolog of NCBI NO: 13786166 NR Description: polymerase II [Rattus norvegicus]
  misc_feature (16)..(150): Homolog of NCBI NO: 17531543 NR Description: gene producing two messages overlaping 3' 5', DNA-directed RNA polymerase subunit K/omega and a phycobilisome
  misc_feature (16)..(38): Homolog of NCBI NO: 34905016 NR Description: P0456B03.16 [Oryza sativa (japonica
  misc_feature (39)..(117): Homolog of NCBI NO: 34905016 NR Description: P0456B03.16 [Oryza sativa (japonica
  misc_feature (19)..(148): Homolog of NCBI NO: 11527390 NR Description: DNA directed RNA polymerase II polypeptide F
  misc_feature (19)..(148): Homolog of NCBI NO: 6573580 NR Description: Chain A, Hrpabc14.4, Essential Subunit Of Human
  misc_feature (16)..(157): Homolog of NCBI NO: 15224039 NR Description: DNA-directed RNA polymerase II subunit -related
  misc_feature (16)..(157): Homolog of NCBI NO: 15242235 NR Description: DNA-directed RNA polymerase II subunit-related
  misc_feature (16)..(156): Homolog of NCBI NO: 4960150 NR Description: DNA-directed RNA polymerase IIa [Nicotiana
  misc_feature (16)..(156): Homolog of NCBI NO: 22093730 NR Description: putative DNA-directed RNA polymerase Iib
MRSVSLSSGACASGAMADDDYNEIDMGYEDEPPEPEIEEGAEEEPENNEDAPDDVIGGEGEDKEQEKTKRERKTTKYMTKYERARILGTRALQISMNAPVMVELEGETDPLEIAMKELRARKIPFTIRRYLPDGSYEDWGVDELIVEDSWKRQVGGD

SEQ ID NO: 1188 - protein, 142 aa, Zea mays subsp. mays
  peptide (1)..(142): Ceres Seq. ID no. 15180057
  misc_feature (61)..(114): Pfam Name: RNA polymerase Rpb6 Pfam Description: RNA polymerase Rpb6
  misc_feature (4)..(133): Homolog of NCBI NO: 11527390 NR Description: DNA directed RNA polymerase II polypeptide F
  misc_feature (4)..(133): Homolog of NCBI NO: 6573580 NR Description: Chain A, Hrpabc14.4, Essential Subunit Of Human
  misc_feature (4)..(133): Homolog of NCBI NO: 13786166 NR Description: polymerase II [Rattus norvegicus]
  misc_feature (1)..(135): Homolog of NCBI NO: 17531543 NR Description: gene producing two messages overlaping 3' 5', DNA-directed RNA polymerase subunit K/omega and a phycobilisome
  misc_feature (1)..(23): Homolog of NCBI NO: 34905016 NR Description: P0456B03.16 [Oryza sativa (japonica
  misc_feature (24)..(102): Homolog of NCBI NO: 34905016 NR Description: P0456B03.16 [Oryza sativa (japonica
  misc_feature (1)..(142): Homolog of NCBI NO: 15224039 NR Description: DNA-directed RNA polymerase II subunit -related
  misc_feature (1)..(142): Homolog of NCBI NO: 15242235 NR Description: DNA-directed RNA polymerase II subunit-related
  misc_feature (1)..(141): Homolog of NCBI NO: 4960150 NR Description: DNA-directed RNA polymerase IIa [Nicotiana
  misc_feature (1)..(141): Homolog of NCBI NO: 22093730 NR Description: putative DNA-directed RNA polymerase Iib
MADDDYNEIDMGYEDEPPEPEIEEGAEEEPENNEDAPDDVIGGEGEDKEQEKTKRERKTTKYMTKYERARILGTRALQISMNAPVMVELEGETDPLEIAMKELRARKIPFTIRRYLPDGSYEDWGVDELIVEDSWKRQVGGD

SEQ ID NO: 1189 - protein, 132 aa, Zea mays subsp. mays
  peptide (1)..(132): Ceres Seq. ID no. 15180058
  misc_feature (51)..(104): Pfam Name: RNA polymerase Rpb6 Pfam Description: RNA polymerase Rpb6
  misc_feature (1)..(123): Homolog of NCBI NO: 11527390 NR Description: DNA directed RNA polymerase II polypeptide F
  misc_feature (1)..(123): Homolog of NCBI NO: 6573580 NR Description: Chain A, Hrpabc14.4, Essential Subunit Of Human
  misc_feature (1)..(123): Homolog of NCBI NO: 13786166 NR Description: polymerase II [Rattus norvegicus]
  misc_feature (1)..(125): Homolog of NCBI NO: 17531543 NR Description: gene producing two messages overlaping 3' 5', DNA-directed RNA polymerase subunit K/omega and a phycobilisome
  misc_feature (1)..(13): Homolog of NCBI NO: 34905016 NR Description: P0456B03.16 [Oryza sativa (japonica
  misc_feature (14)..(92): Homolog of NCBI NO: 34905016 NR Description: P0456B03.16 [Oryza sativa (japonica
  misc_feature (1)..(132): Homolog of NCBI NO: 15224039 NR Description: DNA-directed RNA polymerase II subunit -related
  misc_feature (1)..(132): Homolog of NCBI NO: 15242235 NR Description: DNA-directed RNA polymerase II subunit-related
  misc_feature (1)..(131): Homolog of NCBI NO: 4960150 NR Description: DNA-directed RNA polymerase IIa [Nicotiana
  misc_feature (1)..(131): Homolog of NCBI NO: 22093730 NR Description: putative DNA-directed RNA polymerase Iib
MGYEDEPPEPEIEEGAEEEPENNEDAPDDVIGGEGEDKEQEKTKRERKTTKYMTKYERARILGTRALQISMNAPVMVELEGETDPLEIAMKELRARKIPFTIRRYLPDGSYEDWGVDELIVEDSWKRQVGGD

SEQ ID NO: 1190 - DNA, 1346 bp, Zea mays subsp. mays
  misc_feature (1)..(1346): Ceres Seq. ID no. 12633565
  misc_feature: MA Experiment ID: 108529 Result: Down-regulated in Transcription
  misc_feature: MA Experiment 108529 PARAMETER Experiment Name: Zm_Imbibed_Seeds_P Parameter: Age (day) Value: 5 vs. 2
  misc_feature: MA Experiment 108529 PARAMETER Experiment Name: Zm_Imbibed_Seeds_P Parameter: Organism Value: Zea mays
  misc_feature: MA Experiment 108529 PARAMETER Experiment Name: Zm_Imbibed_Seeds_P Parameter: Plant Line Value: 35A19
  misc_feature: MA Experiment 108529 PARAMETER Experiment Name: Zm_Imbibed_Seeds_P Parameter: Tissue Value: Roots vs. Embryo
  misc_feature: MA Experiment ID: 20000478 Result: Down-regulated in Transcription
  misc_feature: MA Experiment 20000478 PARAMETER Experiment Name: Zm_5mM_SA_P Parameter: Age (day) Value: 11
  misc_feature: MA Experiment 20000478 PARAMETER Experiment Name: Zm_5mM_SA_P Parameter: Organism Value: Zea mays
  misc_feature: MA Experiment 20000478 PARAMETER Experiment Name: Zm_5mM_SA_P Parameter: Plant Line Value: 35A19
  misc_feature: MA Experiment 20000478 PARAMETER Experiment Name: Zm_5mM_SA_P Parameter: Timepoint (hr) Value: 72
  misc_feature: MA Experiment 20000478 PARAMETER Experiment Name: Zm_5mM_SA_P Parameter: Tissue Value: Aerial
  misc_feature: MA Experiment 20000478 PARAMETER Experiment Name: Zm_5mM_SA_P Parameter: Treatment Value: 5mM SA vs. No Treatment
  misc_feature: MA Experiment ID: 20000479 Result: Down-regulated in Transcription
  misc_feature: MA Experiment 20000479 PARAMETER Experiment Name: Zm_Drought_P Parameter: Age (day) Value: 10
  misc_feature: MA Experiment 20000479 PARAMETER Experiment Name: Zm_Drought_P Parameter: Organism Value: Zea mays
  misc_feature: MA Experiment 20000479 PARAMETER Experiment Name: Zm_Drought_P Parameter: Plant Line Value: 35A19
  misc_feature: MA Experiment 20000479 PARAMETER Experiment Name: Zm_Drought_P Parameter: Timepoint (hr) Value: 48
  misc_feature: MA Experiment 20000479 PARAMETER Experiment Name: Zm_Drought_P Parameter: Tissue Value: Aerial
  misc_feature: MA Experiment 20000479 PARAMETER Experiment Name: Zm_Drought_P Parameter: Treatment Value: Drought vs. No Drought
  misc_feature: MA Experiment ID: 20000480 Result: Down-regulated in Transcription
  misc_feature: MA Experiment 20000480 PARAMETER Experiment Name: Zm_Drought_P Parameter: Age (day) Value: 11
  misc_feature: MA Experiment 20000480 PARAMETER Experiment Name: Zm_Drought_P Parameter: Organism Value: Zea mays
  misc_feature: MA Experiment 20000480 PARAMETER Experiment Name: Zm_Drought_P Parameter: Plant Line Value: 35A19
  misc_feature: MA Experiment 20000480 PARAMETER Experiment Name: Zm_Drought_P Parameter: Timepoint (hr) Value: 72
  misc_feature: MA Experiment 20000480 PARAMETER Experiment Name: Zm_Drought_P Parameter: Tissue Value: Aerial
  misc_feature: MA Experiment 20000480 PARAMETER Experiment Name: Zm_Drought_P Parameter: Treatment Value: Drought vs. No Drought
aatcccattttcggtgcccgcgcccgtgccgtaccgtccctatcacaccggatcgccactcgctcccccccaccccactccgccccacctccgcgcctcagatccatccccaaccggcaaccctagcgccgggttcctcctcctcggatccgcccgccgccgcgcggactccattgccagaggtgatcgagggggagagatagagcttgggtggtcggattagggagagagggaggggaggatgtccagacggtcgttgaacccgagccggcgggtggcggacgggggtctgccgacagtcggaggcctgttccaccccaagtcacgctcgcctcccgtgcttactattgccctagtcgtcctgggtgtcattcttctcgtcgcctacttcaacagcggctcaggtcggttaaagattctcggtgtaactgttacaagcagagagtctgtgaccaggtctgaaggttcttgcacatcagaagttatgcgggtgcttccatatcttaaaaaggcatatggaaatgccatgcaaaaggttctccatgtaggccctgatagttgtacagtagtttctaatttgttgaaagaaggaaaggttgaagcttggggagtggagccttatgatttggaagatactgacagtacttgcaaaagcctcgtgcgcaagggctttgtccgtatgtctgatattaagttcccccttccgtaccgtccagattcttttaatcttgttgtggtgtcagatgctttagattatctgaccccaaggtatctgaacaaaacacttccagatttagcaagggtttccacagatggccttgttatttttgctggcaacccaggtcagcagaaagctaaggtctcagaactaccaaaatttggaagaccggcaaagttgcggagttcttcatggtggacacggtactttgtccagaccggcttgacagagaacgaagggccgctgaagaaattcgaagaggctacatccaagaacaaatacaaaccaggttgtcagatcttccacctgagttcgccaaggtgatgcgcatccatagcaccttgaattgttgtcacaccccctgccctcctccggttggcttgctcattgttcgtgtggaggaaatcgtcgcaaaaaaagccatcaggaataggttagcttatgtagagaggctccgacacttgttgctagaaattcactctggaaattaaattgtgtccccaatgattgcaaactggagccccgctgggatatatatgttagaactttcacgctgttgtaccgctgtgctatccatgtattgagcagtttgaaatgtaaagctcttgatgatcaaaaaaaaaaaaaa

SEQ ID NO: 1191 - protein, 266 aa, Zea mays subsp. mays
  peptide (1)..(266): Ceres Seq. ID no. 12633566
  misc_feature (1)..(264): Homolog of NCBI NO: 34895744 NR Description: P0019D06.30 [Oryza sativa (japonica
  misc_feature (1)..(262): Homolog of NCBI NO: 18408931 NR Description: expressed protein; protein id: At3g49720.1, by cDNA: 35598. [Arabidopsis thaliana] >gi|11285664|pir||T46038
  misc_feature (1)..(262): Homolog of NCBI NO: 21593192 NR Description: unknown [Arabidopsis thaliana]
  misc_feature (1)..(262): Homolog of NCBI NO: 18424995 NR Description: putative protein; protein id: At5g65810.1,
  misc_feature (96)..(262): Homolog of NCBI NO: 16649137 NR Description: Unknown protein [Arabidopsis thaliana]
  misc_feature (1)..(216): Homolog of NCBI NO: 9758568 NR Description: emb|CAB66910.1~gene_id:K22J17.2~similar to
MSRRSLNPSRRVADGGLPTVGGLFHPKSRSPPVLTIALVVLGVILLVAYFNSGSGRLKILGVTVTSRESVTRSEGSCTSEVMRVLPYLKKAYGNAMQKVLHVGPDSCTVVSNLLKEGKVEAWGVEPYDLEDTDSTCKSLVRKGFVRMSDIKFPLPYRPDSFNLVVVSDALDYLTPRYLNKTLPDLARVSTDGLVIFAGNPGQQKAKVSELPKFGRPAKLRSSSWWTRYFVQTGLTENEGPLKKFEEATSKNKYKPGCQIFHLSSPR

SEQ ID NO: 1192 - protein, 185 aa, Zea mays subsp. mays
  peptide (1)..(185): Ceres Seq. ID no. 12633567
  misc_feature (1)..(183): Homolog of NCBI NO: 34895744 NR Description: P0019D06.30 [Oryza sativa (japonica
  misc_feature (1)..(181): Homolog of NCBI NO: 18408931 NR Description: expressed protein; protein id: At3g49720.1, by cDNA: 35598. [Arabidopsis thaliana] >gi|11285664|pir||T46038
  misc_feature (1)..(181): Homolog of NCBI NO: 21593192 NR Description: unknown [Arabidopsis thaliana]
  misc_feature (1)..(181): Homolog of NCBI NO: 18424995 NR Description: putative protein; protein id: At5g65810.1,
  misc_feature (15)..(181): Homolog of NCBI NO: 16649137 NR Description: Unknown protein [Arabidopsis thaliana]
  misc_feature (1)..(135): Homolog of NCBI NO: 9758568 NR Description: emb|CAB66910.1~gene_id:K22J17.2~similar to
MRVLPYLKKAYGNAMQKVLHVGPDSCTVVSNLLKEGKVEAWGVEPYDLEDTDSTCKSLVRKGFVRMSDIKFPLPYRPDSFNLVVVSDALDYLTPRYLNKTLPDLARVSTDGLVIFAGNPGQQKAKVSELPKFGRPAKLRSSSWWTRYFVQTGLTENEGPLKKFEEATSKNKYKPGCQIFHLSSPR

SEQ ID NO: 1193 - protein, 171 aa, Zea mays subsp. mays
  peptide (1)..(171): Ceres Seq. ID no. 12633568
  misc_feature (1)..(169): Homolog of NCBI NO: 34895744 NR Description: P0019D06.30 [Oryza sativa (japonica
  misc_feature (1)..(167): Homolog of NCBI NO: 18408931 NR Description: expressed protein; protein id: At3g49720.1, by cDNA: 35598. [Arabidopsis thaliana] >gi|11285664|pir||T46038
  misc_feature (1)..(167): Homolog of NCBI NO: 21593192 NR Description: unknown [Arabidopsis thaliana]
  misc_feature (1)..(167): Homolog of NCBI NO: 18424995 NR Description: putative protein; protein id: At5g65810.1,
  misc_feature (1)..(167): Homolog of NCBI NO: 16649137 NR Description: Unknown protein [Arabidopsis thaliana]
  misc_feature (1)..(121): Homolog of NCBI NO: 9758568 NR Description: emb|CAB66910.1~gene_id:K22J17.2~similar to
MQKVLHVGPDSCTVVSNLLKEGKVEAWGVEPYDLEDTDSTCKSLVRKGFVRMSDIKFPLPYRPDSFNLVVVSDALDYLTPRYLNKTLPDLARVSTDGLVIFAGNPGQQKAKVSELPKFGRPAKLRSSSWWTRYFVQTGLTENEGPLKKFEEATSKNKYKPGCQIFHLSSPR

SEQ ID NO: 1194 - DNA, 1626 bp, Zea mays subsp. mays
  misc_feature (1)..(1626): Ceres Seq. ID no. 12350565
  misc_feature: MA Experiment ID: 108544 Result: Up-regulated in Transcription
gcacgagaccattacctagaacatcctaatcgaaaaacggcctttgcatttgcatgccatgcgcacacaaacacatgacatgacatgacatgacacaccagacttgacgctctcctgtctttatatgccggcgcggcgcgcgggcgtgcgtgcgcgcgcagatggcggaggaggagcagatggcggagctggtgatggcgcagtgcggggtgccgagcggcggcgagggggggcgcgtggccgccgggattcgcgtgggacggcggcgccgcggacgcgtcgcgtgggatgtacggcgatgcggtgccgccgtcgctcagcctgttcgactgccgccggcagcgtcgcggcggacccgttccaggcggtgcagcaggcgccgggcgccggtggtggtggggtggacgacgtcgccgggtggcagtatgctgctgcggctgggagcgagctggaggcggtgcagctgcagcaggagcagcagccgcgcgatgcggactcggggtccgaggtcagcgacatgcagggggacccagaggacgacggcgacggcgacgcgcaggggcgtggcggcggcaagggcggcgggaagcggcagcagtgcaagaacctcgaggcggagcggaagcggcggaagaagctcaacgagcggctctacaagctcaggtcgctcgtcccgaacatctccaagatggaccgcgcggcgatcctcggggacgccatcgactacatcgtgggcctgcagaaccaggtgaaggcgctgcaggacgagctggaggacccggcggacggcgccggcgcccccgacgtcctcctggaccacccgccgccggcgagcctggtggggctggagaacgacgagtcgccgcccacgagccaccagcacccgctcgccgggaccaagagggcccgtgcggcggcggaggaggaggaggaggagaaggggaatgacatggagccgcaggtggaggtgcggcaggtggaggccaacgagttcttcctgcagatgctgtgcgagcgccggccccgggcgcttcgtccagatcatggactccatcgccgacctgggactggaggtcaccaacgtcaacgtcacctcccacgagagcctcgtcctcaacgtcttccgcgccgccaggcgggacaatgaggtggcagtgcaggcggacagactgagggactcgctgctggaggtgatgcgggagccgtacggcgtatggtcgtcgtcggcgccgcccgtggggatgagcggcagcggcatcgccgacgtgaagcatgacagcgtggacatgaagctcgatggcatcatcgacgggcaggcggcaccgagcgtcgcagtgggggtttcagaggatcactacggcggctacaaccatctcctccaatacctcgcttgatcattatttaattgcgttcgttcatgttgaaagttcgatcaaactatcaaaggatggatcaactaataaaaacgggatccatatataagtaactgtgaattgcgatcattaattgtatgcatacaagcatatggtcgtggattaaagtttgttaattgggttttctcactgcttttctggatctttcttgtgttggttcaaacgagggcggaataataaagctatttcctcc

SEQ ID NO: 1195 - protein, 340 aa, Zea mays subsp. mays
  peptide (1)..(340): Ceres Seq. ID no. 12350566
  misc_feature (160)..(202): Pfam Name: Helix-loop-helix DNA-binding domain Pfam Description: Helix-loop-helix DNA-binding domain
  misc_feature (160)..(202): Pfam Name: Helix-loop-helix DNA-binding domain Pfam Description: Helix-loop-helix DNA-binding domain
  misc_feature (107)..(300): Homolog of NCBI NO: 25411751 NR Description: bHLH transcription factor [imported] -
  misc_feature (108)..(231): Homolog of NCBI NO: 15223363 NR Description: bHLH protein
  misc_feature (148)..(303): Homolog of NCBI NO: 32489775 NR Description: OSJNBb0018A10.6 [Oryza sativa (japonica
  misc_feature (148)..(303): Homolog of NCBI NO: 29466635 NR Description: Transcription Factor [Oryza sativa]
  misc_feature (113)..(250): Homolog of NCBI NO: 15222101 NR Description: bHLH protein; protein id: At1g12860.1
  misc_feature (113)..(250): Homolog of NCBI NO: 25513489 NR Description: F13K23.12 protein - Arabidopsis thaliana
  misc_feature (104)..(303): Homolog of NCBI NO: 22331357 NR Description: bHLH protein
  misc_feature (118)..(303): Homolog of NCBI NO: 34907076 NR Description: OSJNBa0093F16.27 [Oryza sativa (japonica
  misc_feature (113)..(300): Homolog of NCBI NO: 27650307 NR Description: bHLH transcription factor [Brassica napus]
  misc_feature (107)..(300): Homolog of NCBI NO: 22325727 NR Description: bHLH protein; protein id: At2g16910.1
  misc_feature (108)..(231): Homolog of NCBI NO: 15223363 NR Description: bHLH protein
  misc_feature (148)..(303): Homolog of NCBI NO: 32489775 NR Description: OSJNBb0018A10.6 [Oryza sativa (japonica
  misc_feature (148)..(303): Homolog of NCBI NO: 29466635 NR Description: Transcription Factor [Oryza sativa]
  misc_feature (113)..(250): Homolog of NCBI NO: 15222101 NR Description: bHLH protein; protein id: At1g12860.1
  misc_feature (113)..(250): Homolog of NCBI NO: 25513489 NR Description: F13K23.12 protein - Arabidopsis thaliana
  misc_feature (104)..(303): Homolog of NCBI NO: 22331357 NR Description: bHLH protein
  misc_feature (118)..(303): Homolog of NCBI NO: 34907076 NR Description: OSJNBa0093F16.27 [Oryza sativa (japonica
  misc_feature (113)..(300): Homolog of NCBI NO: 27650307 NR Description: bHLH transcription factor [Brassica napus]
  misc_feature (107)..(300): Homolog of NCBI NO: 22325727 NR Description: bHLH protein; protein id: At2g16910.1
  misc_feature (107)..(300): Homolog of NCBI NO: 25411751 NR Description: bHLH transcription factor [imported] -
MPARRAGVRARADGGGGADGGAGDGAVRGAERRRGGARGRRDSRGTAAPRTRRVGCTAMRCRRRSACSTAAGSVAADPFQAVQQAPGAGGGGVDDVAGWQYAAAAGSELEAVQLQQEQQPRDADSGSEVSDMQGDPEDDGDGDAQGRGGGKGGGKRQQCKNLEAERKRRKKLNERLYKLRSLVPNISKMDRAAILGDAIDYIVGLQNQVKALQDELEDPADGAGAPDVLLDHPPPASLVGLENDESPPTSHQHPLAGTKRARAAAEEEEEEKGNDMEPQVEVRQVEANEFFLQMLCERRPRALRPDHGLHRRPGTGGHQRQRHLPREPRPQRLPRRQAGQ

SEQ ID NO: 1196 - protein, 282 aa, Zea mays subsp. mays
  peptide (1)..(282): Ceres Seq. ID no. 12350567
  misc_feature (102)..(144): Pfam Name: Helix-loop-helix DNA-binding domain Pfam Description: Helix-loop-helix DNA-binding domain
  misc_feature (102)..(144): Pfam Name: Helix-loop-helix DNA-binding domain Pfam Description: Helix-loop-helix DNA-binding domain
  misc_feature (50)..(173): Homolog of NCBI NO: 15223363 NR Description: bHLH protein
  misc_feature (90)..(245): Homolog of NCBI NO: 32489775 NR Description: OSJNBb0018A10.6 [Oryza sativa (japonica
  misc_feature (90)..(245): Homolog of NCBI NO: 29466635 NR Description: Transcription Factor [Oryza sativa]
  misc_feature (55)..(192): Homolog of NCBI NO: 15222101 NR Description: bHLH protein; protein id: At1g12860.1
  misc_feature (55)..(192): Homolog of NCBI NO: 25513489 NR Description: F13K23.12 protein - Arabidopsis thaliana
  misc_feature (50)..(173): Homolog of NCBI NO: 15223363 NR Description: bHLH protein
  misc_feature (90)..(245): Homolog of NCBI NO: 29466635 NR Description: Transcription Factor [Oryza sativa]
  misc_feature (55)..(192): Homolog of NCBI NO: 25513489 NR Description: F13K23.12 protein - Arabidopsis thaliana
  misc_feature (49)..(242): Homolog of NCBI NO: 25411751 NR Description: bHLH transcription factor [imported] -
  misc_feature (49)..(242): Homolog of NCBI NO: 22325727 NR Description: bHLH protein; protein id: At2g16910.1
  misc_feature (55)..(242): Homolog of NCBI NO: 27650307 NR Description: bHLH transcription factor [Brassica napus]
  misc_feature (60)..(245): Homolog of NCBI NO: 34907076 NR Description: OSJNBa0093F16.27 [Oryza sativa (japonica
  misc_feature (46)..(245): Homolog of NCBI NO: 22331357 NR Description: bHLH protein
  misc_feature (55)..(192): Homolog of NCBI NO: 15222101 NR Description: bHLH protein; protein id: At1g12860.1
  misc_feature (90)..(245): Homolog of NCBI NO: 32489775 NR Description: OSJNBb0018A10.6 [Oryza sativa (japonica
  misc_feature (46)..(245): Homolog of NCBI NO: 22331357 NR Description: bHLH protein
  misc_feature (60)..(245): Homolog of NCBI NO: 34907076 NR Description: OSJNBa0093F16.27 [Oryza sativa (japonica
  misc_feature (55)..(242): Homolog of NCBI NO: 27650307 NR Description: bHLH transcription factor [Brassica napus]
  misc_feature (49)..(242): Homolog of NCBI NO: 22325727 NR Description: bHLH protein; protein id: At2g16910.1
  misc_feature (49)..(242): Homolog of NCBI NO: 25411751 NR Description: bHLH transcription factor [imported] -
MRCRRRSACSTAAGSVAADPFQAVQQAPGAGGGGVDDVAGWQYAAAAGSELEAVQLQQEQQPRDADSGSEVSDMQGDPEDDGDGDAQGRGGGKGGGKRQQCKNLEAERKRRKKLNERLYKLRSLVPNISKMDRAAILGDAIDYIVGLQNQVKALQDELEDPADGAGAPDVLLDHPPPASLVGLENDESPPTSHQHPLAGTKRARAAAEEEEEEKGNDMEPQVEVRQVEANEFFLQMLCERRPRALRPDHGLHRRPGTGGHQRQRHLPREPRPQRLPRRQAGQ

SEQ ID NO: 1197 - protein, 219 aa, Zea mays subsp. mays
  peptide (1)..(219): Ceres Seq. ID no. 12350568
  misc_feature (135)..(187): Pfam Name: Collagen triple helix repeat (20 copies) Pfam Description: Collagen triple helix repeat (20 copies)
  misc_feature (135)..(187): Pfam Name: Collagen triple helix repeat (20 copies) Pfam Description: Collagen triple helix repeat (20 copies)
  misc_feature (1)..(219): Homolog of NCBI NO: 13562004 NR Description: major ampullate spidroin 2-like protein [Nephila
  misc_feature (1)..(219): Homolog of NCBI NO: 13562004 NR Description: major ampullate spidroin 2-like protein [Nephila
  misc_feature (1)..(219): Homolog of NCBI NO: 9625624 NR Description: nuclear antigen EBNA1 [Human herpesvirus 4]
  misc_feature (1)..(204): Homolog of NCBI NO: 28564681 NR Description: OSJNBa0039C01.4 [Oryza sativa (japonica
  misc_feature (1)..(219): Homolog of NCBI NO: 13561986 NR Description: major ampullate spidroin 2 [Argiope trifasciata]
  misc_feature (1)..(219): Homolog of NCBI NO: 13562004 NR Description: major ampullate spidroin 2-like protein [Nephila
  misc_feature (1)..(219): Homolog of NCBI NO: 9625624 NR Description: nuclear antigen EBNA1 [Human herpesvirus 4]
  misc_feature (1)..(219): Homolog of NCBI NO: 13561986 NR Description: major ampullate spidroin 2 [Argiope trifasciata]
  misc_feature (1)..(219): Homolog of NCBI NO: 13562004 NR Description: major ampullate spidroin 2-like protein [Nephila
  misc_feature (1)..(219): Homolog of NCBI NO: 13562004 NR Description: major ampullate spidroin 2-like protein [Nephila
  misc_feature (21)..(219): Homolog of NCBI NO: 1263289 NR Description: fibroin-4
  misc_feature (50)..(219): Homolog of NCBI NO: 17536359 NR Description: Predicted CDS, cuticle collagen family member
  misc_feature (1)..(219): Homolog of NCBI NO: 13562004 NR Description: major ampullate spidroin 2-like protein [Nephila
  misc_feature (1)..(204): Homolog of NCBI NO: 28564681 NR Description: OSJNBa0039C01.4 [Oryza sativa (japonica
  misc_feature (1)..(219): Homolog of NCBI NO: 13562004 NR Description: major ampullate spidroin 2-like protein [Nephila
  misc_feature (1)..(219): Homolog of NCBI NO: 13562004 NR Description: major ampullate spidroin 2-like protein [Nephila
  misc_feature (50)..(219): Homolog of NCBI NO: 17536359 NR Description: Predicted CDS, cuticle collagen family member
  misc_feature (21)..(219): Homolog of NCBI NO: 1263289 NR Description: fibroin-4
  misc_feature (1)..(219): Homolog of NCBI NO: 13562004 NR Description: major ampullate spidroin 2-like protein [Nephila
  misc_feature (1)..(219): Homolog of NCBI NO: 13562004 NR Description: major ampullate spidroin 2-like protein [Nephila
MYGDAVPPSLSLFDCRRQRRGGPVPGGAAGAGRRWWWGGRRRRVAVCCCGWERAGGGAAAAGAAAARCGLGVRGQRHAGGPRGRRRRRRAGAWRRQGRREAAAVQEPRGGAEAAEEAQRAALQAQVARPEHLQDGPRGDPRGRHRLHRGPAEPGEGAAGRAGGPGGRRRRPRRPPGPPAAGEPGGAGERRVAAHEPPAPARRDQEGPCGGGGGGGGEGE

SEQ ID NO: 1198 - DNA, 1176 bp, Zea mays subsp. mays
  misc_feature (1)..(1176): Ceres Seq. ID no. 12567026
gcacgagaccattacctagaacatcctaatcgaaaaacggcctcacactgcagaggcttggacggacgggatggacatggcgcggtacgagtcatgctaccggcactggatcgccgggcaggaggcaggcctcgccgagctcgaggcggcgtcggccaatgccgccgcgggccgggcaacggacgccgagctgcggaccgtggtggagcggtgcatgctcgggtaccaggactacgccacccgcaggcgcgcgctgtcgcgggaggacggcgtcgccttcttcgccccgccctggtgcaccgccttcgagaactccgtgctctggctcgggggctgccgcccttcgctcaccgtccgcctgctctacaacctctccggggagggcctggaggcgcaggtggaggagctgctcggcggcctcagccaacggcgtcatcccgaccggggccctggggatcacgtccgctcagctggtgctcatcaacgacctccacagccggacggtgcaccaggagaacgccctgtcggaccggctcgccaccctgcaggaggacatcgccgaccgcccgctcctgcccatcgtgcggcagcgcgagctcgctgccgcggcacggttgggagctgcagctgctgccagcggaagctgcgacggcgcggcgcggcggcggctcagggcggcccggctaggagccgcggacgccgaggtggacgcggcgctggacagctacaaggccgcgctgtcgcggctgctggtggaggccgacgagctgaggatggcgacggcgcgggcgctggcgacggagatcctgacgcctcggcaagcggtggagatgctggcggcaggcaagcacctgcacctctccgtccgcgactggagccgccgtagggaagcagcngctggcgcacagcaacagcttggcgggcagagcgccggaacggacaacaccgtncgnccgagcacatgaaaggcccgccattcctcgcccttgcctgcagctagttagtagcatcccgtgtgtagcttggacaccacacaacctctctagtacccgcctgtctttctatatagaccgatcgatcaccatgtgcatggcgtccattaatatgtacaaagttggtgcttggtgtttttgttcctaagaacctaaattaaataccgcagtgcttgcatgagtt

SEQ ID NO: 1199 - protein, 271 aa, Zea mays subsp. mays
  peptide (1)..(271): Ceres Seq. ID no. 12567027
  misc_feature (1)..(116): Homolog of NCBI NO: 34896008 NR Description: ESTs AU057825(S21823),AU057072(S21123) correspond a region of the predicted gene.~Similar to Nicotiana glauca X
  misc_feature (6)..(118): Homolog of NCBI NO: 688423 NR Description: tumor-related protein [Nicotiana glauca x
  misc_feature (7)..(138): Homolog of NCBI NO: 30694832 NR Description: tumor-related protein-like [Arabidopsis thaliana]
  misc_feature (7)..(126): Homolog of NCBI NO: 9758930 NR Description: tumor-related protein-like [Arabidopsis thaliana]
  misc_feature (35)..(114): Homolog of NCBI NO: 15233977 NR Description: putative protein; protein id: At4g18680.1
  misc_feature (7)..(114): Homolog of NCBI NO: 15233979 NR Description: putative protein; protein id: At4g18690.1
  misc_feature (7)..(107): Homolog of NCBI NO: 15233972 NR Description: putative protein; protein id: At4g18660.1
MDMARYESCYRHWIAGQEAGLAELEAASANAAAGRATDAELRTVVERCMLGYQDYATRRRALSREDGVAFFAPPWCTAFENSVLWLGGCRPSLTVRLLYNLSGEGLEAQVEELLGGLSQRRHPDRGPGDHVRSAGAHQRPPQPDGAPGERPVGPARHPAGGHRRPPAPAHRAAARARCRGTVGSCSCCQRKLRRRGAAAAQGGPARSRGRRGGRGAGQLQGRAVAAAGGGRRAEDGDGAGAGDGDPDASASGGDAGGRQAPAPLRPRLEPP

SEQ ID NO: 1200 - protein, 269 aa, Zea mays subsp. mays
  peptide (1)..(269): Ceres Seq. ID no. 12567028
  misc_feature (5)..(112): Homolog of NCBI NO: 15233979 NR Description: putative protein; protein id: At4g18690.1
  misc_feature (5)..(105): Homolog of NCBI NO: 15233972 NR Description: putative protein; protein id: At4g18660.1
  misc_feature (1)..(114): Homolog of NCBI NO: 34896008 NR Description: ESTs AU057825(S21823),AU057072(S21123) correspond a region of the predicted gene.~Similar to Nicotiana glauca X
  misc_feature (4)..(116): Homolog of NCBI NO: 688423 NR Description: tumor-related protein [Nicotiana glauca x
  misc_feature (5)..(136): Homolog of NCBI NO: 30694832 NR Description: tumor-related protein-like [Arabidopsis thaliana]
  misc_feature (5)..(124): Homolog of NCBI NO: 9758930 NR Description: tumor-related protein-like [Arabidopsis thaliana]
  misc_feature (33)..(112): Homolog of NCBI NO: 15233977 NR Description: putative protein; protein id: At4g18680.1
MARYESCYRHWIAGQEAGLAELEAASANAAAGRATDAELRTVVERCMLGYQDYATRRRALSREDGVAFFAPPWCTAFENSVLWLGGCRPSLTVRLLYNLSGEGLEAQVEELLGGLSQRRHPDRGPGDHVRSAGAHQRPPQPDGAPGERPVGPARHPAGGHRRPPAPAHRAAARARCRGTVGSCSCCQRKLRRRGAAAAQGGPARSRGRRGGRGAGQLQGRAVAAAGGGRRAEDGDGAGAGDGDPDASASGGDAGGRQAPAPLRPRLEPP

SEQ ID NO: 1201 - protein, 268 aa, Zea mays subsp. mays
  peptide (1)..(268): Ceres Seq. ID no. 12567029
  misc_feature (100)..(146): Homolog of NCBI NO: 30694832 NR Description: tumor-related protein-like [Arabidopsis thaliana]
  misc_feature (176)..(244): Homolog of NCBI NO: 30694832 NR Description: tumor-related protein-like [Arabidopsis thaliana]
  misc_feature (100)..(146): Homolog of NCBI NO: 9758930 NR Description: tumor-related protein-like [Arabidopsis thaliana]
  misc_feature (176)..(256): Homolog of NCBI NO: 9758930 NR Description: tumor-related protein-like [Arabidopsis thaliana]
  misc_feature (100)..(142): Homolog of NCBI NO: 15233977 NR Description: putative protein; protein id: At4g18680.1
  misc_feature (179)..(248): Homolog of NCBI NO: 15233977 NR Description: putative protein; protein id: At4g18680.1
  misc_feature (100)..(138): Homolog of NCBI NO: 15233979 NR Description: putative protein; protein id: At4g18690.1
  misc_feature (173)..(267): Homolog of NCBI NO: 15233979 NR Description: putative protein; protein id: At4g18690.1
  misc_feature (100)..(151): Homolog of NCBI NO: 15233972 NR Description: putative protein; protein id: At4g18660.1
  misc_feature (176)..(259): Homolog of NCBI NO: 15233972 NR Description: putative protein; protein id: At4g18660.1
  misc_feature (246)..(246): Xaa is any aa, unknown or other
  misc_feature (264)..(264): Xaa is any aa, unknown or other
  misc_feature (265)..(265): Xaa is any aa, unknown or other
MPPRAGQRTPSCGPWWSGACSGTRTTPPAGARCRGRTASPSSPRPGAPPSRTPCSGSGAAALRSPSACSTTSPGRAWRRRWRSCSAASANGVIPTGALGITSAQLVLINDLHSRTVHQENALSDRLATLQEDIADRPLLPIVRQRELAAAARLGAAAAASGSCDGAARRRLRAARLGAADAEVDAALDSYKAALSRLLVEADELRMATARALATEILTPRQAVEMLAAGKHLHLSVRDWSRRREAXAGAQQQLGGQSAGTDNTXXPST

SEQ ID NO: 1202 - DNA, 1567 bp, Zea mays subsp. mays
  misc_feature (1)..(1567): Ceres Seq. ID no. 15177742
  misc_feature: MA Experiment ID: 108527 Result: Up-regulated in Transcription
  misc_feature: MA Experiment 108527 PARAMETER Experiment Name: Zm_5mM_NO_P Parameter: Age (day) Value: 8
  misc_feature: MA Experiment 108527 PARAMETER Experiment Name: Zm_5mM_NO_P Parameter: Organism Value: Zea mays
  misc_feature: MA Experiment 108527 PARAMETER Experiment Name: Zm_5mM_NO_P Parameter: Plant Line Value: 35A19
  misc_feature: MA Experiment 108527 PARAMETER Experiment Name: Zm_5mM_NO_P Parameter: Timepoint (hr) Value: 6
  misc_feature: MA Experiment 108527 PARAMETER Experiment Name: Zm_5mM_NO_P Parameter: Tissue Value: Aerial
  misc_feature: MA Experiment 108527 PARAMETER Experiment Name: Zm_5mM_NO_P Parameter: Treatment Value: 5mM NO vs. No Treatment
  misc_feature: MA Experiment ID: 108547 Result: Down-regulated in Transcription
  misc_feature: MA Experiment 108547 PARAMETER Experiment Name: Zm_Imbibed_Seeds_P Parameter: Age (day) Value: 4 vs. 2
  misc_feature: MA Experiment 108547 PARAMETER Experiment Name: Zm_Imbibed_Seeds_P Parameter: Organism Value: Zea mays
  misc_feature: MA Experiment 108547 PARAMETER Experiment Name: Zm_Imbibed_Seeds_P Parameter: Plant Line Value: 35A19
  misc_feature: MA Experiment 108547 PARAMETER Experiment Name: Zm_Imbibed_Seeds_P Parameter: Tissue Value: Aerial vs. Embryo
  misc_feature: MA Experiment ID: 20000535 Result: Down-regulated in Transcription
  misc_feature: MA Experiment 20000535 PARAMETER Experiment Name: Zm_Hybrid_Seed_Dev_P Parameter: DAP Value: 30 vs. 12
  misc_feature: MA Experiment 20000535 PARAMETER Experiment Name: Zm_Hybrid_Seed_Dev_P Parameter: Organism Value: Zea mays
  misc_feature: MA Experiment 20000535 PARAMETER Experiment Name: Zm_Hybrid_Seed_Dev_P Parameter: Plant Line Value: 35A19
  misc_feature: MA Experiment 20000535 PARAMETER Experiment Name: Zm_Hybrid_Seed_Dev_P Parameter: Tissue Value: Embryo vs. Unfert Floret
aatccctcctcctccataagagacaagaacgaggtcgtctcgccatcgccgccactcctatttaagagctgccggaggtgggggcagatccggcgagccgttcccgctgtccagattcaggaactagactcctccggtccggtcctccccctcccgccccgtctcgctccagcggctccacgccaccgtttgccattcactgccagaatggcgctcaacaaggagtacacgtacgcggagctggagaaggagccgtactggccgttcgagaagctgcgggtctccatcaccggggccggcgggttcatcgcctcccacatcgcgcgccgcctcaagggcgagggccactacgtcgtcgcctccgactggaagaggaacgagcacatgcccgaggacatgttctgccacgagttccacctcgtggacctgagggtcatggacaactgcctcaaggtcaccacgggggttgaccacgtgttcaacctcgcggctgacatgggtgggatggggttcatccagtccaaccactccgtcatcatgtacaacaacaccatgatcagctttaacgtgcttgaggctgctagaattaacggcgtcaagaggttcttctatgcatcaagtgcctgcatctaccctgagttcaagcagctggaaactgtagttagcttgaaggagtccgatgcttggcctgccgagcctcaagatgcctatggcctggaaaaactcgcgactgaggagctgtgcaagcactatacaaaggattttggcatcgagtgccggattggtcgctttcacaacatatatggtcccttcggcacatggaaaggtggaagggagaaggcgcctgctgctttctgcaggaaggctctgacctccacagggcgctttgagatgtggggtgatggcctgcaaaccagatccttcacatttattgatgaatgtgttgaaggtgtccttaggttaacaaagtccgatttccgtgagcctgtaaacattggaagcgacgaaatggtgagcatgaacgagatggcggaaatagtcctgagctttgagaacaagcagctgcccatccaccacatccccgggccggagggcgtgcgtgggcgcaactcagacaacacgctcatcaaggagaagcttggctgggctccgactatgaggctgaaggacgggctgaggatcacgtactcctggatcaaggagcagcttgagaaggagaaggccgagggcatggatctgtcggtctacggatcatccaaggtcgtgcagacacaggccccggttcagctcggctccctccgcgccgctgatggcaaggagtgaactttggctgcgccggtcagttgcagggcatgatataccagtaatacacagctgtttcagtttccatgatttgtagtcaccatttcttgattcacatttgactccacaagagaagaccatttggacgatggatgttttgtcacaagttacgggattcagttcaaatttgaactgaatacaaaatatcctgacacgatatctgtcgtccaaacacttataataatttccacgctgttttttttcc

SEQ ID NO: 1203 - protein, 312 aa, Zea mays subsp. mays
  peptide (1)..(312): Ceres Seq. ID no. 15177743
  misc_feature (1)..(275): Pfam Name: NAD dependent epimerase/dehydratase family Pfam Description: NAD dependent epimerase/dehydratase family
  misc_feature (1)..(276): Homolog of NCBI NO: 21326465 NR Description: UDP-glucuronate decarboxylase 1 [Rattus
  misc_feature (1)..(278): Homolog of NCBI NO: 23138039 NR Description: hypothetical protein [Cytophaga hutchinsonii]
  misc_feature (1)..(278): Homolog of NCBI NO: 23137167 NR Description: hypothetical protein [Cytophaga hutchinsonii]
  misc_feature (1)..(273): Homolog of NCBI NO: 22298175 NR Description: GDP-fucose synthetase [Thermosynechococcus
  misc_feature (1)..(276): Homolog of NCBI NO: 24212751 NR Description: dTDPglucose 4,6-dehydratase
  misc_feature (1)..(114): Homolog of NCBI NO: 23008810 NR Description: hypothetical protein [Magnetospirillum
  misc_feature (1)..(278): Homolog of NCBI NO: 9937230 NR Description: sugar epimerase BlmG [Streptomyces verticillus]
  misc_feature (1)..(299): Homolog of NCBI NO: 28170704 NR Description: Ata17 protein [Saccharothrix mutabilis subsp.
  misc_feature (1)..(312): Homolog of NCBI NO: 15241945 NR Description: NAD-dependent epimerase/dehydratase family
  misc_feature (1)..(312): Homolog of NCBI NO: 37534380 NR Description: putative epimerase/dehydratase
MPEDMFCHEFHLVDLRVMDNCLKVTTGVDHVFNLAADMGGMGFIQSNHSVIMYNNTMISFNVLEAARINGVKRFFYASSACIYPEFKQLETVVSLKESDAWPAEPQDAYGLEKLATEELCKHYTKDFGIECRIGRFHNIYGPFGTWKGGREKAPAAFCRKALTSTGRFEMWGDGLQTRSFTFIDECVEGVLRLTKSDFREPVNIGSDEMVSMNEMAEIVLSFENKQLPIHHIPGPEGVRGRNSDNTLIKEKLGWAPTMRLKDGLRITYSWIKEQLEKEKAEGMDLSVYGSSKVVQTQAPVQLGSLRAADGKE

SEQ ID NO: 1204 - protein, 440 aa, Zea mays subsp. mays
  peptide (1)..(440): Ceres Seq. ID no. 15177744
  misc_feature (94)..(403): Pfam Name: NAD dependent epimerase/dehydratase family Pfam Description: NAD dependent epimerase/dehydratase family
  misc_feature (90)..(404): Homolog of NCBI NO: 21326465 NR Description: UDP-glucuronate decarboxylase 1 [Rattus
  misc_feature (91)..(406): Homolog of NCBI NO: 23138039 NR Description: hypothetical protein [Cytophaga hutchinsonii]
  misc_feature (91)..(406): Homolog of NCBI NO: 23137167 NR Description: hypothetical protein [Cytophaga hutchinsonii]
  misc_feature (93)..(401): Homolog of NCBI NO: 22298175 NR Description: GDP-fucose synthetase [Thermosynechococcus
  misc_feature (90)..(404): Homolog of NCBI NO: 24212751 NR Description: dTDPglucose 4,6-dehydratase
  misc_feature (96)..(242): Homolog of NCBI NO: 23008810 NR Description: hypothetical protein [Magnetospirillum
  misc_feature (96)..(406): Homolog of NCBI NO: 9937230 NR Description: sugar epimerase BlmG [Streptomyces verticillus]
  misc_feature (88)..(427): Homolog of NCBI NO: 28170704 NR Description: Ata17 protein [Saccharothrix mutabilis subsp.
  misc_feature (76)..(440): Homolog of NCBI NO: 15241945 NR Description: NAD-dependent epimerase/dehydratase family
  misc_feature (75)..(440): Homolog of NCBI NO: 37534380 NR Description: putative epimerase/dehydratase
NPSSSIRDKNEVVSPSPPLLFKSCRRWGQIRRAVPAVQIQELDSSGPVLPLPPRLAPAAPRHRLPFTARMALNKEYTYAELEKEPYWPFEKLRVSITGAGGFIASHIARRLKGEGHYVVASDWKRNEHMPEDMFCHEFHLVDLRVMDNCLKVTTGVDHVFNLAADMGGMGFIQSNHSVIMYNNTMISFNVLEAARINGVKRFFYASSACIYPEFKQLETVVSLKESDAWPAEPQDAYGLEKLATEELCKHYTKDFGIECRIGRFHNIYGPFGTWKGGREKAPAAFCRKALTSTGRFEMWGDGLQTRSFTFIDECVEGVLRLTKSDFREPVNIGSDEMVSMNEMAEIVLSFENKQLPIHHIPGPEGVRGRNSDNTLIKEKLGWAPTMRLKDGLRITYSWIKEQLEKEKAEGMDLSVYGSSKVVQTQAPVQLGSLRAADGKE

SEQ ID NO: 1205 - protein, 371 aa, Zea mays subsp. mays
  peptide (1)..(371): Ceres Seq. ID no. 15177745
  misc_feature (25)..(334): Pfam Name: NAD dependent epimerase/dehydratase family Pfam Description: NAD dependent epimerase/dehydratase family
  misc_feature (21)..(335): Homolog of NCBI NO: 21326465 NR Description: UDP-glucuronate decarboxylase 1 [Rattus
  misc_feature (22)..(337): Homolog of NCBI NO: 23138039 NR Description: hypothetical protein [Cytophaga hutchinsonii]
  misc_feature (22)..(337): Homolog of NCBI NO: 23137167 NR Description: hypothetical protein [Cytophaga hutchinsonii]
  misc_feature (24)..(332): Homolog of NCBI NO: 22298175 NR Description: GDP-fucose synthetase [Thermosynechococcus
  misc_feature (21)..(335): Homolog of NCBI NO: 24212751 NR Description: dTDPglucose 4,6-dehydratase
  misc_feature (27)..(173): Homolog of NCBI NO: 23008810 NR Description: hypothetical protein [Magnetospirillum
  misc_feature (27)..(337): Homolog of NCBI NO: 9937230 NR Description: sugar epimerase BlmG [Streptomyces verticillus]
  misc_feature (19)..(358): Homolog of NCBI NO: 28170704 NR Description: Ata17 protein [Saccharothrix mutabilis subsp.
  misc_feature (7)..(371): Homolog of NCBI NO: 15241945 NR Description: NAD-dependent epimerase/dehydratase family
  misc_feature (6)..(371): Homolog of NCBI NO: 37534380 NR Description: putative epimerase/dehydratase
MALNKEYTYAELEKEPYWPFEKLRVSITGAGGFIASHIARRLKGEGHYVVASDWKRNEHMPEDMFCHEFHLVDLRVMDNCLKVTTGVDHVFNLAADMGGMGFIQSNHSVIMYNNTMISFNVLEAARINGVKRFFYASSACIYPEFKQLETVVSLKESDAWPAEPQDAYGLEKLATEELCKHYTKDFGIECRIGRFHNIYGPFGTWKGGREKAPAAFCRKALTSTGRFEMWGDGLQTRSFTFIDECVEGVLRLTKSDFREPVNIGSDEMVSMNEMAEIVLSFENKQLPIHHIPGPEGVRGRNSDNTLIKEKLGWAPTMRLKDGLRITYSWIKEQLEKEKAEGMDLSVYGSSKVVQTQAPVQLGSLRAADGKE

SEQ ID NO: 1206 - DNA, 1787 bp, Zea mays subsp. mays
  misc_feature (1)..(1787): Ceres Seq. ID no. 12372734
atcagtgggtgggtgggtggttcgcctcctcatcctctcctccccgcacgtccacggcgatggcgcccgcgcccccgcactgctgacccacccccgccgcgcactctcatgaccgtggtttggtaggtggggcggaggttggtaggccgggacgtgccggcaggcggttacgggaggcgcggccgcgatcccgggccggatctggacgccgcgatggaggacgccgttgccgctgagaatgggatcgagggggagggctacgtcgtcgtcaaggcggcggcggccgcggaggcggagggggactccggcgccagcgatcgtggggatctcgccgcccccgctgaggacgcggcgccggccggatctgaggacgccccggccccggcggtgacgccggacgagaccgcggcacctgccaaggcgccggccaggaagggtggatccggggacgccgccggggtccggaaggcgaggccgcagaacggcagggtgcccgccgccgccgccaccgccgcgccgagggtgaagaagcccggggtcctctcgcagagcgcctccttcccggcgcggggtgccgccgccaagaaggcctcggcggttgctactcccaagcaggccaagggcgtcgtgaccaatggatcagaggcggcagcaggccgggcagccgagaagaaggcgaattcagcgcggacacctgtcgctcgccggtcgatgcctgtcaagtctggatcagcggatgcggccgcccccaaatgacgcaattcccgctgtccaagagccacatgaaaacaccgacaagccattgaaacaaatgcagccagggaaaacagaggatgatgtgcgctccaccacatcaagtaccaatactccgcgtgcagcagctcgcaagagtgctgctgttgctgctggttttagtttcagattggaggagcgtgctgagaagagaaaggagttcttccaaaagcttgaagagaaaatccacgcaaaggagctggaaaaaacaaatctgcaggagaaatctaaggagagccaagaggctgagatcaaactgctgaggaagagcctaacatttaaagccacacctatgccaagcttttacaaggagcagccacccaaagttgagttgaaaaagattcccccaacacgcgctaggtcgccaaagctcggccggcacaagccagccaattctgccactgctgcttctgcggatggttctgtatcatgtgagagcccacggagcactgcaaattcgggcaaggtaaatgaagcgatggaaaacaacaaacctcatgcccctgctagaaaacctgttcagaggccagtcatgaaagctccatcacaggcgtctgccaccacaaaggctgaagcaagacccgtggtcacaaggccaaagatctcaaactcgaaacctaaggcttcaagggcgaaggttgcgcgagcgcaagaaaccccaggctgaagcccctccttcagaacctgctgctccagaagatttcacggttgaacatggcattggagacgccacaggtcctgatctgaccgcgcaattggttgcttcgaacgaagtcccagtccatggttgatcagctgagcattttgcatatttattcccttcttgcagttctgtgaatagcgagggtgtgtgcttcattggaagttgaatcgctcgaagtgtcatggtttatcgtttccggagtagacatccattttgtttttcagcttgtcattgggcatgccatgtatattgcttggtattgtgttcttgtttaaaattcccagtcttgtgc

SEQ ID NO: 1207 - protein, 274 aa, Zea mays subsp. mays
  peptide (1)..(274): Ceres Seq. ID no. 12372735
  misc_feature (38)..(88): Pfam Name: Treacher Collins syndrome protein Treacle Pfam Description: Treacher Collins syndrome protein Treacle
  misc_feature (55)..(217): Homolog of NCBI NO: 6175167 NR Description: unknown protein [Arabidopsis thaliana]
  misc_feature (55)..(217): Homolog of NCBI NO: 21618286 NR Description: unknown [Arabidopsis thaliana]
  misc_feature (41)..(243): Homolog of NCBI NO: 34393229 NR Description: putative seed specific protein
  misc_feature (53)..(190): Homolog of NCBI NO: 15228950 NR Description: unknown protein; protein id: At3g23090.1
  misc_feature (53)..(190): Homolog of NCBI NO: 9294199 NR Description: gb|AAF04893.1~gene_id:MXC7.13~similar to unknown
  misc_feature (1)..(230): Homolog of NCBI NO: 34897180 NR Description: unknown protein [Oryza sativa (japonica
  misc_feature (49)..(265): Homolog of NCBI NO: 15224733 NR Description: unknown protein; protein id: At2g25480.1
  misc_feature (40)..(272): Homolog of NCBI NO: 18417986 NR Description: putative protein
  misc_feature (51)..(261): Homolog of NCBI NO: 25408425 NR Description: hypothetical protein At2g35880 [imported] -
  misc_feature (51)..(261): Homolog of NCBI NO: 18403980 NR Description: expressed protein
MDQRRQQAGQPRRRRIQRGHLSLAGRCLSSLDQRMRPPPNDAIPAVQEPHENTDKPLKQMQPGKTEDDVRSTTSSTNTPRAAARKSAAVAAGFSFRLEERAEKRKEFFQKLEEKIHAKELEKTNLQEKSKESQEAEIKLLRKSLTFKATPMPSFYKEQPPKVELKKIPPTRARSPKLGRHKPANSATAASADGSVSCESPRSTANSGKVNEAMENNKPHAPARKPVQRPVMKAPSQASATTKAEARPVVTRPKISNSKPKASRAKVARAQETPG

SEQ ID NO: 1208 - protein, 240 aa, Zea mays subsp. mays
  peptide (1)..(240): Ceres Seq. ID no. 12372736
  misc_feature (4)..(54): Pfam Name: Treacher Collins syndrome protein Treacle Pfam Description: Treacher Collins syndrome protein Treacle
  misc_feature (21)..(183): Homolog of NCBI NO: 6175167 NR Description: unknown protein [Arabidopsis thaliana]
  misc_feature (21)..(183): Homolog of NCBI NO: 21618286 NR Description: unknown [Arabidopsis thaliana]
  misc_feature (7)..(209): Homolog of NCBI NO: 34393229 NR Description: putative seed specific protein
  misc_feature (19)..(156): Homolog of NCBI NO: 15228950 NR Description: unknown protein; protein id: At3g23090.1
  misc_feature (19)..(156): Homolog of NCBI NO: 9294199 NR Description: gb|AAF04893.1~gene_id:MXC7.13~similar to unknown
  misc_feature (1)..(196): Homolog of NCBI NO: 34897180 NR Description: unknown protein [Oryza sativa (japonica
  misc_feature (15)..(231): Homolog of NCBI NO: 15224733 NR Description: unknown protein; protein id: At2g25480.1
  misc_feature (6)..(238): Homolog of NCBI NO: 18417986 NR Description: putative protein
  misc_feature (17)..(227): Homolog of NCBI NO: 25408425 NR Description: hypothetical protein At2g35880 [imported] -
  misc_feature (17)..(227): Homolog of NCBI NO: 18403980 NR Description: expressed protein
MRPPPNDAIPAVQEPHENTDKPLKQMQPGKTEDDVRSTTSSTNTPRAAARKSAAVAAGFSFRLEERAEKRKEFFQKLEEKIHAKELEKTNLQEKSKESQEAEIKLLRKSLTFKATPMPSFYKEQPPKVELKKIPPTRARSPKLGRHKPANSATAASADGSVSCESPRSTANSGKVNEAMENNKPHAPARKPVQRPVMKAPSQASATTKAEARPVVTRPKISNSKPKASRAKVARAQETPG

SEQ ID NO: 1209 - protein, 215 aa, Zea mays subsp. mays
  peptide (1)..(215): Ceres Seq. ID no. 12372737
  misc_feature (1)..(158): Homolog of NCBI NO: 6175167 NR Description: unknown protein [Arabidopsis thaliana]
  misc_feature (1)..(158): Homolog of NCBI NO: 21618286 NR Description: unknown [Arabidopsis thaliana]
  misc_feature (1)..(184): Homolog of NCBI NO: 34393229 NR Description: putative seed specific protein
  misc_feature (1)..(131): Homolog of NCBI NO: 15228950 NR Description: unknown protein; protein id: At3g23090.1
  misc_feature (1)..(131): Homolog of NCBI NO: 9294199 NR Description: gb|AAF04893.1~gene_id:MXC7.13~similar to unknown
  misc_feature (1)..(171): Homolog of NCBI NO: 34897180 NR Description: unknown protein [Oryza sativa (japonica
  misc_feature (1)..(206): Homolog of NCBI NO: 15224733 NR Description: unknown protein; protein id: At2g25480.1
  misc_feature (1)..(213): Homolog of NCBI NO: 18417986 NR Description: putative protein
  misc_feature (1)..(202): Homolog of NCBI NO: 25408425 NR Description: hypothetical protein At2g35880 [imported] -
  misc_feature (1)..(202): Homolog of NCBI NO: 18403980 NR Description: expressed protein
MQPGKTEDDVRSTTSSTNTPRAAARKSAAVAAGFSFRLEERAEKRKEFFQKLEEKIHAKELEKTNLQEKSKESQEAEIKLLRKSLTFKATPMPSFYKEQPPKVELKKIPPTRARSPKLGRHKPANSATAASADGSVSCESPRSTANSGKVNEAMENNKPHAPARKPVQRPVMKAPSQASATTKAEARPVVTRPKISNSKPKASRAKVARAQETPG

SEQ ID NO: 1210 - DNA, 1571 bp, Zea mays subsp. mays
  misc_feature (1)..(1571): Ceres Seq. ID no. 13586135
  misc_feature: MA Experiment ID: 108527 Result: Down-regulated in Transcription
  misc_feature: MA Experiment 108527 PARAMETER Experiment Name: Zm_5mM_NO_P Parameter: Age (day) Value: 8
  misc_feature: MA Experiment 108527 PARAMETER Experiment Name: Zm_5mM_NO_P Parameter: Organism Value: Zea mays
  misc_feature: MA Experiment 108527 PARAMETER Experiment Name: Zm_5mM_NO_P Parameter: Plant Line Value: 35A19
  misc_feature: MA Experiment 108527 PARAMETER Experiment Name: Zm_5mM_NO_P Parameter: Timepoint (hr) Value: 6
  misc_feature: MA Experiment 108527 PARAMETER Experiment Name: Zm_5mM_NO_P Parameter: Tissue Value: Aerial
  misc_feature: MA Experiment 108527 PARAMETER Experiment Name: Zm_5mM_NO_P Parameter: Treatment Value: 5mM NO vs. No Treatment
  misc_feature: MA Experiment ID: 108534 Result: Down-regulated in Transcription
  misc_feature: MA Experiment 108534 PARAMETER Experiment Name: Zm_4deg_Cold_P Parameter: Age (hr) Value: 8
  misc_feature: MA Experiment 108534 PARAMETER Experiment Name: Zm_4deg_Cold_P Parameter: Organism Value: Zea mays
  misc_feature: MA Experiment 108534 PARAMETER Experiment Name: Zm_4deg_Cold_P Parameter: Plant Line Value: 35A19
  misc_feature: MA Experiment 108534 PARAMETER Experiment Name: Zm_4deg_Cold_P Parameter: Temperature (deg C) Value: 4 vs. 22
  misc_feature: MA Experiment 108534 PARAMETER Experiment Name: Zm_4deg_Cold_P Parameter: Timepoint (hr) Value: 6
  misc_feature: MA Experiment 108534 PARAMETER Experiment Name: Zm_4deg_Cold_P Parameter: Tissue Value: Aerial
  misc_feature: MA Experiment ID: 108535 Result: Down-regulated in Transcription
  misc_feature: MA Experiment 108535 PARAMETER Experiment Name: Zm_Meristem_P Parameter: Age (day) Value: 8
  misc_feature: MA Experiment 108535 PARAMETER Experiment Name: Zm_Meristem_P Parameter: Organism Value: Zea mays
  misc_feature: MA Experiment 108535 PARAMETER Experiment Name: Zm_Meristem_P Parameter: Plant Line Value: 35A19
  misc_feature: MA Experiment 108535 PARAMETER Experiment Name: Zm_Meristem_P Parameter: Tissue Value: Root Meristem vs. Above Root Meristem
  misc_feature: MA Experiment ID: 108543 Result: Down-regulated in Transcription
  misc_feature: MA Experiment ID: 108556 Result: Up-regulated in Transcription
  misc_feature: MA Experiment 108556 PARAMETER Experiment Name: Zm_Drought_P Parameter: Age (day) Value: 9
  misc_feature: MA Experiment 108556 PARAMETER Experiment Name: Zm_Drought_P Parameter: Organism Value: Zea mays
  misc_feature: MA Experiment 108556 PARAMETER Experiment Name: Zm_Drought_P Parameter: Plant Line Value: 35A19
  misc_feature: MA Experiment 108556 PARAMETER Experiment Name: Zm_Drought_P Parameter: Timepoint (hr) Value: 24
  misc_feature: MA Experiment 108556 PARAMETER Experiment Name: Zm_Drought_P Parameter: Tissue Value: Aerial
  misc_feature: MA Experiment 108556 PARAMETER Experiment Name: Zm_Drought_P Parameter: Treatment Value: Drought vs. No Drought
  misc_feature: MA Experiment ID: 20000488 Result: Down-regulated in Transcription
  misc_feature: MA Experiment 20000488 PARAMETER Experiment Name: Zm_50mM_NH4NO3_L_to_H_P Parameter: Organism Value: Zea mays
  misc_feature: MA Experiment 20000488 PARAMETER Experiment Name: Zm_50mM_NH4NO3_L_to_H_P Parameter: Timepoint (hr) Value: 8
  misc_feature: MA Experiment 20000488 PARAMETER Experiment Name: Zm_50mM_NH4NO3_L_to_H_P Parameter: Tissue Value: Leaves
  misc_feature: MA Experiment 20000488 PARAMETER Experiment Name: Zm_50mM_NH4NO3_L_to_H_P Parameter: Treatment Value: 50mM NH4NO3 vs. 100mM Mannitol
attaatttagtcagcatcacatcgcaatcacaagactcctatacccaaacccacgccccccgcccccctattattctatatatataatacacacactagtgtggagtagtacttcaattggcgttggccgaagaagaggagaagcgaagcaagcaggcttcgagaacaagactgcagggggagggggaggaccaagcgaaaggggaactagagcaagatgggcggcgcactgctgcttgcgctcctcctcgtctctgctgctgccgcccctcaggtacttggagttggcaatggagacaatcacatgagaatcatccaggaggacatcatcgagacagtcaacaaccatcccagtgctgggtggacagcctcacgtaatccttacttttcaaactataccattgcgcaatttaagcacatacttggagtgaaaccagcaccacagaatgcactaagcaatgttcctgtcaaaacttattcaagatcactggaacttccaaaagagtttgacgctagatctgcatggtcccgttgcagcacaattgggaacatacttgatcaaggtcactgtggctcttgttgggcttttggtgctgtggagtgcctccaggaccgtttttgcattcacctcaacatgagcattttactttcagtcaatgacctactggcatgctgcggttttatgtgcggcgatgggtgtgatggaggctatcctatagaggcatggcgctactttgttcaaaatggtgttgttacggatgagtgtgatccatacttcgacccggtcggttgcaagcatcctggatgcgaacctgcttatcctacaccaaagtgtgaaaagaaatgcaaggagcagaaccaagtttggcaggaaaagaagcatttcagcattgatgcgtacagaataaattcagatccacatgacataatggcagaggtctacaaaaatggtcctgtagaagttgctttcacagtttacgaggatttcgcacactacaaatctggagtgtacaagcacatcaccggtggcattatgggtggccatgccgtcaagttgattggatggggaaccagtgatgctggagaagattactggcttctggcaaatcagtggaatagaggctggggcgatgatggatacttcaagatcataaggggcaaaaatgaatgtggcatcgaggagggcgttgttgctggaatgccatccacaaagaatatggttccaaacttcggcggtgccgttggaagagctatagtttaatggttacgtttgcatggcctcaaatgctgttggaattagctaaagtaattttaaaatgcaattgttaaagggccacgatggtgtatgtattttgtacactagctcatttcaaaggtcgttatgttgctggtgccacatcactttggtcaagtggaataatattaataagaactagaatttcgattcgaaaaaaaaaaaaaaaaaaaaaaaaaaaaaaaaaaaaaaaaaaaaaaaaaaaaaaaaaaaaaaaaaaaaaaaaaaaaaaaaaaaaaaaaaaaaaaaaaaaaaaaaaaaaaaaaaattttttttt

SEQ ID NO: 1211 - protein, 347 aa, Zea mays subsp. mays
  peptide (1)..(347): Ceres Seq. ID no. 15220786
  misc_feature (93)..(328): Pfam Name: Papain family cysteine protease Pfam Description: Papain family cysteine protease
  misc_feature (32)..(335): Homolog of NCBI NO: 18378947 NR Description: expressed protein [Arabidopsis thaliana]
  misc_feature (3)..(334): Homolog of NCBI NO: 6165885 NR Description: cathepsin B-like cysteine proteinase [Ipomoea
  misc_feature (3)..(342): Homolog of NCBI NO: 38639325 NR Description: cathepsin B-like cysteine proteinase [Solanum
  misc_feature (5)..(334): Homolog of NCBI NO: 2129942 NR Description: cathepsin B-like cysteine proteinase (EC
  misc_feature (3)..(334): Homolog of NCBI NO: 14582576 NR Description: cathepsin B-like cysteine proteinase [Ipomoea
  misc_feature (5)..(334): Homolog of NCBI NO: 609175 NR Description: cathepsin B-like cysteine proteinase [Nicotiana
  misc_feature (4)..(304): Homolog of NCBI NO: 21695 NR Description: cathepsin B [Triticum aestivum]
  misc_feature (37)..(334): Homolog of NCBI NO: 7435783 NR Description: cathepsin B-like cysteine proteinase (EC
  misc_feature (4)..(347): Homolog of NCBI NO: 7435782 NR Description: cathepsin B-like cysteine proteinase (EC
  misc_feature (1)..(334): Homolog of NCBI NO: 40643250 NR Description: cathepsin B [Hordeum vulgare subsp. vulgare]
MGGALLLALLLVSAAAAPQVLGVGNGDNHMRIIQEDIIETVNNHPSAGWTASRNPYFSNYTIAQFKHILGVKPAPQNALSNVPVKTYSRSLELPKEFDARSAWSRCSTIGNILDQGHCGSCWAFGAVECLQDRFCIHLNMSILLSVNDLLACCGFMCGDGCDGGYPIEAWRYFVQNGVVTDECDPYFDPVGCKHPGCEPAYPTPKCEKKCKEQNQVWQEKKHFSIDAYRINSDPHDIMAEVYKNGPVEVAFTVYEDFAHYKSGVYKHITGGIMGGHAVKLIGWGTSDAGEDYWLLANQWNRGWGDDGYFKIIRGKNECGIEEGVVAGMPSTKNMVPNFGGAVGRAIV

SEQ ID NO: 1212 - protein, 318 aa, Zea mays subsp. mays
  peptide (1)..(318): Ceres Seq. ID no. 15220787
  misc_feature (64)..(299): Pfam Name: Papain family cysteine protease Pfam Description: Papain family cysteine protease
  misc_feature (1)..(305): Homolog of NCBI NO: 609175 NR Description: cathepsin B-like cysteine proteinase [Nicotiana
  misc_feature (1)..(275): Homolog of NCBI NO: 21695 NR Description: cathepsin B [Triticum aestivum]
  misc_feature (8)..(305): Homolog of NCBI NO: 7435783 NR Description: cathepsin B-like cysteine proteinase (EC
  misc_feature (1)..(305): Homolog of NCBI NO: 6165885 NR Description: cathepsin B-like cysteine proteinase [Ipomoea
  misc_feature (1)..(305): Homolog of NCBI NO: 2129942 NR Description: cathepsin B-like cysteine proteinase (EC
  misc_feature (1)..(305): Homolog of NCBI NO: 14582576 NR Description: cathepsin B-like cysteine proteinase [Ipomoea
  misc_feature (1)..(313): Homolog of NCBI NO: 38639325 NR Description: cathepsin B-like cysteine proteinase [Solanum
  misc_feature (3)..(306): Homolog of NCBI NO: 18378947 NR Description: expressed protein [Arabidopsis thaliana]
  misc_feature (1)..(318): Homolog of NCBI NO: 7435782 NR Description: cathepsin B-like cysteine proteinase (EC
  misc_feature (1)..(305): Homolog of NCBI NO: 40643250 NR Description: cathepsin B [Hordeum vulgare subsp. vulgare]
MRIIQEDIIETVNNHPSAGWTASRNPYFSNYTIAQFKHILGVKPAPQNALSNVPVKTYSRSLELPKEFDARSAWSRCSTIGNILDQGHCGSCWAFGAVECLQDRFCIHLNMSILLSVNDLLACCGFMCGDGCDGGYPIEAWRYFVQNGVVTDECDPYFDPVGCKHPGCEPAYPTPKCEKKCKEQNQVWQEKKHFSIDAYRINSDPHDIMAEVYKNGPVEVAFTVYEDFAHYKSGVYKHITGGIMGGHAVKLIGWGTSDAGEDYWLLANQWNRGWGDDGYFKIIRGKNECGIEEGVVAGMPSTKNMVPNFGGAVGRAIV

SEQ ID NO: 1213 - protein, 208 aa, Zea mays subsp. mays
  peptide (1)..(208): Ceres Seq. ID no. 15220788
  misc_feature (1)..(189): Pfam Name: Papain family cysteine protease Pfam Description: Papain family cysteine protease
  misc_feature (1)..(196): Homolog of NCBI NO: 18378947 NR Description: expressed protein [Arabidopsis thaliana]
  misc_feature (1)..(195): Homolog of NCBI NO: 6165885 NR Description: cathepsin B-like cysteine proteinase [Ipomoea
  misc_feature (1)..(203): Homolog of NCBI NO: 38639325 NR Description: cathepsin B-like cysteine proteinase [Solanum
  misc_feature (1)..(195): Homolog of NCBI NO: 2129942 NR Description: cathepsin B-like cysteine proteinase (EC
  misc_feature (1)..(195): Homolog of NCBI NO: 14582576 NR Description: cathepsin B-like cysteine proteinase [Ipomoea
  misc_feature (1)..(195): Homolog of NCBI NO: 609175 NR Description: cathepsin B-like cysteine proteinase [Nicotiana
  misc_feature (1)..(165): Homolog of NCBI NO: 21695 NR Description: cathepsin B [Triticum aestivum]
  misc_feature (1)..(195): Homolog of NCBI NO: 7435783 NR Description: cathepsin B-like cysteine proteinase (EC
  misc_feature (1)..(208): Homolog of NCBI NO: 7435782 NR Description: cathepsin B-like cysteine proteinase (EC
  misc_feature (1)..(195): Homolog of NCBI NO: 40643250 NR Description: cathepsin B [Hordeum vulgare subsp. vulgare]
MSILLSVNDLLACCGFMCGDGCDGGYPIEAWRYFVQNGVVTDECDPYFDPVGCKHPGCEPAYPTPKCEKKCKEQNQVWQEKKHFSIDAYRINSDPHDIMAEVYKNGPVEVAFTVYEDFAHYKSGVYKHITGGIMGGHAVKLIGWGTSDAGEDYWLLANQWNRGWGDDGYFKIIRGKNECGIEEGVVAGMPSTKNMVPNFGGAVGRAIV

SEQ ID NO: 1214 - DNA, 1006 bp, Zea mays subsp. mays
  misc_feature (1)..(1006): Ceres Seq. ID no. 15180555
acacgttccctcgtcttttgtcagttggacaatccgcagctcctccatctcattcttccccccatcccatccccaaggttgaccggcgaaatcagcagtccgagaaccgcgagcttctgcctgatccagcctcatcccgccatggacgaatctgaggagcacagcaacggcggcgggcacccccacccgcaccacgggtacgagtggaagttcccggcggcgctgagcgcgaacacgacgagcgtgcacgtgacggcgctggacggcgtggtgaacgtgaactcgctgttcacggtggccgtgttcgtggggctgtcgctggcgaccccggggcagctgcggagcctggcgggggacccgcggtgcgacgccggcccgggcgtggcgcggtcgctgctggtgctggaggtggtggccttctcgtccttcctcttctccagcctggtggcgcagggcctgaagctggcgctcaacctcatcaactccaaggacccgcacgacgcggcgcgcgcccacatcgacgcccgcgtgctccgcctcggcatgctcgcctccgccgtcggatccgtcgtcggctgcgtcttcctcatgacgtccatggtcatggtcgtgcaggtccgcctcggcacgctgagctgccccaccgaccgcgccgccgccaaggccgccgcgggcctcgtcggcctcgtcaccaccgcgctcgctttctacgtgggcaccgtcttctacaccttcacccactgatgccagttccatgcatccgtgcgctgcatcccaaatccatctagcgttgcgttgcgttgcgttgcaaagaacacatcgccatcagtggtgtcggtgtgcgaggaaattgaaaggaggacatgcaatctgcgttattactttgatctgatgcgctgttcgtttttgttcgtgactaaagtttagttagtgttggatattagttataaatattaaatataaacttaattaagtttaataaattcatctgatcttttattttgct

SEQ ID NO: 1215 - protein, 247 aa, Zea mays subsp. mays
  peptide (1)..(247): Ceres Seq. ID no. 15180556
  misc_feature (82)..(164): Homolog of NCBI NO: 38345578 NR Description: OSJNBa0027H06.14 [Oryza sativa (japonica
  misc_feature (80)..(246): Homolog of NCBI NO: 34900646 NR Description: hypothetical protein~similar to Arabidopsis
  misc_feature (80)..(246): Homolog of NCBI NO: 34395171 NR Description: unknown protein [Oryza sativa (japonica
  misc_feature (79)..(246): Homolog of NCBI NO: 15239293 NR Description: expressed protein [Arabidopsis thaliana]
  misc_feature (76)..(245): Homolog of NCBI NO: 15226312 NR Description: expressed protein [Arabidopsis thaliana]
  misc_feature (76)..(247): Homolog of NCBI NO: 6041846 NR Description: unknown protein [Arabidopsis thaliana]
  misc_feature (65)..(247): Homolog of NCBI NO: 18397969 NR Description: expressed protein [Arabidopsis thaliana]
  misc_feature (48)..(247): Homolog of NCBI NO: 37531676 NR Description: hypothetical protein [Oryza sativa (japonica
TRSLVFCQLDNPQLLHLILPPIPSPRLTGEISSPRTASFCLIQPHPAMDESEEHSNGGGHPHPHHGYEWKFPAALSANTTSVHVTALDGVVNVNSLFTVAVFVGLSLATPGQLRSLAGDPRCDAGPGVARSLLVLEVVAFSSFLFSSLVAQGLKLALNLINSKDPHDAARAHIDARVLRLGMLASAVGSVVGCVFLMTSMVMVVQVRLGTLSCPTDRAAAKAAAGLVGLVTTALAFYVGTVFYTFTH

SEQ ID NO: 1216 - protein, 200 aa, Zea mays subsp. mays
  peptide (1)..(200): Ceres Seq. ID no. 15180557
  misc_feature (35)..(117): Homolog of NCBI NO: 38345578 NR Description: OSJNBa0027H06.14 [Oryza sativa (japonica
  misc_feature (33)..(199): Homolog of NCBI NO: 34900646 NR Description: hypothetical protein~similar to Arabidopsis
  misc_feature (33)..(199): Homolog of NCBI NO: 34395171 NR Description: unknown protein [Oryza sativa (japonica
  misc_feature (32)..(199): Homolog of NCBI NO: 15239293 NR Description: expressed protein [Arabidopsis thaliana]
  misc_feature (29)..(198): Homolog of NCBI NO: 15226312 NR Description: expressed protein [Arabidopsis thaliana]
  misc_feature (29)..(200): Homolog of NCBI NO: 6041846 NR Description: unknown protein [Arabidopsis thaliana]
  misc_feature (18)..(200): Homolog of NCBI NO: 18397969 NR Description: expressed protein [Arabidopsis thaliana]
  misc_feature (1)..(200): Homolog of NCBI NO: 37531676 NR Description: hypothetical protein [Oryza sativa (japonica
MDESEEHSNGGGHPHPHHGYEWKFPAALSANTTSVHVTALDGVVNVNSLFTVAVFVGLSLATPGQLRSLAGDPRCDAGPGVARSLLVLEVVAFSSFLFSSLVAQGLKLALNLINSKDPHDAARAHIDARVLRLGMLASAVGSVVGCVFLMTSMVMVVQVRLGTLSCPTDRAAAKAAAGLVGLVTTALAFYVGTVFYTFTH

SEQ ID NO: 1217 - DNA, 946 bp, Zea mays subsp. mays
  misc_feature (1)..(946): Ceres Seq. ID no. 13598846
agcgaccagccagtgatcgaccgaggcagagactgactactaggagcagagagcagcggagatggtgaagattccgagccccaggaggctgttcaggagccggtccaggagcaccaccatcatcggcggcggcggcgcggacatctgcgccatggtcgccgagcacgagaggatcgagtgggaggtgcggcccggcgggatgctggtgcagaagcggcgctcgacggaggacgacgcggcggcggccgtggagtacatcctggtgagagtctccaccaccgggtggcagtggcacgacgtctccatcgacgccaccgcaaccttcggcgacctgaaggtgatgctgtcgctggcgaccgggctgtggcccagggagcagaggctgctgtacaggggcaaggagagggacgactgcgagcacctgcacatggtgggggtccaggacaaggacaaggtgctgctcctggaggacccggccgtcaaggagaggaagctcaggtcaaccaccttggcgcagctcatgggcgtgccctgccactccttcatccaagtgtagagagaaacccccggggaatttcttgccatttttctcccgtctctcgtcgtcgttctccagcttgcctgcgtgagcgaagggtttcagtccagtctaaccgcgtttgttcagagcctgctgagttccatctcagggcttgaattcggccaatcgaatcaagacagtcgcaaacgataggatataaagatgatgaatacatggcgtaaattactgtgaacgggtacgtaatgtcatcccagtgccagtgtgtgtgagccagtagttctttggttccttgctctgtatatattctctttttttccttcctgagatcagcaaaacagttcggaattccatagatgctgctgtaaatcccttgtcttttttccacggaatgcagcccccttttct

SEQ ID NO: 1218 - protein, 164 aa, Zea mays subsp. mays
  peptide (1)..(164): Ceres Seq. ID no. 13598847
  misc_feature (66)..(139): Pfam Name: Ubiquitin family Pfam Description: Ubiquitin family
  misc_feature (36)..(137): Homolog of NCBI NO: 19699283 NR Description: At3g51780/ORF3 [Arabidopsis thaliana]
  misc_feature (39)..(145): Homolog of NCBI NO: 21553443 NR Description: unknown [Arabidopsis thaliana]
  misc_feature (36)..(137): Homolog of NCBI NO: 15231035 NR Description: expressed protein [Arabidopsis thaliana]
  misc_feature (39)..(145): Homolog of NCBI NO: 30697630 NR Description: BAG domain containing protein [Arabidopsis
  misc_feature (40)..(145): Homolog of NCBI NO: 25553557 NR Description: OSJNBa0038F22.4 [Oryza sativa (japonica
  misc_feature (40)..(145): Homolog of NCBI NO: 34898024 NR Description: ESTs AU082174(S13676),AU032395(R3986) correspond a region of the predicted gene.~Similar to Arabidopsis thaliana
  misc_feature (35)..(144): Homolog of NCBI NO: 15237460 NR Description: ubiquitin family [Arabidopsis thaliana]
  misc_feature (38)..(145): Homolog of NCBI NO: 15241381 NR Description: ubiquitin family [Arabidopsis thaliana]
  misc_feature (1)..(164): Homolog of NCBI NO: 32488469 NR Description: OSJNBa0081L15.2 [Oryza sativa (japonica
  misc_feature (1)..(164): Homolog of NCBI NO: 20804881 NR Description: P0497A05.5 [Oryza sativa (japonica
MVKIPSPRRLFRSRSRSTTIIGGGGADICAMVAEHERIEWEVRPGGMLVQKRRSTEDDAAAAVEYILVRVSTTGWQWHDVSIDATATFGDLKVMLSLATGLWPREQRLLYRGKERDDCEHLHMVGVQDKDKVLLLEDPAVKERKLRSTTLAQLMGVPCHSFIQV

SEQ ID NO: 1219 - protein, 134 aa, Zea mays subsp. mays
  peptide (1)..(134): Ceres Seq. ID no. 13598848
  misc_feature (36)..(109): Pfam Name: Ubiquitin family Pfam Description: Ubiquitin family
  misc_feature (6)..(107): Homolog of NCBI NO: 19699283 NR Description: At3g51780/ORF3 [Arabidopsis thaliana]
  misc_feature (9)..(115): Homolog of NCBI NO: 21553443 NR Description: unknown [Arabidopsis thaliana]
  misc_feature (6)..(107): Homolog of NCBI NO: 15231035 NR Description: expressed protein [Arabidopsis thaliana]
  misc_feature (9)..(115): Homolog of NCBI NO: 30697630 NR Description: BAG domain containing protein [Arabidopsis
  misc_feature (10)..(115): Homolog of NCBI NO: 25553557 NR Description: OSJNBa0038F22.4 [Oryza sativa (japonica
  misc_feature (10)..(115): Homolog of NCBI NO: 34898024 NR Description: ESTs AU082174(S13676),AU032395(R3986) correspond a region of the predicted gene.~Similar to Arabidopsis thaliana
  misc_feature (5)..(114): Homolog of NCBI NO: 15237460 NR Description: ubiquitin family [Arabidopsis thaliana]
  misc_feature (8)..(115): Homolog of NCBI NO: 15241381 NR Description: ubiquitin family [Arabidopsis thaliana]
  misc_feature (1)..(134): Homolog of NCBI NO: 32488469 NR Description: OSJNBa0081L15.2 [Oryza sativa (japonica
  misc_feature (1)..(134): Homolog of NCBI NO: 20804881 NR Description: P0497A05.5 [Oryza sativa (japonica
MVAEHERIEWEVRPGGMLVQKRRSTEDDAAAAVEYILVRVSTTGWQWHDVSIDATATFGDLKVMLSLATGLWPREQRLLYRGKERDDCEHLHMVGVQDKDKVLLLEDPAVKERKLRSTTLAQLMGVPCHSFIQV

SEQ ID NO: 1220 - protein, 118 aa, Zea mays subsp. mays
  peptide (1)..(118): Ceres Seq. ID no. 13598849
  misc_feature (20)..(93): Pfam Name: Ubiquitin family Pfam Description: Ubiquitin family
  misc_feature (1)..(91): Homolog of NCBI NO: 19699283 NR Description: At3g51780/ORF3 [Arabidopsis thaliana]
  misc_feature (1)..(99): Homolog of NCBI NO: 21553443 NR Description: unknown [Arabidopsis thaliana]
  misc_feature (1)..(91): Homolog of NCBI NO: 15231035 NR Description: expressed protein [Arabidopsis thaliana]
  misc_feature (1)..(99): Homolog of NCBI NO: 30697630 NR Description: BAG domain containing protein [Arabidopsis
  misc_feature (1)..(99): Homolog of NCBI NO: 25553557 NR Description: OSJNBa0038F22.4 [Oryza sativa (japonica
  misc_feature (1)..(99): Homolog of NCBI NO: 34898024 NR Description: ESTs AU082174(S13676),AU032395(R3986) correspond a region of the predicted gene.~Similar to Arabidopsis thaliana
  misc_feature (1)..(98): Homolog of NCBI NO: 15237460 NR Description: ubiquitin family [Arabidopsis thaliana]
  misc_feature (1)..(99): Homolog of NCBI NO: 15241381 NR Description: ubiquitin family [Arabidopsis thaliana]
  misc_feature (1)..(118): Homolog of NCBI NO: 32488469 NR Description: OSJNBa0081L15.2 [Oryza sativa (japonica
  misc_feature (1)..(118): Homolog of NCBI NO: 20804881 NR Description: P0497A05.5 [Oryza sativa (japonica
MLVQKRRSTEDDAAAAVEYILVRVSTTGWQWHDVSIDATATFGDLKVMLSLATGLWPREQRLLYRGKERDDCEHLHMVGVQDKDKVLLLEDPAVKERKLRSTTLAQLMGVPCHSFIQV

SEQ ID NO: 1221 - DNA, 925 bp, Zea mays subsp. mays
  misc_feature (1)..(925): Ceres Seq. ID no. 13600485
tatgaaaaatcaagatctcctgggaggttctttgacctagtttatcatgaaaatgcccgtgttctactccatgatgagagcatataccgatttgaatgttgctcgagtccgacaaggttgtctattcagctgatggaatatggtcacgaaaagccagaagtgactgcagtatcaattgaaccaaatttttcttcgtatctttttagcgagtacttgtgtagtacgccagacaagaaattatctgaaggcgtctaccttggaaggaataagcggaaatattcaaataatgatgaaccttcagattctttgaaggcaatggatggtatcaatgttgtgaatggtcttgaatgcaagatatcctgcaagacctcgaaagtttcatatgtccttgatactgaagatttcttgttccggcttcggaagagaaggaaaattttgcggggcgggaatgtgcccgaccgtttgcagatttcatcaatatctgctgcaaaagtgcagcgcttcaataggttcctatccaaaccataggatcatttggcatacaaatgtatcgaaacctgttgctggggtcccagctgcttggcttgaacaatgattccatcgacgtcgcggagtcccctttcggaataacagatgggaagacatagggtaaatacagcaaagcgaagcgagcatgtaggccacagtagtcagtctgttgttccgaaagatgtgtatatatgtattagcagcatgattgttctgattatctttttactgattttcgatggtaggtctattccatcaagtatttaactaatcatttgttgctgttggtataggtcttttgttcttttagccgtcgttttgcattgaagatatgtagccaaaattaaaaacctgtgtcgaacagttatgtagtcttggctccattaatcaaacggac

SEQ ID NO: 1222 - protein, 175 aa, Zea mays subsp. mays
  peptide (1)..(175): Ceres Seq. ID no. 15218951
  misc_feature (35)..(173): Homolog of NCBI NO: 15242192 NR Description: transcriptional regulatory - like protein
  misc_feature (1)..(171): Homolog of NCBI NO: 25404243 NR Description: hypothetical protein F23H11.20 [imported] -
  misc_feature (1)..(158): Homolog of NCBI NO: 15218525 NR Description: expressed protein [Arabidopsis thaliana]
  misc_feature (1)..(144): Homolog of NCBI NO: 6094552 NR Description: unknown protein [Arabidopsis thaliana]
  misc_feature (1)..(88): Homolog of NCBI NO: 9945050 NR Description: Similar to Arabidopsis chromosome I BAC genomic
  misc_feature (1)..(173): Homolog of NCBI NO: 30678317 NR Description: expressed protein [Arabidopsis thaliana]
  misc_feature (1)..(171): Homolog of NCBI NO: 15218938 NR Description: expressed protein [Arabidopsis thaliana]
  misc_feature (1)..(161): Homolog of NCBI NO: 25406027 NR Description: hypothetical protein F20P5.21 [imported] -
  misc_feature (1)..(173): Homolog of NCBI NO: 15223031 NR Description: expressed protein [Arabidopsis thaliana]
  misc_feature (1)..(126): Homolog of NCBI NO: 34894158 NR Description: putative co-repressor protein
YEKSRSPGRFFDLVYHENARVLLHDESIYRFECCSSPTRLSIQLMEYGHEKPEVTAVSIEPNFSSYLFSEYLCSTPDKKLSEGVYLGRNKRKYSNNDEPSDSLKAMDGINVVNGLECKISCKTSKVSYVLDTEDFLFRLRKRRKILRGGNVPDRLQISSISAAKVQRFNRFLSKP

SEQ ID NO: 1223 - protein, 131 aa, Zea mays subsp. mays
  peptide (1)..(131): Ceres Seq. ID no. 15218952
  misc_feature (1)..(129): Homolog of NCBI NO: 15242192 NR Description: transcriptional regulatory - like protein
  misc_feature (1)..(127): Homolog of NCBI NO: 25404243 NR Description: hypothetical protein F23H11.20 [imported] -
  misc_feature (1)..(114): Homolog of NCBI NO: 15218525 NR Description: expressed protein [Arabidopsis thaliana]
  misc_feature (1)..(100): Homolog of NCBI NO: 6094552 NR Description: unknown protein [Arabidopsis thaliana]
  misc_feature (1)..(44): Homolog of NCBI NO: 9945050 NR Description: Similar to Arabidopsis chromosome I BAC genomic
  misc_feature (1)..(129): Homolog of NCBI NO: 30678317 NR Description: expressed protein [Arabidopsis thaliana]
  misc_feature (1)..(127): Homolog of NCBI NO: 15218938 NR Description: expressed protein [Arabidopsis thaliana]
  misc_feature (1)..(117): Homolog of NCBI NO: 25406027 NR Description: hypothetical protein F20P5.21 [imported] -
  misc_feature (1)..(129): Homolog of NCBI NO: 15223031 NR Description: expressed protein [Arabidopsis thaliana]
  misc_feature (1)..(82): Homolog of NCBI NO: 34894158 NR Description: putative co-repressor protein
MEYGHEKPEVTAVSIEPNFSSYLFSEYLCSTPDKKLSEGVYLGRNKRKYSNNDEPSDSLKAMDGINVVNGLECKISCKTSKVSYVLDTEDFLFRLRKRRKILRGGNVPDRLQISSISAAKVQRFNRFLSKP

SEQ ID NO: 1224 - DNA, 1257 bp, Zea mays subsp. mays
  misc_feature (1)..(1257): Ceres Seq. ID no. 14303263
accagccatgactcctccgcttctcctctccctcctgctggtggcggcgaggtgctgccgctgctgccatggctggtcgtcgtttcagaagccggcggtgactgcggtgatcgctttcggagactccattgtggacccggggaacaacaacgggctgcatacggtgatcaaggccaaccatccgccctacggcaaggacttgttcaaccacgaggccaccggacgctactccaacggcctcattccaaccgacctaattgcccaggagctgggtgtgaagctgctgcttcctgcctacttgggcgtggatctgagcccggaggacctgctcaccggcgtcagcttcgcgtccggcgccaccgggttcgacccgctgactcccctcgtagtgagcgtcatctcgctggagcagcagctcgcctacttcgacgagtaccgcggcaagctggtggatatcgccggcgaggatgagacggcgaggatcatcgacggtgcgctgttcgtggtgtgcgcgggcaccgacgacgtggccaacacctacttcacgacgccgttccgcagcgcggagtacgacatcccgagctacgtggagctgctggtgggcggcgccgaggagttcctccgcaacgtcagctccaggggcgccaggaagatcggcttcgtggggatgccgcccgtggggtgcgtgccgtcgcagcggacgctgggcggtggcctcgccagggcgtgcgagcccaagcggaacgaggcggcgcagctgtacaacgccaggatccaggagatggtcgccgacgccgaccgagacttggcgacgaccatggtggtgttcctggacatctaccgcgtcctggacgacctgatggagcgcggggacaagtacggcttctctgagaccaccaggggatgctgcggcaccggcaccatcgaggtcacggggctctgcgactcccgcttcgtctccgtctgcgacaacgtctcgcagcacgtgttcttcgacagctaccaccccaccgagagagcctacaggatcatcgtcaaggacatctttgacaactacggacaagtgctcatcggatgatatatatctaccttgcttgagcgatcgagcatgcatgttcatcttcttcatctttatgtacgttcggctagctggcccaaagcctcaaggaggcccatttatcttcttcttactcctcctcgccccaagaataattaattgtaagcatgatctgcggaatcagacggggatggtctggt

SEQ ID NO: 1225 - protein, 358 aa, Zea mays subsp. mays
  peptide (1)..(358): Ceres Seq. ID no. 14303264
  misc_feature (36)..(345): Pfam Name: GDSL-like Lipase/Acylhydrolase Pfam Description: GDSL-like Lipase/Acylhydrolase
  misc_feature (7)..(352): Homolog of NCBI NO: 18406327 NR Description: lipase, putative [Arabidopsis thaliana]
  misc_feature (33)..(352): Homolog of NCBI NO: 18410954 NR Description: family II extracellular lipase 1 (EXL1)
  misc_feature (33)..(352): Homolog of NCBI NO: 28393626 NR Description: putative family II extracellular lipase 1 (EXL1)
  misc_feature (35)..(351): Homolog of NCBI NO: 18394825 NR Description: lipase, putative [Arabidopsis thaliana]
  misc_feature (35)..(351): Homolog of NCBI NO: 21592372 NR Description: anter-specific proline-rich protein APG
  misc_feature (30)..(352): Homolog of NCBI NO: 25404994 NR Description: protein T4O12.13 [imported] - Arabidopsis
  misc_feature (30)..(352): Homolog of NCBI NO: 26449364 NR Description: putative family II lipase EXL3 [Arabidopsis
  misc_feature (30)..(352): Homolog of NCBI NO: 15222901 NR Description: family II extracellular lipase 3 (EXL3)
  misc_feature (9)..(353): Homolog of NCBI NO: 37534726 NR Description: putative anter-specific proline-rich protein
  misc_feature (31)..(357): Homolog of NCBI NO: 30102970 NR Description: putative lipase/acylhydrolase
PAMTPPLLLSLLLVAARCCRCCHGWSSFQKPAVTAVIAFGDSIVDPGNNNGLHTVIKANHPPYGKDLFNHEATGRYSNGLIPTDLIAQELGVKLLLPAYLGVDLSPEDLLTGVSFASGATGFDPLTPLVVSVISLEQQLAYFDEYRGKLVDIAGEDETARIIDGALFVVCAGTDDVANTYFTTPFRSAEYDIPSYVELLVGGAEEFLRNVSSRGARKIGFVGMPPVGCVPSQRTLGGGLARACEPKRNEAAQLYNARIQEMVADADRDLATTMVVFLDIYRVLDDLMERGDKYGFSETTRGCCGTGTIEVTGLCDSRFVSVCDNVSQHVFFDSYHPTERAYRIIVKDIFDNYGQVLIG

SEQ ID NO: 1226 - protein, 356 aa, Zea mays subsp. mays
  peptide (1)..(356): Ceres Seq. ID no. 14303265
  misc_feature (34)..(343): Pfam Name: GDSL-like Lipase/Acylhydrolase Pfam Description: GDSL-like Lipase/Acylhydrolase
  misc_feature (5)..(350): Homolog of NCBI NO: 18406327 NR Description: lipase, putative [Arabidopsis thaliana]
  misc_feature (31)..(350): Homolog of NCBI NO: 18410954 NR Description: family II extracellular lipase 1 (EXL1)
  misc_feature (31)..(350): Homolog of NCBI NO: 28393626 NR Description: putative family II extracellular lipase 1 (EXL1)
  misc_feature (33)..(349): Homolog of NCBI NO: 18394825 NR Description: lipase, putative [Arabidopsis thaliana]
  misc_feature (33)..(349): Homolog of NCBI NO: 21592372 NR Description: anter-specific proline-rich protein APG
  misc_feature (28)..(350): Homolog of NCBI NO: 25404994 NR Description: protein T4O12.13 [imported] - Arabidopsis
  misc_feature (28)..(350): Homolog of NCBI NO: 26449364 NR Description: putative family II lipase EXL3 [Arabidopsis
  misc_feature (28)..(350): Homolog of NCBI NO: 15222901 NR Description: family II extracellular lipase 3 (EXL3)
  misc_feature (7)..(351): Homolog of NCBI NO: 37534726 NR Description: putative anter-specific proline-rich protein
  misc_feature (29)..(355): Homolog of NCBI NO: 30102970 NR Description: putative lipase/acylhydrolase
MTPPLLLSLLLVAARCCRCCHGWSSFQKPAVTAVIAFGDSIVDPGNNNGLHTVIKANHPPYGKDLFNHEATGRYSNGLIPTDLIAQELGVKLLLPAYLGVDLSPEDLLTGVSFASGATGFDPLTPLVVSVISLEQQLAYFDEYRGKLVDIAGEDETARIIDGALFVVCAGTDDVANTYFTTPFRSAEYDIPSYVELLVGGAEEFLRNVSSRGARKIGFVGMPPVGCVPSQRTLGGGLARACEPKRNEAAQLYNARIQEMVADADRDLATTMVVFLDIYRVLDDLMERGDKYGFSETTRGCCGTGTIEVTGLCDSRFVSVCDNVSQHVFFDSYHPTERAYRIIVKDIFDNYGQVLIG

SEQ ID NO: 1227 - DNA, 1692 bp, Zea mays subsp. mays
  misc_feature (1)..(1692): Ceres Seq. ID no. 15180663
  misc_feature: MA Experiment ID: 108504 Result: Up-regulated in Transcription
  misc_feature: MA Experiment 108504 PARAMETER Experiment Name: Zm_Drought_P Parameter: Age (day) Value: 8
  misc_feature: MA Experiment 108504 PARAMETER Experiment Name: Zm_Drought_P Parameter: Organism Value: Zea mays
  misc_feature: MA Experiment 108504 PARAMETER Experiment Name: Zm_Drought_P Parameter: Plant Line Value: 35A19
  misc_feature: MA Experiment 108504 PARAMETER Experiment Name: Zm_Drought_P Parameter: Timepoint (hr) Value: 12
  misc_feature: MA Experiment 108504 PARAMETER Experiment Name: Zm_Drought_P Parameter: Tissue Value: Aerial
  misc_feature: MA Experiment 108504 PARAMETER Experiment Name: Zm_Drought_P Parameter: Treatment Value: Drought vs. No Drought
  misc_feature: MA Experiment ID: 108522 Result: Down-regulated in Transcription
  misc_feature: MA Experiment 108522 PARAMETER Experiment Name: Zm_42deg_Heat_P Parameter: Age (day) Value: 8
  misc_feature: MA Experiment 108522 PARAMETER Experiment Name: Zm_42deg_Heat_P Parameter: Organism Value: Zea mays
  misc_feature: MA Experiment 108522 PARAMETER Experiment Name: Zm_42deg_Heat_P Parameter: Plant Line Value: 35A19
  misc_feature: MA Experiment 108522 PARAMETER Experiment Name: Zm_42deg_Heat_P Parameter: Temperature (deg C) Value: 42 vs. 22
  misc_feature: MA Experiment 108522 PARAMETER Experiment Name: Zm_42deg_Heat_P Parameter: Timepoint (hr) Value: 1
  misc_feature: MA Experiment 108522 PARAMETER Experiment Name: Zm_42deg_Heat_P Parameter: Tissue Value: Aerial
  misc_feature: MA Experiment ID: 108527 Result: Up-regulated in Transcription
  misc_feature: MA Experiment 108527 PARAMETER Experiment Name: Zm_5mM_NO_P Parameter: Age (day) Value: 8
  misc_feature: MA Experiment 108527 PARAMETER Experiment Name: Zm_5mM_NO_P Parameter: Organism Value: Zea mays
  misc_feature: MA Experiment 108527 PARAMETER Experiment Name: Zm_5mM_NO_P Parameter: Plant Line Value: 35A19
  misc_feature: MA Experiment 108527 PARAMETER Experiment Name: Zm_5mM_NO_P Parameter: Timepoint (hr) Value: 6
  misc_feature: MA Experiment 108527 PARAMETER Experiment Name: Zm_5mM_NO_P Parameter: Tissue Value: Aerial
  misc_feature: MA Experiment 108527 PARAMETER Experiment Name: Zm_5mM_NO_P Parameter: Treatment Value: 5mM NO vs. No Treatment
  misc_feature: MA Experiment ID: 108543 Result: Up-regulated in Transcription
  misc_feature: MA Experiment ID: 20000492 Result: Down-regulated in Transcription
  misc_feature: MA Experiment 20000492 PARAMETER Experiment Name: Zm_Hybrid_Seed_Dev_P Parameter: DAP Value: 12
  misc_feature: MA Experiment 20000492 PARAMETER Experiment Name: Zm_Hybrid_Seed_Dev_P Parameter: Organism Value: Zea mays
  misc_feature: MA Experiment 20000492 PARAMETER Experiment Name: Zm_Hybrid_Seed_Dev_P Parameter: Plant Line Value: 35A19
  misc_feature: MA Experiment 20000492 PARAMETER Experiment Name: Zm_Hybrid_Seed_Dev_P Parameter: Tissue Value: Fert Kernel vs. Unfert Floret
  misc_feature: MA Experiment ID: 20000534 Result: Down-regulated in Transcription
  misc_feature: MA Experiment 20000534 PARAMETER Experiment Name: Zm_Hybrid_Pollen_P Parameter: Age (day) Value: 8
  misc_feature: MA Experiment 20000534 PARAMETER Experiment Name: Zm_Hybrid_Pollen_P Parameter: Organism Value: Zea mays
  misc_feature: MA Experiment 20000534 PARAMETER Experiment Name: Zm_Hybrid_Pollen_P Parameter: Plant Line Value: 35A19
  misc_feature: MA Experiment 20000534 PARAMETER Experiment Name: Zm_Hybrid_Pollen_P Parameter: Tissue Value: Pollen vs. Aerial
  misc_feature: MA Experiment ID: 20000626 Result: Down-regulated in Transcription
  misc_feature: MA Experiment 20000626 PARAMETER Experiment Name: Zm_Herbicide-Treatments_P Parameter: Timepoint (hr) Value: 12
  misc_feature: MA Experiment 20000626 PARAMETER Experiment Name: Zm_Herbicide-Treatments_P Parameter: Tissue Value: Aerial
  misc_feature: MA Experiment 20000626 PARAMETER Experiment Name: Zm_Herbicide-Treatments_P Parameter: Treatment Value: Roundup vs. No Treatment
gaaaaaccatcctcctcgctcgcactgacaggcaggcagagagagagagacagagagccgaattgattgccgagggcagagcagcaacagcaacagtccacgaccgatcgcccggcccgcgcgcaggcaggcagcagccatgaaccacctgacgccggcgctccacggggcgatgcggccgccctcggcgcaggggcaggggctggcccggtacggctccgcgccgggctcgctcctagccgccatcgccgactccgtcacccgcggcgaccccgcgccgccgccgccgccgcccgtgagccggttctactccgccgagtcctcggggctcacctcctgcgagtccagctgccgcaccgactgcggacgcccgcccctcgagcgggcgtacggcggctccggcgagatccgcgtgccgccgccgctgcagcagcagcagcaccacctgctggctccccccgcggcctccccgctgttccgccacagcagctcccccgccgggctgctctcccgtctcatgaccgacccgcacggaatggcggcgaccggaggagcgatggggagctacacgcaggcgggcagcgacgccgcgctgggccacggccacgcgcagctcagctcgcagtggagcttctccaggcaggacctgccgcagatctcggagatggggatgataccggccgacatcggggagagcatcgtgggcgccggcgggtgcaacagctccagcgacgccgcgcagtcctcctcctacctctccaggaccttctccgtcggctcctgggacgacaccaactccatcatgttctcgtctgccccctgcaagaagcccaaggtggaccccgccgccggcgccgacgacatggtcaccaacttcagcaccattgacccgcagttcggcctgtccaactcatccctggagctgcccggcatggacgactacctgcagctgcagcaggactccgtcgcctgcagagtgcgtgcgaggcgtggctgcgcgactcacccgcggagcattgccgagagggaaagaaggacgaggatcagcaagaggctgaagaagctgcaagaccttgtgcccaacatggacaagcaaacgaatacgtcggacatgttggaccttgctgtggattacatcaaagagctcaaggaccaagtcgagaagctaaaacacgaccaagcaaactgctgttgcctaggcaacaagagctgctgctgatgctggagaagcagacggaggagggtttttatgccgtaacaatgtgactgttaaaccagagctgttgcttcaggagaccaggccgcgggcagaagtgcgtgacatgtggagcggcttccatgactcagcttcctcttttcttggttgttccacggactagcgacccggccggtgccaacggcttgaagactaggagataacaagtaggacgatgttgtaatttagttaccgcgacgcggtggctctggcttgcgtgtaaagaagtcctccctttcaacgcgactgggattgctgttgctggtaaaattgttgtaggaatatcatctgcgctccatttttcatcgagctcatcttttttttttttttttttttgtgtgtgtcactggattttggcaagaccgtaactcagaaaccgagcactgatcgagcgttcatgccaccccatacgaagtccaagagaattttagtatgcc

SEQ ID NO: 1228 - protein, 359 aa, Zea mays subsp. mays
  peptide (1)..(359): Ceres Seq. ID no. 15180664
  misc_feature (289)..(337): Pfam Name: Helix-loop-helix DNA-binding domain Pfam Description: Helix-loop-helix DNA-binding domain
  misc_feature (93)..(341): Homolog of NCBI NO: 15224227 NR Description: bHLH protein [Arabidopsis thaliana]
  misc_feature (252)..(352): Homolog of NCBI NO: 19401700 NR Description: transcription factor RAU1 [Oryza sativa]
  misc_feature (112)..(352): Homolog of NCBI NO: 18403381 NR Description: bHLH protein family [Arabidopsis thaliana]
  misc_feature (101)..(356): Homolog of NCBI NO: 15227914 NR Description: bHLH protein family [Arabidopsis thaliana]
  misc_feature (19)..(71): Homolog of NCBI NO: 21554238 NR Description: Contains similarity to bHLH transcription factor
  misc_feature (19)..(71): Homolog of NCBI NO: 18390573 NR Description: bHLH protein [Arabidopsis thaliana]
  misc_feature (194)..(352): Homolog of NCBI NO: 21554238 NR Description: Contains similarity to bHLH transcription factor
  misc_feature (194)..(352): Homolog of NCBI NO: 18390573 NR Description: bHLH protein [Arabidopsis thaliana]
  misc_feature (154)..(352): Homolog of NCBI NO: 38345229 NR Description: OSJNBa0084K20.3 [Oryza sativa (japonica
  misc_feature (133)..(358): Homolog of NCBI NO: 34907702 NR Description: P0035F12.11 [Oryza sativa (japonica
MNHLTPALHGAMRPPSAQGQGLARYGSAPGSLLAAIADSVTRGDPAPPPPPPVSRFYSAESSGLTSCESSCRTDCGRPPLERAYGGSGEIRVPPPLQQQQHHLLAPPAASPLFRHSSSPAGLLSRLMTDPHGMAATGGAMGSYTQAGSDAALGHGHAQLSSQWSFSRQDLPQISEMGMIPADIGESIVGAGGCNSSSDAAQSSSYLSRTFSVGSWDDTNSIMFSSAPCKKPKVDPAAGADDMVTNFSTIDPQFGLSNSSLELPGMDDYLQLQQDSVACRVRARRGCATHPRSIAERERRTRISKRLKKLQDLVPNMDKQTNTSDMLDLAVDYIKELKDQVEKLKHDQANCCCLGNKSCC

SEQ ID NO: 1229 - protein, 348 aa, Zea mays subsp. mays
  peptide (1)..(348): Ceres Seq. ID no. 15180665
  misc_feature (278)..(326): Pfam Name: Helix-loop-helix DNA-binding domain Pfam Description: Helix-loop-helix DNA-binding domain
  misc_feature (82)..(330): Homolog of NCBI NO: 15224227 NR Description: bHLH protein [Arabidopsis thaliana]
  misc_feature (241)..(341): Homolog of NCBI NO: 19401700 NR Description: transcription factor RAU1 [Oryza sativa]
  misc_feature (101)..(341): Homolog of NCBI NO: 18403381 NR Description: bHLH protein family [Arabidopsis thaliana]
  misc_feature (90)..(345): Homolog of NCBI NO: 15227914 NR Description: bHLH protein family [Arabidopsis thaliana]
  misc_feature (8)..(60): Homolog of NCBI NO: 21554238 NR Description: Contains similarity to bHLH transcription factor
  misc_feature (8)..(60): Homolog of NCBI NO: 18390573 NR Description: bHLH protein [Arabidopsis thaliana]
  misc_feature (183)..(341): Homolog of NCBI NO: 21554238 NR Description: Contains similarity to bHLH transcription factor
  misc_feature (183)..(341): Homolog of NCBI NO: 18390573 NR Description: bHLH protein [Arabidopsis thaliana]
  misc_feature (143)..(341): Homolog of NCBI NO: 38345229 NR Description: OSJNBa0084K20.3 [Oryza sativa (japonica
  misc_feature (122)..(347): Homolog of NCBI NO: 34907702 NR Description: P0035F12.11 [Oryza sativa (japonica
MRPPSAQGQGLARYGSAPGSLLAAIADSVTRGDPAPPPPPPVSRFYSAESSGLTSCESSCRTDCGRPPLERAYGGSGEIRVPPPLQQQQHHLLAPPAASPLFRHSSSPAGLLSRLMTDPHGMAATGGAMGSYTQAGSDAALGHGHAQLSSQWSFSRQDLPQISEMGMIPADIGESIVGAGGCNSSSDAAQSSSYLSRTFSVGSWDDTNSIMFSSAPCKKPKVDPAAGADDMVTNFSTIDPQFGLSNSSLELPGMDDYLQLQQDSVACRVRARRGCATHPRSIAERERRTRISKRLKKLQDLVPNMDKQTNTSDMLDLAVDYIKELKDQVEKLKHDQANCCCLGNKSCC

SEQ ID NO: 1230 - protein, 233 aa, Zea mays subsp. mays
  peptide (1)..(233): Ceres Seq. ID no. 15180666
  misc_feature (163)..(211): Pfam Name: Helix-loop-helix DNA-binding domain Pfam Description: Helix-loop-helix DNA-binding domain
  misc_feature (145)..(227): Homolog of NCBI NO: 15233768 NR Description: bHLH protein family [Arabidopsis thaliana]
  misc_feature (107)..(226): Homolog of NCBI NO: 15219606 NR Description: bHLH protein [Arabidopsis thaliana]
  misc_feature (1)..(215): Homolog of NCBI NO: 15224227 NR Description: bHLH protein [Arabidopsis thaliana]
  misc_feature (126)..(226): Homolog of NCBI NO: 19401700 NR Description: transcription factor RAU1 [Oryza sativa]
  misc_feature (1)..(226): Homolog of NCBI NO: 18403381 NR Description: bHLH protein family [Arabidopsis thaliana]
  misc_feature (1)..(230): Homolog of NCBI NO: 15227914 NR Description: bHLH protein family [Arabidopsis thaliana]
  misc_feature (68)..(226): Homolog of NCBI NO: 21554238 NR Description: Contains similarity to bHLH transcription factor
  misc_feature (68)..(226): Homolog of NCBI NO: 18390573 NR Description: bHLH protein [Arabidopsis thaliana]
  misc_feature (28)..(226): Homolog of NCBI NO: 38345229 NR Description: OSJNBa0084K20.3 [Oryza sativa (japonica
  misc_feature (7)..(232): Homolog of NCBI NO: 34907702 NR Description: P0035F12.11 [Oryza sativa (japonica
MTDPHGMAATGGAMGSYTQAGSDAALGHGHAQLSSQWSFSRQDLPQISEMGMIPADIGESIVGAGGCNSSSDAAQSSSYLSRTFSVGSWDDTNSIMFSSAPCKKPKVDPAAGADDMVTNFSTIDPQFGLSNSSLELPGMDDYLQLQQDSVACRVRARRGCATHPRSIAERERRTRISKRLKKLQDLVPNMDKQTNTSDMLDLAVDYIKELKDQVEKLKHDQANCCCLGNKSCC

SEQ ID NO: 1231 - DNA, 1259 bp, Zea mays subsp. mays
  misc_feature (1)..(1259): Ceres Seq. ID no. 15180797
ctggatgtcgcgcctcgccgccgtcgcctgtgtcgcgctcgccgccaaggtcgaggaaacgcgcgtgccgctgctcctcgacctccagctctgcgccgccgccagctccgacgctgacgcagcggacgcggacgtgttcgaggccaagacggtgcgccggatggagctgctcgttctctccgcgctagggtggcggatgcaccctgtcacgcccttctcctacctccagcctgtcctcgccgacgctgcgatgcgcctacgcaactgcgaggccgtcctgctcgcggtcatggccgattggaggtggcctcggcaccggccctcggcgtgggccgccgccgcattgctcaccacagccggcggcggcgacgacgactcggagctgctcgcgctcatcaatgcccccgaggacgagaccgcggagtgcgccaagatcatctccgaggtgacaggcatgagcttccttgtctgcgacgtcggcggcatgatcgccgggaataagcgtaagcacgcggcggcgcggatgtactcgccgccgctgagcccgagcggcgtgatcggcgcgctgtcctgcttcagctgcgagagctcgttgtccgccacagcggactcgcgcaccctcgctactacggctgcgggggtcggcccgtgggcaccgtcagcgcccgtgtccgtgtcgtcttcccctgagcccccaggtcgggcccccaagcgcgcccggcggcgggggtcccgcatccgcttccccccgacgaggagagccgcgacgcctggccgtccacctgcgccgcgtgacgcaccgtgccggaacggtgcctatggcgagatcccccgctcaggtagtcaggtggcggtggggatataaaggagcatcagaatctcgcgccggtgacgagaacgaaccattttgcccattgccgcgagagatggggggctagattgcaagaagaaaaggatgtaatgtctgcatgctcatgtatggcagcacattttgcaatgatggttctcgatcgtaactgtttggggggatcgtaactgttcggctggctacaagccgacactgttgcagctgtttggactgctgcagctgcaatccatagagagaaaaatactgtagaagccgcagccgcagccggattgcagccgcagcaagccgcagcgaacaagcttattattagttgcaattgtagtgttgctagttcttgttggttcttggcattgcttgcttggaaggccaatgacaggggccgcctttgtcc

SEQ ID NO: 1232 - protein, 287 aa, Zea mays subsp. mays
  peptide (1)..(287): Ceres Seq. ID no. 15180798
  misc_feature (1)..(67): Pfam Name: Cyclin, N-terminal domain Pfam Description: Cyclin, N-terminal domain
  misc_feature (1)..(197): Homolog of NCBI NO: 3608179 NR Description: cyclin D [Pisum sativum]
  misc_feature (1)..(212): Homolog of NCBI NO: 29374148 NR Description: cyclin D [Populus alba]
  misc_feature (1)..(216): Homolog of NCBI NO: 4586801 NR Description: NtcycD3-1 [Nicotiana tabacum]
  misc_feature (1)..(197): Homolog of NCBI NO: 27435851 NR Description: cyclin D [Populus tremula x Populus tremuloides]
  misc_feature (1)..(210): Homolog of NCBI NO: 33517432 NR Description: cyclin D3-2 [Euphorbia esula]
  misc_feature (1)..(244): Homolog of NCBI NO: 19070615 NR Description: D-type cyclin [Zea mays]
  misc_feature (1)..(197): Homolog of NCBI NO: 4160300 NR Description: cyclin D3.1 protein [Nicotiana tabacum]
  misc_feature (1)..(197): Homolog of NCBI NO: 6434199 NR Description: CycD3;2 [Lycopersicon esculentum]
  misc_feature (1)..(197): Homolog of NCBI NO: 4160302 NR Description: cyclin D3.2 protein [Nicotiana tabacum]
  misc_feature (1)..(202): Homolog of NCBI NO: 6448482 NR Description: cyclin D3a [Antirrhinum majus]
WMSRLAAVACVALAAKVEETRVPLLLDLQLCAAASSDADAADADVFEAKTVRRMELLVLSALGWRMHPVTPFSYLQPVLADAAMRLRNCEAVLLAVMADWRWPRHRPSAWAAAALLTTAGGGDDDSELLALINAPEDETAECAKIISEVTGMSFLVCDVGGMIAGNKRKHAAARMYSPPLSPSGVIGALSCFSCESSLSATADSRTLATTAAGVGPWAPSAPVSVSSSPEPPGRAPKRARRRGSRIRFPPTRRAATPGRPPAPRDAPCRNGAYGEIPRSGSQVAVGI

SEQ ID NO: 1233 - protein, 286 aa, Zea mays subsp. mays
  peptide (1)..(286): Ceres Seq. ID no. 15180799
  misc_feature (1)..(66): Pfam Name: Cyclin, N-terminal domain Pfam Description: Cyclin, N-terminal domain
  misc_feature (1)..(196): Homolog of NCBI NO: 3608179 NR Description: cyclin D [Pisum sativum]
  misc_feature (1)..(211): Homolog of NCBI NO: 29374148 NR Description: cyclin D [Populus alba]
  misc_feature (1)..(215): Homolog of NCBI NO: 4586801 NR Description: NtcycD3-1 [Nicotiana tabacum]
  misc_feature (1)..(196): Homolog of NCBI NO: 27435851 NR Description: cyclin D [Populus tremula x Populus tremuloides]
  misc_feature (1)..(209): Homolog of NCBI NO: 33517432 NR Description: cyclin D3-2 [Euphorbia esula]
  misc_feature (1)..(243): Homolog of NCBI NO: 19070615 NR Description: D-type cyclin [Zea mays]
  misc_feature (1)..(196): Homolog of NCBI NO: 4160300 NR Description: cyclin D3.1 protein [Nicotiana tabacum]
  misc_feature (1)..(196): Homolog of NCBI NO: 6434199 NR Description: CycD3;2 [Lycopersicon esculentum]
  misc_feature (1)..(196): Homolog of NCBI NO: 4160302 NR Description: cyclin D3.2 protein [Nicotiana tabacum]
  misc_feature (1)..(201): Homolog of NCBI NO: 6448482 NR Description: cyclin D3a [Antirrhinum majus]
MSRLAAVACVALAAKVEETRVPLLLDLQLCAAASSDADAADADVFEAKTVRRMELLVLSALGWRMHPVTPFSYLQPVLADAAMRLRNCEAVLLAVMADWRWPRHRPSAWAAAALLTTAGGGDDDSELLALINAPEDETAECAKIISEVTGMSFLVCDVGGMIAGNKRKHAAARMYSPPLSPSGVIGALSCFSCESSLSATADSRTLATTAAGVGPWAPSAPVSVSSSPEPPGRAPKRARRRGSRIRFPPTRRAATPGRPPAPRDAPCRNGAYGEIPRSGSQVAVGI

SEQ ID NO: 1234 - protein, 234 aa, Zea mays subsp. mays
  peptide (1)..(234): Ceres Seq. ID no. 15180800
  misc_feature (16)..(144): Pfam Name: Cyclin, C-terminal domain Pfam Description: Cyclin, C-terminal domain
  misc_feature (1)..(144): Homolog of NCBI NO: 3608179 NR Description: cyclin D [Pisum sativum]
  misc_feature (1)..(159): Homolog of NCBI NO: 29374148 NR Description: cyclin D [Populus alba]
  misc_feature (1)..(163): Homolog of NCBI NO: 4586801 NR Description: NtcycD3-1 [Nicotiana tabacum]
  misc_feature (1)..(144): Homolog of NCBI NO: 27435851 NR Description: cyclin D [Populus tremula x Populus tremuloides]
  misc_feature (1)..(157): Homolog of NCBI NO: 33517432 NR Description: cyclin D3-2 [Euphorbia esula]
  misc_feature (1)..(191): Homolog of NCBI NO: 19070615 NR Description: D-type cyclin [Zea mays]
  misc_feature (1)..(144): Homolog of NCBI NO: 4160300 NR Description: cyclin D3.1 protein [Nicotiana tabacum]
  misc_feature (1)..(144): Homolog of NCBI NO: 6434199 NR Description: CycD3;2 [Lycopersicon esculentum]
  misc_feature (1)..(144): Homolog of NCBI NO: 4160302 NR Description: cyclin D3.2 protein [Nicotiana tabacum]
  misc_feature (1)..(149): Homolog of NCBI NO: 6448482 NR Description: cyclin D3a [Antirrhinum majus]
MELLVLSALGWRMHPVTPFSYLQPVLADAAMRLRNCEAVLLAVMADWRWPRHRPSAWAAAALLTTAGGGDDDSELLALINAPEDETAECAKIISEVTGMSFLVCDVGGMIAGNKRKHAAARMYSPPLSPSGVIGALSCFSCESSLSATADSRTLATTAAGVGPWAPSAPVSVSSSPEPPGRAPKRARRRGSRIRFPPTRRAATPGRPPAPRDAPCRNGAYGEIPRSGSQVAVGI

SEQ ID NO: 1235 - DNA, 974 bp, Zea mays subsp. mays
  misc_feature (1)..(974): Ceres Seq. ID no. 15175468
  misc_feature: MA Experiment ID: 108529 Result: Down-regulated in Transcription
  misc_feature: MA Experiment 108529 PARAMETER Experiment Name: Zm_Imbibed_Seeds_P Parameter: Age (day) Value: 5 vs. 2
  misc_feature: MA Experiment 108529 PARAMETER Experiment Name: Zm_Imbibed_Seeds_P Parameter: Organism Value: Zea mays
  misc_feature: MA Experiment 108529 PARAMETER Experiment Name: Zm_Imbibed_Seeds_P Parameter: Plant Line Value: 35A19
  misc_feature: MA Experiment 108529 PARAMETER Experiment Name: Zm_Imbibed_Seeds_P Parameter: Tissue Value: Roots vs. Embryo
  misc_feature: MA Experiment ID: 108534 Result: Up-regulated in Transcription
  misc_feature: MA Experiment 108534 PARAMETER Experiment Name: Zm_4deg_Cold_P Parameter: Age (hr) Value: 8
  misc_feature: MA Experiment 108534 PARAMETER Experiment Name: Zm_4deg_Cold_P Parameter: Organism Value: Zea mays
  misc_feature: MA Experiment 108534 PARAMETER Experiment Name: Zm_4deg_Cold_P Parameter: Plant Line Value: 35A19
  misc_feature: MA Experiment 108534 PARAMETER Experiment Name: Zm_4deg_Cold_P Parameter: Temperature (deg C) Value: 4 vs. 22
  misc_feature: MA Experiment 108534 PARAMETER Experiment Name: Zm_4deg_Cold_P Parameter: Timepoint (hr) Value: 6
  misc_feature: MA Experiment 108534 PARAMETER Experiment Name: Zm_4deg_Cold_P Parameter: Tissue Value: Aerial
  misc_feature: MA Experiment ID: 108536 Result: Up-regulated in Transcription
  misc_feature: MA Experiment 108536 PARAMETER Experiment Name: Zm_Meristem_P Parameter: Age (day) Value: 8
  misc_feature: MA Experiment 108536 PARAMETER Experiment Name: Zm_Meristem_P Parameter: Organism Value: Zea mays
  misc_feature: MA Experiment 108536 PARAMETER Experiment Name: Zm_Meristem_P Parameter: Plant Line Value: 35A19
  misc_feature: MA Experiment 108536 PARAMETER Experiment Name: Zm_Meristem_P Parameter: Tissue Value: Shoot Meristem vs. Above Shoot Meristem
  misc_feature: MA Experiment ID: 108546 Result: Down-regulated in Transcription
  misc_feature: MA Experiment 108546 PARAMETER Experiment Name: Zm_Imbibed_Seeds_P Parameter: Age (day) Value: 3 vs. 2
  misc_feature: MA Experiment 108546 PARAMETER Experiment Name: Zm_Imbibed_Seeds_P Parameter: Organism Value: Zea mays
  misc_feature: MA Experiment 108546 PARAMETER Experiment Name: Zm_Imbibed_Seeds_P Parameter: Plant Line Value: 35A19
  misc_feature: MA Experiment 108546 PARAMETER Experiment Name: Zm_Imbibed_Seeds_P Parameter: Tissue Value: Roots vs. Embryo
  misc_feature: MA Experiment ID: 108559 Result: Down-regulated in Transcription
  misc_feature: MA Experiment 108559 PARAMETER Experiment Name: Zm_5mM_NO_P Parameter: Age (day) Value: 8
  misc_feature: MA Experiment 108559 PARAMETER Experiment Name: Zm_5mM_NO_P Parameter: Organism Value: Zea mays
  misc_feature: MA Experiment 108559 PARAMETER Experiment Name: Zm_5mM_NO_P Parameter: Plant Line Value: 35A19
  misc_feature: MA Experiment 108559 PARAMETER Experiment Name: Zm_5mM_NO_P Parameter: Timepoint (hr) Value: 12
  misc_feature: MA Experiment 108559 PARAMETER Experiment Name: Zm_5mM_NO_P Parameter: Tissue Value: Aerial
  misc_feature: MA Experiment 108559 PARAMETER Experiment Name: Zm_5mM_NO_P Parameter: Treatment Value: 5mM NO vs. No Treatment
  misc_feature: MA Experiment ID: 108689 Result: Up-regulated in Transcription
  misc_feature: MA Experiment 108689 PARAMETER Experiment Name: Zm_Drought_Roots_P Parameter: Age (day) Value: 9
  misc_feature: MA Experiment 108689 PARAMETER Experiment Name: Zm_Drought_Roots_P Parameter: Organism Value: Zea mays
  misc_feature: MA Experiment 108689 PARAMETER Experiment Name: Zm_Drought_Roots_P Parameter: Plant Line Value: 35A19
  misc_feature: MA Experiment 108689 PARAMETER Experiment Name: Zm_Drought_Roots_P Parameter: Timepoint (hr) Value: 24
  misc_feature: MA Experiment 108689 PARAMETER Experiment Name: Zm_Drought_Roots_P Parameter: Tissue Value: Roots
  misc_feature: MA Experiment 108689 PARAMETER Experiment Name: Zm_Drought_Roots_P Parameter: Treatment Value: Drought vs. No Drought
atcaaggctcacctccttccctctgttcccgtctcccccggcctctctcggcaagtcggcatccgtcctcgatccacgctcagctcgcctaaggactaagccatcagcgttcagcgatgagccggggcagcagcaacggcggcgtgaggagcgccgccaggctggaggagctgcagctggacctgtccccgccgccggtggggatggaggtggacggcgccgggggcgtccacggcgacagcgactcgtcgtcgtcgtcgccgccgagctcgtgcgtgtcgtcggacgggcggagctcgagcggcggcggcggcagcagccccgggggcagtaagtcgccgatggtgatcggcgcctgcacgcggtgcctcatgtactgcatggtggccaagaaggactacccgacctgcgtcaactgcaagcagccgtgcctggtggacctgctccacggcgaggccggccgtgttggcggcggcgccaggcaggccgccgccgccgctgacgacgacgacgacgacaagaagaagcaggtgcaccgccgtgagcgcaggtgaagtgaggccgccgtaagaagctggtggtggtgcccgtgcccgtgcccgcgccgcgcgcccagtggatgctcatacggagggtcagctaagctagctagctagctagctagcccggcgaagggcgaactgactgactgccgttggatcatccactggacagctagcccgcagggtgttaggatcggaggagctaaagctagctattagtacgtgtagcagcagcttagttcactcgatggatgctgctgctgttggagtaggtggttgttgtcatggtgagccgtgagcgtgggggcgtggggttatgtgtggtggactggagacttgtggttgtggaccgtggtggtgtctccggttgtaatcccccattccgttccagctgaagagaacatttgcaagctaatggaattatattagagt

SEQ ID NO: 1236 - protein, 145 aa, Zea mays subsp. mays
  peptide (1)..(145): Ceres Seq. ID no. 15175469
  misc_feature (11)..(126): Homolog of NCBI NO: 15239988 NR Description: B-type cyclin -related [Arabidopsis thaliana]
  misc_feature (42)..(108): Homolog of NCBI NO: 34908532 NR Description: P0423B08.15 [Oryza sativa (japonica
MSRGSSNGGVRSAARLEELQLDLSPPPVGMEVDGAGGVHGDSDSSSSSPPSSCVSSDGRSSSGGGGSSPGGSKSPMVIGACTRCLMYCMVAKKDYPTCVNCKQPCLVDLLHGEAGRVGGGARQAAAAADDDDDDKKKQVHRRERR

SEQ ID NO: 1237 - protein, 116 aa, Zea mays subsp. mays
  peptide (1)..(116): Ceres Seq. ID no. 15175470
  misc_feature (1)..(97): Homolog of NCBI NO: 15239988 NR Description: B-type cyclin -related [Arabidopsis thaliana]
  misc_feature (13)..(79): Homolog of NCBI NO: 34908532 NR Description: P0423B08.15 [Oryza sativa (japonica
MEVDGAGGVHGDSDSSSSSPPSSCVSSDGRSSSGGGGSSPGGSKSPMVIGACTRCLMYCMVAKKDYPTCVNCKQPCLVDLLHGEAGRVGGGARQAAAAADDDDDDKKKQVHRRERR

SEQ ID NO: 1238 - protein, 110 aa, Zea mays subsp. mays
  peptide (1)..(110): Ceres Seq. ID no. 15175471
SRLTSFPLFPSPPASLGKSASVLDPRSARLRTKPSAFSDEPGQQQRRREERRQAGGAAAGPVPAAGGDGGGRRRGRPRRQRLVVVVAAELVRVVGRAELERRRRQQPRGQ

SEQ ID NO: 1239 - DNA, 893 bp, Zea mays subsp. mays
  misc_feature (1)..(893): Ceres Seq. ID no. 13598935
atgagcacaccacactgcacgcccacaccacggaatagacctctcaacccagaacccagcaggcaccatggccgccgccgtgcccctcctcctccagctgctgctactgccactcctggtcgcgtcagcggcgggcggcggcggcggcgagaagagcacgcacatgaagctgtactggcacgacgtggtgagcgggccgagcccgacggcggtgcaggtggcgcgggcggcggtgaccaacacctccaagaccgccttcggcgtggtggtggtgatcgacgacccgctgacggagggcccggacctcaagtcctcgaagcccctcggccgcgctcagggcacgtacatcggcgccggcaaggacgagctgtccctcatgatgagcatgaacttcgtgttccaggccggcaagtacaacggtagcaccgtggccatcatgggccggaacgcggtgttcgacgccgtccgcgagatggctgtggtgggcggcaccggcgcgttcaggatggcgcgcggctacgcgcaggcccgcacgcacgccctcgacctcaacaccggcgacgccaccgtcgagtacaacctctacatcaagcactgaagtgaactgactgatcagttggtattgggaatgatacacaataataaatgaactggaaaagaataacctgatgatttttttgcttgggaaggaccagttgttcccacgtttgtgtcgatctacagtgtggcgactgttgcggtaacactacgtaaagaataatgacctgatggctttttttgtttaggaaaaaaaaaaaaaaaaaaaaaaaaaaaaaaaaaaaaaaaaaaaaaaaaaaattaaaaaaaaaaaaaaaaaggcttatcgataccgccaacctcragggggggcccgg

SEQ ID NO: 1240 - protein, 176 aa, Zea mays subsp. mays
  peptide (1)..(176): Ceres Seq. ID no. 15222455
  misc_feature (28)..(176): Pfam Name: Dirigent-like protein Pfam Description: Dirigent-like protein
  misc_feature (24)..(176): Homolog of NCBI NO: 15219966 NR Description: disease resistance response protein-related
  misc_feature (28)..(176): Homolog of NCBI NO: 15231302 NR Description: disease resistance response protein-related/
  misc_feature (26)..(176): Homolog of NCBI NO: 30681257 NR Description: disease resistance response protein-related/
  misc_feature (28)..(176): Homolog of NCBI NO: 22135914 NR Description: unknown protein [Arabidopsis thaliana]
  misc_feature (23)..(176): Homolog of NCBI NO: 15239779 NR Description: disease resistance response protein-related/
  misc_feature (28)..(176): Homolog of NCBI NO: 15222673 NR Description: disease resistance response protein-related/
  misc_feature (5)..(176): Homolog of NCBI NO: 15238982 NR Description: disease resistance response protein-related
  misc_feature (28)..(176): Homolog of NCBI NO: 15218836 NR Description: disease resistance response protein-related/
  misc_feature (5)..(176): Homolog of NCBI NO: 15238980 NR Description: disease resistance response protein-related
  misc_feature (28)..(176): Homolog of NCBI NO: 15217886 NR Description: disease resistance response protein-related/
MAAAVPLLLQLLLLPLLVASAAGGGGGEKSTHMKLYWHDVVSGPSPTAVQVARAAVTNTSKTAFGVVVVIDDPLTEGPDLKSSKPLGRAQGTYIGAGKDELSLMMSMNFVFQAGKYNGSTVAIMGRNAVFDAVREMAVVGGTGAFRMARGYAQARTHALDLNTGDATVEYNLYIKH

SEQ ID NO: 1241 - protein, 144 aa, Zea mays subsp. mays
  peptide (1)..(144): Ceres Seq. ID no. 15222456
  misc_feature (1)..(144): Pfam Name: Dirigent-like protein Pfam Description: Dirigent-like protein
  misc_feature (1)..(144): Homolog of NCBI NO: 15238982 NR Description: disease resistance response protein-related
  misc_feature (1)..(144): Homolog of NCBI NO: 15218836 NR Description: disease resistance response protein-related/
  misc_feature (1)..(144): Homolog of NCBI NO: 15219966 NR Description: disease resistance response protein-related
  misc_feature (1)..(144): Homolog of NCBI NO: 30681257 NR Description: disease resistance response protein-related/
  misc_feature (1)..(144): Homolog of NCBI NO: 15239779 NR Description: disease resistance response protein-related/
  misc_feature (1)..(144): Homolog of NCBI NO: 15222673 NR Description: disease resistance response protein-related/
  misc_feature (1)..(144): Homolog of NCBI NO: 22135914 NR Description: unknown protein [Arabidopsis thaliana]
  misc_feature (1)..(144): Homolog of NCBI NO: 15231302 NR Description: disease resistance response protein-related/
  misc_feature (1)..(144): Homolog of NCBI NO: 15238980 NR Description: disease resistance response protein-related
  misc_feature (1)..(144): Homolog of NCBI NO: 15217886 NR Description: disease resistance response protein-related/
MKLYWHDVVSGPSPTAVQVARAAVTNTSKTAFGVVVVIDDPLTEGPDLKSSKPLGRAQGTYIGAGKDELSLMMSMNFVFQAGKYNGSTVAIMGRNAVFDAVREMAVVGGTGAFRMARGYAQARTHALDLNTGDATVEYNLYIKH

SEQ ID NO: 1242 - protein, 140 aa, Zea mays subsp. mays
  peptide (1)..(140): Ceres Seq. ID no. 15222457
MSTPHCTPTPRNRPLNPEPSRHHGRRRAPPPPAAATATPGRVSGGRRRRREEHAHEAVLARRGERAEPDGGAGGAGGGDQHLQDRLRRGGGDRRPADGGPGPQVLEAPRPRSGHVHRRRQGRAVPHDEHELRVPGRQVQR

SEQ ID NO: 1243 - DNA, 791 bp, Zea mays subsp. mays
  misc_feature (1)..(791): Ceres Seq. ID no. 15179107
  misc_feature: MA Experiment ID: 108504 Result: Down-regulated in Transcription
  misc_feature: MA Experiment 108504 PARAMETER Experiment Name: Zm_Drought_P Parameter: Age (day) Value: 8
  misc_feature: MA Experiment 108504 PARAMETER Experiment Name: Zm_Drought_P Parameter: Organism Value: Zea mays
  misc_feature: MA Experiment 108504 PARAMETER Experiment Name: Zm_Drought_P Parameter: Plant Line Value: 35A19
  misc_feature: MA Experiment 108504 PARAMETER Experiment Name: Zm_Drought_P Parameter: Timepoint (hr) Value: 12
  misc_feature: MA Experiment 108504 PARAMETER Experiment Name: Zm_Drought_P Parameter: Tissue Value: Aerial
  misc_feature: MA Experiment 108504 PARAMETER Experiment Name: Zm_Drought_P Parameter: Treatment Value: Drought vs. No Drought
  misc_feature: MA Experiment ID: 108523 Result: Down-regulated in Transcription
  misc_feature: MA Experiment 108523 PARAMETER Experiment Name: Zm_42deg_Heat_P Parameter: Age (day) Value: 8
  misc_feature: MA Experiment 108523 PARAMETER Experiment Name: Zm_42deg_Heat_P Parameter: Organism Value: Zea mays
  misc_feature: MA Experiment 108523 PARAMETER Experiment Name: Zm_42deg_Heat_P Parameter: Plant Line Value: 35A19
  misc_feature: MA Experiment 108523 PARAMETER Experiment Name: Zm_42deg_Heat_P Parameter: Temperature (deg C) Value: 42 vs. 22
  misc_feature: MA Experiment 108523 PARAMETER Experiment Name: Zm_42deg_Heat_P Parameter: Timepoint (hr) Value: 6
  misc_feature: MA Experiment 108523 PARAMETER Experiment Name: Zm_42deg_Heat_P Parameter: Tissue Value: Aerial
  misc_feature: MA Experiment ID: 108527 Result: Down-regulated in Transcription
  misc_feature: MA Experiment 108527 PARAMETER Experiment Name: Zm_5mM_NO_P Parameter: Age (day) Value: 8
  misc_feature: MA Experiment 108527 PARAMETER Experiment Name: Zm_5mM_NO_P Parameter: Organism Value: Zea mays
  misc_feature: MA Experiment 108527 PARAMETER Experiment Name: Zm_5mM_NO_P Parameter: Plant Line Value: 35A19
  misc_feature: MA Experiment 108527 PARAMETER Experiment Name: Zm_5mM_NO_P Parameter: Timepoint (hr) Value: 6
  misc_feature: MA Experiment 108527 PARAMETER Experiment Name: Zm_5mM_NO_P Parameter: Tissue Value: Aerial
  misc_feature: MA Experiment 108527 PARAMETER Experiment Name: Zm_5mM_NO_P Parameter: Treatment Value: 5mM NO vs. No Treatment
  misc_feature: MA Experiment ID: 108536 Result: Down-regulated in Transcription
  misc_feature: MA Experiment 108536 PARAMETER Experiment Name: Zm_Meristem_P Parameter: Age (day) Value: 8
  misc_feature: MA Experiment 108536 PARAMETER Experiment Name: Zm_Meristem_P Parameter: Organism Value: Zea mays
  misc_feature: MA Experiment 108536 PARAMETER Experiment Name: Zm_Meristem_P Parameter: Plant Line Value: 35A19
  misc_feature: MA Experiment 108536 PARAMETER Experiment Name: Zm_Meristem_P Parameter: Tissue Value: Shoot Meristem vs. Above Shoot Meristem
  misc_feature: MA Experiment ID: 108545 Result: Up-regulated in Transcription
  misc_feature: MA Experiment 108545 PARAMETER Experiment Name: Zm_Imbibed_Seeds_P Parameter: Age (day) Value: 3 vs. 2
  misc_feature: MA Experiment 108545 PARAMETER Experiment Name: Zm_Imbibed_Seeds_P Parameter: Organism Value: Zea mays
  misc_feature: MA Experiment 108545 PARAMETER Experiment Name: Zm_Imbibed_Seeds_P Parameter: Plant Line Value: 35A19
  misc_feature: MA Experiment 108545 PARAMETER Experiment Name: Zm_Imbibed_Seeds_P Parameter: Tissue Value: Aerial vs. Embryo
  misc_feature: MA Experiment ID: 108547 Result: Up-regulated in Transcription
  misc_feature: MA Experiment 108547 PARAMETER Experiment Name: Zm_Imbibed_Seeds_P Parameter: Age (day) Value: 4 vs. 2
  misc_feature: MA Experiment 108547 PARAMETER Experiment Name: Zm_Imbibed_Seeds_P Parameter: Organism Value: Zea mays
  misc_feature: MA Experiment 108547 PARAMETER Experiment Name: Zm_Imbibed_Seeds_P Parameter: Plant Line Value: 35A19
  misc_feature: MA Experiment 108547 PARAMETER Experiment Name: Zm_Imbibed_Seeds_P Parameter: Tissue Value: Aerial vs. Embryo
  misc_feature: MA Experiment ID: 108559 Result: Down-regulated in Transcription
  misc_feature: MA Experiment 108559 PARAMETER Experiment Name: Zm_5mM_NO_P Parameter: Age (day) Value: 8
  misc_feature: MA Experiment 108559 PARAMETER Experiment Name: Zm_5mM_NO_P Parameter: Organism Value: Zea mays
  misc_feature: MA Experiment 108559 PARAMETER Experiment Name: Zm_5mM_NO_P Parameter: Plant Line Value: 35A19
  misc_feature: MA Experiment 108559 PARAMETER Experiment Name: Zm_5mM_NO_P Parameter: Timepoint (hr) Value: 12
  misc_feature: MA Experiment 108559 PARAMETER Experiment Name: Zm_5mM_NO_P Parameter: Tissue Value: Aerial
  misc_feature: MA Experiment 108559 PARAMETER Experiment Name: Zm_5mM_NO_P Parameter: Treatment Value: 5mM NO vs. No Treatment
  misc_feature: MA Experiment ID: 108687 Result: Down-regulated in Transcription
  misc_feature: MA Experiment 108687 PARAMETER Experiment Name: Zm_Embryos-Flowers__P Parameter: Tissue Value: Embryo vs. Aerial+
  misc_feature: MA Experiment ID: 20000478 Result: Down-regulated in Transcription
  misc_feature: MA Experiment 20000478 PARAMETER Experiment Name: Zm_5mM_SA_P Parameter: Age (day) Value: 11
  misc_feature: MA Experiment 20000478 PARAMETER Experiment Name: Zm_5mM_SA_P Parameter: Organism Value: Zea mays
  misc_feature: MA Experiment 20000478 PARAMETER Experiment Name: Zm_5mM_SA_P Parameter: Plant Line Value: 35A19
  misc_feature: MA Experiment 20000478 PARAMETER Experiment Name: Zm_5mM_SA_P Parameter: Timepoint (hr) Value: 72
  misc_feature: MA Experiment 20000478 PARAMETER Experiment Name: Zm_5mM_SA_P Parameter: Tissue Value: Aerial
  misc_feature: MA Experiment 20000478 PARAMETER Experiment Name: Zm_5mM_SA_P Parameter: Treatment Value: 5mM SA vs. No Treatment
  misc_feature: MA Experiment ID: 20000626 Result: Down-regulated in Transcription
  misc_feature: MA Experiment 20000626 PARAMETER Experiment Name: Zm_Herbicide-Treatments_P Parameter: Timepoint (hr) Value: 12
  misc_feature: MA Experiment 20000626 PARAMETER Experiment Name: Zm_Herbicide-Treatments_P Parameter: Tissue Value: Aerial
  misc_feature: MA Experiment 20000626 PARAMETER Experiment Name: Zm_Herbicide-Treatments_P Parameter: Treatment Value: Roundup vs. No Treatment
cagctcctcctccctcctatcatcctcttcctcaacgctccctcgtcattatataacacgaggatcagttcagagctgcttgacaaacactcacacctagcgaacagctatacacccaaccaggtggagagctgcaagccaccaagaccaaagtgatcgcaacctgtgcggcggcggcggcggcgacgatgagcaggaacaacggcaaggcgtcgaagctggagctcctgaggatgggcctgtcgagggcgaggggcgggccctcggcgacggcgcggcccggcggcggggacagcggcagcaacggccgcgcgacgacgtcgccgcgccgggtgtcctcctcgtcctcgtccaccgcgtcgccgccgagctcgtgcgtgtcgtccgagggcagccccgacgcggccgccgccgcgccggcgcccatggtcctggccgggtgcccccggtgcatgatgtacgtgatgctgtcccgcgaggacccccggtgcccccggtgccacaacgccgtgctgctcgacttcagcgagggcgaccagcgccgcccgcgtcagcgccggtgaaatggaaccaccacgagcgatcgagcacgtctgagttcgtcgttgccttcaagaagtcgtcgtcgtagcttcattttcccattcgcggccggagtttgtttcgattacccaaggaattattgcatagacctgtttcttccgagcggcacggtgccaaagggatcggtctaggtaataatttcatgctttgttagacaataataataagaataataatttcgtcttctc

SEQ ID NO: 1244 - protein, 124 aa, Zea mays subsp. mays
  peptide (1)..(124): Ceres Seq. ID no. 15179108
  misc_feature (52)..(119): Homolog of NCBI NO: 15242196 NR Description: expressed protein [Arabidopsis thaliana]
  misc_feature (1)..(104): Homolog of NCBI NO: 38345608 NR Description: OSJNBa0093O08.10 [Oryza sativa (japonica
  misc_feature (1)..(104): Homolog of NCBI NO: 5852085 NR Description: zwh0008.1 [Oryza sativa (indica cultivar-group)]
  misc_feature (41)..(116): Homolog of NCBI NO: 32479729 NR Description: OJ991214_12.5 [Oryza sativa (japonica
  misc_feature (54)..(115): Homolog of NCBI NO: 32488708 NR Description: OSJNBa0088H09.9 [Oryza sativa (japonica
  misc_feature (49)..(112): Homolog of NCBI NO: 18399295 NR Description: expressed protein [Arabidopsis thaliana]
  misc_feature (36)..(112): Homolog of NCBI NO: 15239988 NR Description: B-type cyclin -related [Arabidopsis thaliana]
  misc_feature (1)..(124): Homolog of NCBI NO: 34908532 NR Description: P0423B08.15 [Oryza sativa (japonica
MSRNNGKASKLELLRMGLSRARGGPSATARPGGGDSGSNGRATTSPRRVSSSSSSTASPPSSCVSSEGSPDAAAAAPAPMVLAGCPRCMMYVMLSREDPRCPRCHNAVLLDFSEGDQRRPRQRR

SEQ ID NO: 1245 - protein, 109 aa, Zea mays subsp. mays
  peptide (1)..(109): Ceres Seq. ID no. 15179109
  misc_feature (37)..(104): Homolog of NCBI NO: 15242196 NR Description: expressed protein [Arabidopsis thaliana]
  misc_feature (1)..(89): Homolog of NCBI NO: 38345608 NR Description: OSJNBa0093O08.10 [Oryza sativa (japonica
  misc_feature (1)..(89): Homolog of NCBI NO: 5852085 NR Description: zwh0008.1 [Oryza sativa (indica cultivar-group)]
  misc_feature (26)..(101): Homolog of NCBI NO: 32479729 NR Description: OJ991214_12.5 [Oryza sativa (japonica
  misc_feature (39)..(100): Homolog of NCBI NO: 32488708 NR Description: OSJNBa0088H09.9 [Oryza sativa (japonica
  misc_feature (34)..(97): Homolog of NCBI NO: 18399295 NR Description: expressed protein [Arabidopsis thaliana]
  misc_feature (21)..(97): Homolog of NCBI NO: 15239988 NR Description: B-type cyclin -related [Arabidopsis thaliana]
  misc_feature (1)..(109): Homolog of NCBI NO: 34908532 NR Description: P0423B08.15 [Oryza sativa (japonica
MGLSRARGGPSATARPGGGDSGSNGRATTSPRRVSSSSSSTASPPSSCVSSEGSPDAAAAAPAPMVLAGCPRCMMYVMLSREDPRCPRCHNAVLLDFSEGDQRRPRQRR

SEQ ID NO: 1246 - DNA, 709 bp, Zea mays subsp. mays
  misc_feature (1)..(709): Ceres Seq. ID no. 12633674
  misc_feature: MA Experiment ID: 20000487 Result: Up-regulated in Transcription
  misc_feature: MA Experiment 20000487 PARAMETER Experiment Name: Zm_50mM_NH4NO3_L_to_H_P Parameter: Organism Value: Zea mays
  misc_feature: MA Experiment 20000487 PARAMETER Experiment Name: Zm_50mM_NH4NO3_L_to_H_P Parameter: Timepoint (hr) Value: 4
  misc_feature: MA Experiment 20000487 PARAMETER Experiment Name: Zm_50mM_NH4NO3_L_to_H_P Parameter: Tissue Value: Leaves
  misc_feature: MA Experiment 20000487 PARAMETER Experiment Name: Zm_50mM_NH4NO3_L_to_H_P Parameter: Treatment Value: 50mM NH4NO3 vs. 100mM Mannitol
  misc_feature: MA Experiment ID: 20000488 Result: Up-regulated in Transcription
  misc_feature: MA Experiment 20000488 PARAMETER Experiment Name: Zm_50mM_NH4NO3_L_to_H_P Parameter: Organism Value: Zea mays
  misc_feature: MA Experiment 20000488 PARAMETER Experiment Name: Zm_50mM_NH4NO3_L_to_H_P Parameter: Timepoint (hr) Value: 8
  misc_feature: MA Experiment 20000488 PARAMETER Experiment Name: Zm_50mM_NH4NO3_L_to_H_P Parameter: Tissue Value: Leaves
  misc_feature: MA Experiment 20000488 PARAMETER Experiment Name: Zm_50mM_NH4NO3_L_to_H_P Parameter: Treatment Value: 50mM NH4NO3 vs. 100mM Mannitol
aatggatgagcacggggaaaaggaagagaacaagtctcaagattcggctttggcggcggagcagcgcgaggagacggcggcggcggagggagaggacacgtctgaggaatccacggaccagcgcgaggacgggcacgggtataaagcggacgaatcggcgggcctgctgcccgaggacgacgtgggctctggagaagcctcggcggcgccacacttcgggcacccgtgctcgttgttgcgcgcctgcgccggattcctgggcctgcacggctgcggcggcgatcagaagccggcggcggctgccgttgctgcatctgcagctgaagccgccacggcggcggcggcgagctcgtcccaggatgaagaagacggcggcgtcgacatggcgaaggctaacggtttctacatgcatgaggtgatcacccgcgtatgggcggtcgcggtgaggaggccgcggccgcggccgccggatcacgcgagagaagggagcggtggcaatggaggcgtacaccactaggagtagactcgccgcgcatggttgtctaccttggctcgctcatagcctccgcctacataaatattttgcccgtcagagatctgcggccgtctactgtctacatgcacctttaaataaatccatggctatgaagcatgaatgtctgatgtaattcatgtaggcttctccgatgcggacttcaaataagacaaa

SEQ ID NO: 1247 - protein, 171 aa, Zea mays subsp. mays
  peptide (1)..(171): Ceres Seq. ID no. 12633675
  misc_feature (8)..(171): Homolog of NCBI NO: 21741232 NR Description: OSJNBb0034I13.24 [Oryza sativa (japonica
MDEHGEKEENKSQDSALAAEQREETAAAEGEDTSEESTDQREDGHGYKADESAGLLPEDDVGSGEASAAPHFGHPCSLLRACAGFLGLHGCGGDQKPAAAAVAASAAEAATAAAASSSQDEEDGGVDMAKANGFYMHEVITRVWAVAVRRPRPRPPDHAREGSGGNGGVHH

SEQ ID NO: 1248 - protein, 138 aa, Zea mays subsp. mays
  peptide (1)..(138): Ceres Seq. ID no. 12633676
WMSTGKRKRTSLKIRLWRRSSARRRRRRRERTRLRNPRTSARTGTGIKRTNRRACCPRTTWALEKPRRRHTSGTRARCCAPAPDSWACTAAAAIRSRRRLPLLHLQLKPPRRRRRARPRMKKTAASTWRRLTVSTCMR

SEQ ID NO: 1249 - protein, 137 aa, Zea mays subsp. mays
  peptide (1)..(137): Ceres Seq. ID no. 12633677
MSTGKRKRTSLKIRLWRRSSARRRRRRRERTRLRNPRTSARTGTGIKRTNRRACCPRTTWALEKPRRRHTSGTRARCCAPAPDSWACTAAAAIRSRRRLPLLHLQLKPPRRRRRARPRMKKTAASTWRRLTVSTCMR

SEQ ID NO: 1250 - DNA, 803 bp, Zea mays subsp. mays
  misc_feature (1)..(803): Ceres Seq. ID no. 14303280
atcctaatcgaaaactcgagtctggtcccccacccctcagcgcgacgaaggtaagatgttcctgcggaggatcctgaccggcgggggcggcctggcggccctgagggcggcgcgcgccgtgaaggagacgacggggatcgtgggccttgaggtggtgcctaacgcgcgagaggttctggtagggctctacgagcgcacgctcaaagagatcaaggccgtccccgaagacgagggttaccgcaaggccgttgaatccttcaccggtcaccgcctccagatctgccaggaggaggaggactggaagcgcatcgaggaccgaatcggatgcgggcaggtcgaggagctcatcgaggaggccgaggacgagctcaagctcatcgctaaaatgattgaatgggatccatggggtgttcccgatgactacgaatgtgaggtgattgaagacgacaccccaattcctaagcatgttcctcagcaccggcctgttcctcttcctgaggagttcttcaaggcactagatgctgtcaaatctgatcctgctcttcaaggcgatgctcctcctcaagtgaaggcgtaaggatggctgttcctggctaacgtcatttcacattttgccgcggtgggtagggactggtttcttgtgtcatttgccagcaatgcgcttgctctgagcagaataaatttctggtgagtaccatcaaagtgtgaatttgaacttagtgattcggcacagtaaacttgttgcccatgaaatactcgatgccctgaacatcgtttgttttgacgttataatcgatgttgac

SEQ ID NO: 1251 - protein, 173 aa, Zea mays subsp. mays
  peptide (1)..(173): Ceres Seq. ID no. 14303281
  misc_feature (35)..(91): Pfam Name: ETC complex I subunit conserved region Pfam Description: ETC complex I subunit conserved region
  misc_feature (22)..(118): Homolog of NCBI NO: 37551400 NR Description: similar to NADH-ubiquinone oxidoreductase 13
  misc_feature (19)..(117): Homolog of NCBI NO: 12844779 NR Description: unnamed protein product [Mus musculus]
  misc_feature (19)..(117): Homolog of NCBI NO: 24662306 NR Description: CG6463-PA [Drosophila melanogaster]
  misc_feature (19)..(117): Homolog of NCBI NO: 28461281 NR Description: NADH dehydrogenase (ubiquinone) 1 alpha
  misc_feature (19)..(117): Homolog of NCBI NO: 233598 NR Description: 13 kDa-B polypeptide of iron-sulfur protein
  misc_feature (19)..(117): Homolog of NCBI NO: 31213375 NR Description: ENSANGP00000017869 [Anopheles gambiae]
  misc_feature (65)..(172): Homolog of NCBI NO: 22328992 NR Description: hypothetical protein [Arabidopsis thaliana]
  misc_feature (22)..(128): Homolog of NCBI NO: 28829489 NR Description: similar to NADH-ubiquinone oxidoreductase 13 KD-B
  misc_feature (23)..(159): Homolog of NCBI NO: 16930745 NR Description: NADH-ubiquinone oxidoreductase [Retama raetam]
  misc_feature (1)..(172): Homolog of NCBI NO: 18423437 NR Description: expressed protein [Arabidopsis thaliana]
MFLRRILTGGGGLAALRAARAVKETTGIVGLEVVPNAREVLVGLYERTLKEIKAVPEDEGYRKAVESFTGHRLQICQEEEDWKRIEDRIGCGQVEELIEEAEDELKLIAKMIEWDPWGVPDDYECEVIEDDTPIPKHVPQHRPVPLPEEFFKALDAVKSDPALQGDAPPQVKA

SEQ ID NO: 1252 - DNA, 1112 bp, Zea mays subsp. mays
  misc_feature (1)..(1112): Ceres Seq. ID no. 14305465
  misc_feature: MA Experiment ID: 108528 Result: Up-regulated in Transcription
  misc_feature: MA Experiment 108528 PARAMETER Experiment Name: Zm_Imbibed_Seeds_P Parameter: Age (day) Value: 5 vs. 2
  misc_feature: MA Experiment 108528 PARAMETER Experiment Name: Zm_Imbibed_Seeds_P Parameter: Organism Value: Zea mays
  misc_feature: MA Experiment 108528 PARAMETER Experiment Name: Zm_Imbibed_Seeds_P Parameter: Plant Line Value: 35A19
  misc_feature: MA Experiment 108528 PARAMETER Experiment Name: Zm_Imbibed_Seeds_P Parameter: Tissue Value: Aerial vs. Embryo
  misc_feature: MA Experiment ID: 108530 Result: Up-regulated in Transcription
  misc_feature: MA Experiment 108530 PARAMETER Experiment Name: Zm_Imbibed_Seeds_P Parameter: Age (day) Value: 6 vs. 2
  misc_feature: MA Experiment 108530 PARAMETER Experiment Name: Zm_Imbibed_Seeds_P Parameter: Organism Value: Zea mays
  misc_feature: MA Experiment 108530 PARAMETER Experiment Name: Zm_Imbibed_Seeds_P Parameter: Plant Line Value: 35A19
  misc_feature: MA Experiment 108530 PARAMETER Experiment Name: Zm_Imbibed_Seeds_P Parameter: Tissue Value: Aerial vs. Embryo
  misc_feature: MA Experiment ID: 108544 Result: Up-regulated in Transcription
  misc_feature: MA Experiment ID: 108547 Result: Up-regulated in Transcription
  misc_feature: MA Experiment 108547 PARAMETER Experiment Name: Zm_Imbibed_Seeds_P Parameter: Age (day) Value: 4 vs. 2
  misc_feature: MA Experiment 108547 PARAMETER Experiment Name: Zm_Imbibed_Seeds_P Parameter: Organism Value: Zea mays
  misc_feature: MA Experiment 108547 PARAMETER Experiment Name: Zm_Imbibed_Seeds_P Parameter: Plant Line Value: 35A19
  misc_feature: MA Experiment 108547 PARAMETER Experiment Name: Zm_Imbibed_Seeds_P Parameter: Tissue Value: Aerial vs. Embryo
  misc_feature: MA Experiment ID: 108559 Result: Down-regulated in Transcription
  misc_feature: MA Experiment 108559 PARAMETER Experiment Name: Zm_5mM_NO_P Parameter: Age (day) Value: 8
  misc_feature: MA Experiment 108559 PARAMETER Experiment Name: Zm_5mM_NO_P Parameter: Organism Value: Zea mays
  misc_feature: MA Experiment 108559 PARAMETER Experiment Name: Zm_5mM_NO_P Parameter: Plant Line Value: 35A19
  misc_feature: MA Experiment 108559 PARAMETER Experiment Name: Zm_5mM_NO_P Parameter: Timepoint (hr) Value: 12
  misc_feature: MA Experiment 108559 PARAMETER Experiment Name: Zm_5mM_NO_P Parameter: Tissue Value: Aerial
  misc_feature: MA Experiment 108559 PARAMETER Experiment Name: Zm_5mM_NO_P Parameter: Treatment Value: 5mM NO vs. No Treatment
  misc_feature: MA Experiment ID: 108687 Result: Down-regulated in Transcription
  misc_feature: MA Experiment 108687 PARAMETER Experiment Name: Zm_Embryos-Flowers__P Parameter: Tissue Value: Embryo vs. Aerial+
  misc_feature: MA Experiment ID: 108688 Result: Down-regulated in Transcription
  misc_feature: MA Experiment 108688 PARAMETER Experiment Name: Zm_Embryos-Flowers__P Parameter: Tissue Value: Immature Flowers vs. Aerial+
  misc_feature: MA Experiment ID: 20000477 Result: Down-regulated in Transcription
  misc_feature: MA Experiment 20000477 PARAMETER Experiment Name: Zm_5mM_SA_P Parameter: Age (day) Value: 10
  misc_feature: MA Experiment 20000477 PARAMETER Experiment Name: Zm_5mM_SA_P Parameter: Organism Value: Zea mays
  misc_feature: MA Experiment 20000477 PARAMETER Experiment Name: Zm_5mM_SA_P Parameter: Plant Line Value: 35A19
  misc_feature: MA Experiment 20000477 PARAMETER Experiment Name: Zm_5mM_SA_P Parameter: Timepoint (hr) Value: 48
  misc_feature: MA Experiment 20000477 PARAMETER Experiment Name: Zm_5mM_SA_P Parameter: Tissue Value: Aerial
  misc_feature: MA Experiment 20000477 PARAMETER Experiment Name: Zm_5mM_SA_P Parameter: Treatment Value: 5mM SA vs. No Treatment
  misc_feature: MA Experiment ID: 20000535 Result: Down-regulated in Transcription
  misc_feature: MA Experiment 20000535 PARAMETER Experiment Name: Zm_Hybrid_Seed_Dev_P Parameter: DAP Value: 30 vs. 12
  misc_feature: MA Experiment 20000535 PARAMETER Experiment Name: Zm_Hybrid_Seed_Dev_P Parameter: Organism Value: Zea mays
  misc_feature: MA Experiment 20000535 PARAMETER Experiment Name: Zm_Hybrid_Seed_Dev_P Parameter: Plant Line Value: 35A19
  misc_feature: MA Experiment 20000535 PARAMETER Experiment Name: Zm_Hybrid_Seed_Dev_P Parameter: Tissue Value: Embryo vs. Unfert Floret
  misc_feature: MA Experiment ID: 20001610 Result: Down-regulated in Transcription
  misc_feature: MA Experiment 20001610 PARAMETER Experiment Name: Zm_50ppm_KNO3_L-to-H_P Parameter: Age (day) Value: 19
  misc_feature: MA Experiment 20001610 PARAMETER Experiment Name: Zm_50ppm_KNO3_L-to-H_P Parameter: Organism Value: Zea mays
  misc_feature: MA Experiment 20001610 PARAMETER Experiment Name: Zm_50ppm_KNO3_L-to-H_P Parameter: Plant Line Value: 35A19
  misc_feature: MA Experiment 20001610 PARAMETER Experiment Name: Zm_50ppm_KNO3_L-to-H_P Parameter: Timepoint (hr) Value: 2
  misc_feature: MA Experiment 20001610 PARAMETER Experiment Name: Zm_50ppm_KNO3_L-to-H_P Parameter: Tissue Value: Roots
  misc_feature: MA Experiment 20001610 PARAMETER Experiment Name: Zm_50ppm_KNO3_L-to-H_P Parameter: Treatment Value: 50ppm KNO3 vs. 50ppm KCl
ataatcggctcacttggccccccgcgcagcccgattccatccatgccgcggcgcccgcgtccactggtgtcgcgtcgcgctgcacgcatcggtggtgccaaggtggcgacctgacgcctacaaggaggcgtccgcgccgcgcctttcccagcttctgcgcgcggcgagatagggaggaggcggagccgcggaggagagagatggacccggagaagcagcgccagcacgacggcgcggtggatgcggacatcgagcggctccccgtcgacctcctcgctcacatcctctccctcctgtcgcccttccgcgacctgtccatggcggggggagtgagccggaggtggcgctgggcggtggagcggtcgctggcgtcgcggcggcggctgagcttcgcgggccagcgcaccggcgacgacaccgccgcgcgcctcgtccgcgccgccgtcaacctccgcgacctcgacatttcacgaagctgctggggctgccgaatcaccgacgatggcctcatcaagatttcgtccgcggattgcgtcggcaacctgacgtccatatcgctctggggattggccgggatcaccgataagggcgtggtccgtctggtttcgagggcttattctctgcagcacctgaatatcggtggaacgttcatcacagatgaatccctctacgcagtcgcaaacagctgcgcaaatcttaagagcatcatcctgtggagctgccgccacgtgacggagggcgggctggtggcgctggtgaacaagtgccggcggctggagtgcatcaacgtgggcgggatgcgggtcccgccggagagcttggtgggcctgctctccatcagccccgccctggagatcaggtccaccgcacgcatcctcaacctcaacctcaacgccggggtgcaggtctcctgatccatgtgtgtgtggcttgccatgagcccatgcatcgtcagaagggactcactcaccagacacacacacgtcatcgtgttgccataatgtttgttgtaaaaaaaaaacagatacgtcatcgtgattctatatatctcctatacatgttacacacaataaaccataaaatgaactgtacggccacagtgccttgcaagc

SEQ ID NO: 1253 - protein, 303 aa, Zea mays subsp. mays
  peptide (1)..(303): Ceres Seq. ID no. 14305466
  misc_feature (83)..(129): Pfam Name: F-box domain Pfam Description: F-box domain
  misc_feature (102)..(303): Homolog of NCBI NO: 16306582 NR Description: F-box and leucine-rich repeat protein 2
  misc_feature (102)..(303): Homolog of NCBI NO: 5919219 NR Description: leucine-rich repeats containing F-box protein
  misc_feature (163)..(294): Homolog of NCBI NO: 18400846 NR Description: F-box protein family, AtFBL6 [Arabidopsis
  misc_feature (102)..(303): Homolog of NCBI NO: 30519963 NR Description: F-box and leucine-rich repeat protein 2 [Mus
  misc_feature (138)..(264): Homolog of NCBI NO: 27671511 NR Description: similar to hypothetical protein MGC15482
  misc_feature (84)..(297): Homolog of NCBI NO: 15237286 NR Description: expressed protein [Arabidopsis thaliana]
  misc_feature (103)..(258): Homolog of NCBI NO: 34907434 NR Description: P0018C10.44 [Oryza sativa (japonica
  misc_feature (232)..(296): Homolog of NCBI NO: 34898376 NR Description: Hypothetical protein [Oryza sativa (japonica
  misc_feature (83)..(204): Homolog of NCBI NO: 34898378 NR Description: Hypothetical protein [Oryza sativa (japonica
  misc_feature (80)..(293): Homolog of NCBI NO: 15240225 NR Description: F-box protein family [Arabidopsis thaliana]
NRLTWPPAQPDSIHAAAPASTGVASRCTHRWCQGGDLTPTRRRPRRAFPSFCARRDREEAEPRRREMDPEKQRQHDGAVDADIERLPVDLLAHILSLLSPFRDLSMAGGVSRRWRWAVERSLASRRRLSFAGQRTGDDTAARLVRAAVNLRDLDISRSCWGCRITDDGLIKISSADCVGNLTSISLWGLAGITDKGVVRLVSRAYSLQHLNIGGTFITDESLYAVANSCANLKSIILWSCRHVTEGGLVALVNKCRRLECINVGGMRVPPESLVGLLSISPALEIRSTARILNLNLNAGVQVS

SEQ ID NO: 1254 - protein, 237 aa, Zea mays subsp. mays
  peptide (1)..(237): Ceres Seq. ID no. 14305467
  misc_feature (17)..(63): Pfam Name: F-box domain Pfam Description: F-box domain
  misc_feature (36)..(237): Homolog of NCBI NO: 6063090 NR Description: F-box protein FBL2 [Homo sapiens]
  misc_feature (36)..(237): Homolog of NCBI NO: 5919219 NR Description: leucine-rich repeats containing F-box protein
  misc_feature (97)..(228): Homolog of NCBI NO: 18400846 NR Description: F-box protein family, AtFBL6 [Arabidopsis
  misc_feature (36)..(237): Homolog of NCBI NO: 30519963 NR Description: F-box and leucine-rich repeat protein 2 [Mus
  misc_feature (72)..(198): Homolog of NCBI NO: 27671511 NR Description: similar to hypothetical protein MGC15482
  misc_feature (18)..(231): Homolog of NCBI NO: 15237286 NR Description: expressed protein [Arabidopsis thaliana]
  misc_feature (37)..(192): Homolog of NCBI NO: 34907434 NR Description: P0018C10.44 [Oryza sativa (japonica
  misc_feature (166)..(230): Homolog of NCBI NO: 34898376 NR Description: Hypothetical protein [Oryza sativa (japonica
  misc_feature (17)..(138): Homolog of NCBI NO: 34898378 NR Description: Hypothetical protein [Oryza sativa (japonica
  misc_feature (14)..(227): Homolog of NCBI NO: 15240225 NR Description: F-box protein family [Arabidopsis thaliana]
MDPEKQRQHDGAVDADIERLPVDLLAHILSLLSPFRDLSMAGGVSRRWRWAVERSLASRRRLSFAGQRTGDDTAARLVRAAVNLRDLDISRSCWGCRITDDGLIKISSADCVGNLTSISLWGLAGITDKGVVRLVSRAYSLQHLNIGGTFITDESLYAVANSCANLKSIILWSCRHVTEGGLVALVNKCRRLECINVGGMRVPPESLVGLLSISPALEIRSTARILNLNLNAGVQVS

SEQ ID NO: 1255 - protein, 198 aa, Zea mays subsp. mays
  peptide (1)..(198): Ceres Seq. ID no. 14305468
  misc_feature (1)..(198): Homolog of NCBI NO: 16306582 NR Description: F-box and leucine-rich repeat protein 2
  misc_feature (1)..(198): Homolog of NCBI NO: 5919219 NR Description: leucine-rich repeats containing F-box protein
  misc_feature (58)..(189): Homolog of NCBI NO: 18400846 NR Description: F-box protein family, AtFBL6 [Arabidopsis
  misc_feature (1)..(198): Homolog of NCBI NO: 30519963 NR Description: F-box and leucine-rich repeat protein 2 [Mus
  misc_feature (33)..(159): Homolog of NCBI NO: 27671511 NR Description: similar to hypothetical protein MGC15482
  misc_feature (1)..(192): Homolog of NCBI NO: 15237286 NR Description: expressed protein [Arabidopsis thaliana]
  misc_feature (1)..(153): Homolog of NCBI NO: 34907434 NR Description: P0018C10.44 [Oryza sativa (japonica
  misc_feature (127)..(191): Homolog of NCBI NO: 34898376 NR Description: Hypothetical protein [Oryza sativa (japonica
  misc_feature (1)..(99): Homolog of NCBI NO: 34898378 NR Description: Hypothetical protein [Oryza sativa (japonica
  misc_feature (1)..(188): Homolog of NCBI NO: 15240225 NR Description: F-box protein family [Arabidopsis thaliana]
MAGGVSRRWRWAVERSLASRRRLSFAGQRTGDDTAARLVRAAVNLRDLDISRSCWGCRITDDGLIKISSADCVGNLTSISLWGLAGITDKGVVRLVSRAYSLQHLNIGGTFITDESLYAVANSCANLKSIILWSCRHVTEGGLVALVNKCRRLECINVGGMRVPPESLVGLLSISPALEIRSTARILNLNLNAGVQVS

SEQ ID NO: 1256 - DNA, 992 bp, Zea mays subsp. mays
  misc_feature (1)..(992): Ceres Seq. ID no. 13622393
gccttccctctgaaaactcttcattctcctctcctccgccgcgccgccaacttcccctcccgtcaactccggctcccgcgcgagatcgagctagcgtttggggttctcgagaccggctgccatggcgacagagcaagaggcggagaactacacggtggaggaccttgtggccctgaatccgtacaaccccgacatcctcaacgaccttgagaagttcgtcaacgagcaagttgcgtctcaaacatataacttggatgcaaatctcagccttcttcgcctgtaccagtttgagccaggaaggatgagcatacatattgtggcccacatactgatcaaggctctcatggcaatgccggcccctgacttcagtctttgcttattcttaattcctgaacatgtgcaaatggaagagcaattcaaggcattgatagttctttctcactatctagagactgctaggttcaggcagttttgggatgacgcagcaaacaaccgccacatattggaagcagttccaggttttgagcaggcaatccaatcctatgcaattcatgtactttccttgacataccagaaagttccaaggcatattcttgcagaggcaatcaacattgaaggtctcgctttggacaagtttcttgagtaccatgctgcgaactcaggttgggtaattgagaagggtgggcagtctcaagtgattgttcttccacgcaatgagttcaatcacccccagctcaagaagaacacagctgataccgttccatttgagcacctaacacgcatattccctgttcttagctgattcaggcgtagtgagagatatacaatagaactcagagcgagtgaagcttctctaagcaattgtatcatctcctttgtggtataccgtattttaagatctcggtatacctgttcttttttatggctgaattggtacctgcaacttggttattactataacgaaatgaccagttatgagattggtcggcccc

SEQ ID NO: 1257 - protein, 226 aa, Zea mays subsp. mays
  peptide (1)..(226): Ceres Seq. ID no. 13622394
  misc_feature (1)..(226): Pfam Name: Eukaryotic translation initiation factor 3 Pfam Description: Eukaryotic translation initiation factor 3
  misc_feature (54)..(221): Homolog of NCBI NO: 20380678 NR Description: 1200009C21Rik protein [Mus musculus]
  misc_feature (13)..(218): Homolog of NCBI NO: 31201965 NR Description: ENSANGP00000015097 [Anopheles gambiae]
  misc_feature (5)..(182): Homolog of NCBI NO: 38047673 NR Description: similar to Drosophila melanogaster CG10306
  misc_feature (5)..(218): Homolog of NCBI NO: 19922704 NR Description: CG10306-PA [Drosophila melanogaster]
  misc_feature (15)..(221): Homolog of NCBI NO: 5114051 NR Description: HSPC029 [Homo sapiens]
  misc_feature (15)..(221): Homolog of NCBI NO: 10801345 NR Description: muscle specific gene [Homo sapiens]
  misc_feature (15)..(221): Homolog of NCBI NO: 27730981 NR Description: similar to RIKEN cDNA 1200009C21
  misc_feature (15)..(221): Homolog of NCBI NO: 21312044 NR Description: RIKEN cDNA 1200009C21 [Mus musculus]
  misc_feature (5)..(225): Homolog of NCBI NO: 15234123 NR Description: expressed protein [Arabidopsis thaliana]
  misc_feature (1)..(226): Homolog of NCBI NO: 23396617 NR Description: Eukaryotic translation initiation factor 3
MATEQEAENYTVEDLVALNPYNPDILNDLEKFVNEQVASQTYNLDANLSLLRLYQFEPGRMSIHIVAHILIKALMAMPAPDFSLCLFLIPEHVQMEEQFKALIVLSHYLETARFRQFWDDAANNRHILEAVPGFEQAIQSYAIHVLSLTYQKVPRHILAEAINIEGLALDKFLEYHAANSGWVIEKGGQSQVIVLPRNEFNHPQLKKNTADTVPFEHLTRIFPVLS

SEQ ID NO: 1258 - protein, 166 aa, Zea mays subsp. mays
  peptide (1)..(166): Ceres Seq. ID no. 13622395
  misc_feature (1)..(166): Pfam Name: Eukaryotic translation initiation factor 3 Pfam Description: Eukaryotic translation initiation factor 3
  misc_feature (1)..(166): Homolog of NCBI NO: 23396617 NR Description: Eukaryotic translation initiation factor 3
  misc_feature (1)..(161): Homolog of NCBI NO: 20380678 NR Description: 1200009C21Rik protein [Mus musculus]
  misc_feature (1)..(158): Homolog of NCBI NO: 31201965 NR Description: ENSANGP00000015097 [Anopheles gambiae]
  misc_feature (1)..(122): Homolog of NCBI NO: 38047673 NR Description: similar to Drosophila melanogaster CG10306
  misc_feature (1)..(158): Homolog of NCBI NO: 19922704 NR Description: CG10306-PA [Drosophila melanogaster]
  misc_feature (1)..(161): Homolog of NCBI NO: 5114051 NR Description: HSPC029 [Homo sapiens]
  misc_feature (1)..(161): Homolog of NCBI NO: 10801345 NR Description: muscle specific gene [Homo sapiens]
  misc_feature (1)..(161): Homolog of NCBI NO: 27730981 NR Description: similar to RIKEN cDNA 1200009C21
  misc_feature (1)..(161): Homolog of NCBI NO: 21312044 NR Description: RIKEN cDNA 1200009C21 [Mus musculus]
  misc_feature (1)..(165): Homolog of NCBI NO: 15234123 NR Description: expressed protein [Arabidopsis thaliana]
MSIHIVAHILIKALMAMPAPDFSLCLFLIPEHVQMEEQFKALIVLSHYLETARFRQFWDDAANNRHILEAVPGFEQAIQSYAIHVLSLTYQKVPRHILAEAINIEGLALDKFLEYHAANSGWVIEKGGQSQVIVLPRNEFNHPQLKKNTADTVPFEHLTRIFPVLS

SEQ ID NO: 1259 - protein, 152 aa, Zea mays subsp. mays
  peptide (1)..(152): Ceres Seq. ID no. 13622396
  misc_feature (1)..(152): Pfam Name: Eukaryotic translation initiation factor 3 Pfam Description: Eukaryotic translation initiation factor 3
  misc_feature (1)..(147): Homolog of NCBI NO: 20380678 NR Description: 1200009C21Rik protein [Mus musculus]
  misc_feature (1)..(144): Homolog of NCBI NO: 31201965 NR Description: ENSANGP00000015097 [Anopheles gambiae]
  misc_feature (1)..(108): Homolog of NCBI NO: 38047673 NR Description: similar to Drosophila melanogaster CG10306
  misc_feature (1)..(144): Homolog of NCBI NO: 19922704 NR Description: CG10306-PA [Drosophila melanogaster]
  misc_feature (1)..(147): Homolog of NCBI NO: 5114051 NR Description: HSPC029 [Homo sapiens]
  misc_feature (1)..(147): Homolog of NCBI NO: 10801345 NR Description: muscle specific gene [Homo sapiens]
  misc_feature (1)..(147): Homolog of NCBI NO: 27730981 NR Description: similar to RIKEN cDNA 1200009C21
  misc_feature (1)..(147): Homolog of NCBI NO: 21312044 NR Description: RIKEN cDNA 1200009C21 [Mus musculus]
  misc_feature (1)..(151): Homolog of NCBI NO: 15234123 NR Description: expressed protein [Arabidopsis thaliana]
  misc_feature (1)..(152): Homolog of NCBI NO: 23396617 NR Description: Eukaryotic translation initiation factor 3
MAMPAPDFSLCLFLIPEHVQMEEQFKALIVLSHYLETARFRQFWDDAANNRHILEAVPGFEQAIQSYAIHVLSLTYQKVPRHILAEAINIEGLALDKFLEYHAANSGWVIEKGGQSQVIVLPRNEFNHPQLKKNTADTVPFEHLTRIFPVLS

SEQ ID NO: 1260 - DNA, 1099 bp, Zea mays subsp. mays
  misc_feature (1)..(1099): Ceres Seq. ID no. 12377905
aagtcggtctctctctcactctctcttgtctccaagtttgtaaccctagccgccaagcttgaagctccagccgtgctcgtgtagggctgcaggccatccgggctccggcttccggcatccaccaggcgtccttagaatacggtgcagcgagcagcaagtcgccgagcagccgagccaccgccgagcagccgagccgccgccgagcgccgagtcttctctggtgtttgctaggggaccatggaggagcacggagcggaagacctcctgtgcgaggcgatgggatctgcggcgcaggtcgtggtggtagaggattgcgtggaggcaccgggggccttcgtcctccacctcctcctcaagcgcgcgctcgcaggctgcggctccgctgccttcctcgccctcgcgcagcccttctcccattacgaccgcgtcctgcgcaagatgggctgtaacctttccctgcataggaggaatgagaggcttcatttctttgaattgctaggattcccaggtggagcaagggaaggnaccattgctgatagctttgctctattgtncaatgaaattcaaagactggtggaggcaaacagggctggagaaaatgaaggccagttcnccatcgttatagacgacgcttccctgttggaagtcgtggcccttggttctgtaagcnatgtgctggatttcttgcactattgtttcacactcacgtntgagatgaattgcaagctagtgatcctcattcacgaggatatatacgcaaatgaggagaacatgggtctccttttacatctacgctacattgcggatcttgtgattaaagcagcacctttaagcactggtttggctgctgatgttcatggacagctggcggttgtgaacaagggtacattcagcgagcaaagggcaaaagcacagaaagtttggaacttccatttcaaaaagaaaacggtgctgacttnttctatccagggagtagacattagggaatacttgtatacagtagaaacaactctggttgtgataactgataaccagtgctgctattcttcgtgtaccttgtgctaaacacagtaaagttttgtccaatccttcatttcgc

SEQ ID NO: 1261 - protein, 275 aa, Zea mays subsp. mays
  peptide (1)..(275): Ceres Seq. ID no. 12377906
  misc_feature (31)..(238): Homolog of NCBI NO: 28546325 NR Description: RIKEN cDNA 2610001P13 [Mus musculus]
  misc_feature (12)..(238): Homolog of NCBI NO: 12847283 NR Description: unnamed protein product [Mus musculus]
  misc_feature (31)..(234): Homolog of NCBI NO: 34866372 NR Description: similar to hypothetical protein FLJ20211 [Rattus
  misc_feature (31)..(210): Homolog of NCBI NO: 8923200 NR Description: hypothetical protein FLJ20211 [Homo sapiens]
  misc_feature (31)..(213): Homolog of NCBI NO: 12653677 NR Description: Similar to hypothetical protein FLJ20211 [Homo
  misc_feature (19)..(206): Homolog of NCBI NO: 7486308 NR Description: hypothetical protein F28M11.10 - Arabidopsis
  misc_feature (61)..(211): Homolog of NCBI NO: 7486308 NR Description: hypothetical protein F28M11.10 - Arabidopsis
  misc_feature (19)..(236): Homolog of NCBI NO: 18413296 NR Description: expressed protein
  misc_feature (1)..(236): Homolog of NCBI NO: 24796809 NR Description: unknown protein [Oryza sativa (japonica
  misc_feature (96)..(96): Xaa is any aa, unknown or other
  misc_feature (106)..(106): Xaa is any aa, unknown or other
  misc_feature (126)..(126): Xaa is any aa, unknown or other
  misc_feature (145)..(145): Xaa is any aa, unknown or other
  misc_feature (158)..(158): Xaa is any aa, unknown or other
  misc_feature (241)..(241): Xaa is any aa, unknown or other
MEEHGAEDLLCEAMGSAAQVVVVEDCVEAPGAFVLHLLLKRALAGCGSAAFLALAQPFSHYDRVLRKMGCNLSLHRRNERLHFFELLGFPGGAREXTIADSFALLXNEIQRLVEANRAGENEGQFXIVIDDASLLEVVALGSVSXVLDFLHYCFTLTXEMNCKLVILIHEDIYANEENMGLLLHLRYIADLVIKAAPLSTGLAADVHGQLAVVNKGTFSEQRAKAQKVWNFHFKKKTVLTXSIQGVDIREYLYTVETTLVVITDNQCCYSSCTLC

SEQ ID NO: 1262 - protein, 262 aa, Zea mays subsp. mays
  peptide (1)..(262): Ceres Seq. ID no. 12377907
  misc_feature (18)..(225): Homolog of NCBI NO: 28546325 NR Description: RIKEN cDNA 2610001P13 [Mus musculus]
  misc_feature (1)..(225): Homolog of NCBI NO: 12847283 NR Description: unnamed protein product [Mus musculus]
  misc_feature (18)..(221): Homolog of NCBI NO: 34866372 NR Description: similar to hypothetical protein FLJ20211 [Rattus
  misc_feature (18)..(197): Homolog of NCBI NO: 8923200 NR Description: hypothetical protein FLJ20211 [Homo sapiens]
  misc_feature (18)..(200): Homolog of NCBI NO: 12653677 NR Description: Similar to hypothetical protein FLJ20211 [Homo
  misc_feature (6)..(193): Homolog of NCBI NO: 7486308 NR Description: hypothetical protein F28M11.10 - Arabidopsis
  misc_feature (48)..(198): Homolog of NCBI NO: 7486308 NR Description: hypothetical protein F28M11.10 - Arabidopsis
  misc_feature (6)..(223): Homolog of NCBI NO: 18413296 NR Description: expressed protein
  misc_feature (1)..(223): Homolog of NCBI NO: 24796809 NR Description: unknown protein [Oryza sativa (japonica
  misc_feature (83)..(83): Xaa is any aa, unknown or other
  misc_feature (93)..(93): Xaa is any aa, unknown or other
  misc_feature (113)..(113): Xaa is any aa, unknown or other
  misc_feature (132)..(132): Xaa is any aa, unknown or other
  misc_feature (145)..(145): Xaa is any aa, unknown or other
  misc_feature (228)..(228): Xaa is any aa, unknown or other
MGSAAQVVVVEDCVEAPGAFVLHLLLKRALAGCGSAAFLALAQPFSHYDRVLRKMGCNLSLHRRNERLHFFELLGFPGGAREXTIADSFALLXNEIQRLVEANRAGENEGQFXIVIDDASLLEVVALGSVSXVLDFLHYCFTLTXEMNCKLVILIHEDIYANEENMGLLLHLRYIADLVIKAAPLSTGLAADVHGQLAVVNKGTFSEQRAKAQKVWNFHFKKKTVLTXSIQGVDIREYLYTVETTLVVITDNQCCYSSCTLC

SEQ ID NO: 1263 - protein, 208 aa, Zea mays subsp. mays
  peptide (1)..(208): Ceres Seq. ID no. 12377908
  misc_feature (1)..(171): Homolog of NCBI NO: 28546325 NR Description: RIKEN cDNA 2610001P13 [Mus musculus]
  misc_feature (1)..(171): Homolog of NCBI NO: 12847283 NR Description: unnamed protein product [Mus musculus]
  misc_feature (1)..(167): Homolog of NCBI NO: 34866372 NR Description: similar to hypothetical protein FLJ20211 [Rattus
  misc_feature (1)..(143): Homolog of NCBI NO: 8923200 NR Description: hypothetical protein FLJ20211 [Homo sapiens]
  misc_feature (1)..(146): Homolog of NCBI NO: 12653677 NR Description: Similar to hypothetical protein FLJ20211 [Homo
  misc_feature (1)..(139): Homolog of NCBI NO: 7486308 NR Description: hypothetical protein F28M11.10 - Arabidopsis
  misc_feature (1)..(144): Homolog of NCBI NO: 7486308 NR Description: hypothetical protein F28M11.10 - Arabidopsis
  misc_feature (1)..(169): Homolog of NCBI NO: 18413296 NR Description: expressed protein
  misc_feature (1)..(169): Homolog of NCBI NO: 24796809 NR Description: unknown protein [Oryza sativa (japonica
  misc_feature (29)..(29): Xaa is any aa, unknown or other
  misc_feature (39)..(39): Xaa is any aa, unknown or other
  misc_feature (59)..(59): Xaa is any aa, unknown or other
  misc_feature (78)..(78): Xaa is any aa, unknown or other
  misc_feature (91)..(91): Xaa is any aa, unknown or other
  misc_feature (174)..(174): Xaa is any aa, unknown or other
MGCNLSLHRRNERLHFFELLGFPGGAREXTIADSFALLXNEIQRLVEANRAGENEGQFXIVIDDASLLEVVALGSVSXVLDFLHYCFTLTXEMNCKLVILIHEDIYANEENMGLLLHLRYIADLVIKAAPLSTGLAADVHGQLAVVNKGTFSEQRAKAQKVWNFHFKKKTVLTXSIQGVDIREYLYTVETTLVVITDNQCCYSSCTLC

SEQ ID NO: 1264 - DNA, 2152 bp, Zea mays subsp. mays
  misc_feature (1)..(2152): Ceres Seq. ID no. 14303276
ctcgtccacccattcctccgctcttccttaattcctcatttcctccacgtacgcgtgcatactctgcgagtccaggagatttttttccccttcttcacgatactctcgacgagagtgtctccatggccggaaaaggagacgggccggcgatcggcatcgacctcggtacgacctactcgtgcgtcggggtgtggcagcatgaccgagtcgagatcatcgccaacgaccagggcaaccgtacaacgccgtcttatgtcgcgttcaccgattcggagaggctcgtcggcgacgccgccaagaaccaggtcgccatgaaccccatcaacaccgtcttcgacgcgaagcggctcatcggccggcgcttctctgacacgtcggtgcagagtgacgccaagctatggcctttcaaagtgatcccgggctccggcgacaagcccatgatcggggtgcagttcaggggcgaggagaaacagttctcggccgaggagatcagctccatgatcctgaacaagatgaaggagacggccgaggcttacctcggcaccaccatcaagaacgctgtcgtcaccgtcccggcctacttcaacgactcccagcgccaggccaccaaggacgccggcgtcatctccggcctcaacgtcatgcgcatcatcaacgagcccaccgccgcggccatcgcatacgggctcgacaagaagtcgagcagcgacggcgagaagaacgtcctcatcttcgacctcggcggcggtacctttgacgtctcgctcctcaccatcgaggagggcatctttgaggtcaaggccaccgccggcgacacccacctgggaggcgaggacttcgacaaccggctcgtgaaccacttcgtccaggagttcaagaggaagaacaagaaggacatcactggcaaccccagggcgctccggcgactgaggaccgcctgcgagagggctaagaggacgctctcctccaccgcccaaaccaccatcgagatcgactcgctctatgagggcatcgacttctacacgaccatcacccgtgcccggttcgaggagctcaacatggacctcttccgcaagtgcatggagcccgtggagaagtgcctccgcgacgccaagatggacaagagcagcgtgcacgacgtcgttctcgtgggcggctccactcgcatcccccgcgtgcagcagctgctccaggacttcttcaacggcaaggagttgtgcaagagcatcaacccagacgaggctgtcgcgtacggagcggccgtccaggccgccatcctcactggcgagggcaatgagaaggttcaggatctgctcctgctcgacgtctcgccgctctcgctcggcctggagacggccggaggcgtcatgactgtgctcatccccaggaacaccaccatcccgacaaagaaggagcaggtcttctccacttactccgacaaccagcccggcgtgctcatccaggtgtacgaaggtgagagggccaggaccaaagacaacaatctgctcggcaagttcgagctctctggcatccctccggcgcccaggggcgtcccccagatcaccgtgtgtttcgacatggacgcgaacggcatcctcaacgtgtcagcggaggacaagaccaccggacagaagaataagatcacgatcaccaacgataagggacggctaagtaaggaggagatcgagaagatggtgcaggaggcagagaagtacaaagccgaggacgaggaacaccagaagaaggtgaacgccaagaacacgctcgagaactatgcctacaatatgcgcaacaccatcagagacgacaagatcgcctccaagctaccggtggacgacaagaaaaagatcgatgacgccgtcgagggggccatcaattggctcgacaacaaccagctcgccgaggttgatgagtttgaggacaagatgaaggagctggagggcatttgcaaccccatcatcgcgaagatgtatcagggcgccgctggtcctgacatggccggtggcatggatcgggatgcttcgccggctggtggcagcggtgctggacccaagatcgaagaagtcgactaaatgaggaaattcttatatatgtagttttgcttaaataattgcgtcaattacaaagtggatcttattattatttttatgcg

SEQ ID NO: 1265 - protein, 689 aa, Zea mays subsp. mays
  peptide (1)..(689): Ceres Seq. ID no. 14303277
  misc_feature (49)..(658): Pfam Name: Hsp70 protein Pfam Description: Hsp70 protein
  misc_feature (44)..(689): Homolog of NCBI NO: 2827002 NR Description: HSP70 [Triticum aestivum]
RPPIPPLFLNSSFPPRTRAYSASPGDFFPLLHDTLDESVSMAGKGDGPAIGIDLGTTYSCVGVWQHDRVEIIANDQGNRTTPSYVAFTDSERLVGDAAKNQVAMNPINTVFDAKRLIGRRFSDTSVQSDAKLWPFKVIPGSGDKPMIGVQFRGEEKQFSAEEISSMILNKMKETAEAYLGTTIKNAVVTVPAYFNDSQRQATKDAGVISGLNVMRIINEPTAAAIAYGLDKKSSSDGEKNVLIFDLGGGTFDVSLLTIEEGIFEVKATAGDTHLGGEDFDNRLVNHFVQEFKRKNKKDITGNPRALRRLRTACERAKRTLSSTAQTTIEIDSLYEGIDFYTTITRARFEELNMDLFRKCMEPVEKCLRDAKMDKSSVHDVVLVGGSTRIPRVQQLLQDFFNGKELCKSINPDEAVAYGAAVQAAILTGEGNEKVQDLLLLDVSPLSLGLETAGGVMTVLIPRNTTIPTKKEQVFSTYSDNQPGVLIQVYEGERARTKDNNLLGKFELSGIPPAPRGVPQITVCFDMDANGILNVSAEDKTTGQKNKITITNDKGRLSKEEIEKMVQEAEKYKAEDEEHQKKVNAKNTLENYAYNMRNTIRDDKIASKLPVDDKKKIDDAVEGAINWLDNNQLAEVDEFEDKMKELEGICNPIIAKMYQGAAGPDMAGGMDRDASPAGGSGAGPKIEEVD

SEQ ID NO: 1266 - protein, 649 aa, Zea mays subsp. mays
  peptide (1)..(649): Ceres Seq. ID no. 14303278
  misc_feature (9)..(618): Pfam Name: Hsp70 protein Pfam Description: Hsp70 protein
  misc_feature (4)..(649): Homolog of NCBI NO: 2827002 NR Description: HSP70 [Triticum aestivum]
MAGKGDGPAIGIDLGTTYSCVGVWQHDRVEIIANDQGNRTTPSYVAFTDSERLVGDAAKNQVAMNPINTVFDAKRLIGRRFSDTSVQSDAKLWPFKVIPGSGDKPMIGVQFRGEEKQFSAEEISSMILNKMKETAEAYLGTTIKNAVVTVPAYFNDSQRQATKDAGVISGLNVMRIINEPTAAAIAYGLDKKSSSDGEKNVLIFDLGGGTFDVSLLTIEEGIFEVKATAGDTHLGGEDFDNRLVNHFVQEFKRKNKKDITGNPRALRRLRTACERAKRTLSSTAQTTIEIDSLYEGIDFYTTITRARFEELNMDLFRKCMEPVEKCLRDAKMDKSSVHDVVLVGGSTRIPRVQQLLQDFFNGKELCKSINPDEAVAYGAAVQAAILTGEGNEKVQDLLLLDVSPLSLGLETAGGVMTVLIPRNTTIPTKKEQVFSTYSDNQPGVLIQVYEGERARTKDNNLLGKFELSGIPPAPRGVPQITVCFDMDANGILNVSAEDKTTGQKNKITITNDKGRLSKEEIEKMVQEAEKYKAEDEEHQKKVNAKNTLENYAYNMRNTIRDDKIASKLPVDDKKKIDDAVEGAINWLDNNQLAEVDEFEDKMKELEGICNPIIAKMYQGAAGPDMAGGMDRDASPAGGSGAGPKIEEVD

SEQ ID NO: 1267 - protein, 586 aa, Zea mays subsp. mays
  peptide (1)..(586): Ceres Seq. ID no. 14303279
  misc_feature (1)..(555): Pfam Name: Hsp70 protein Pfam Description: Hsp70 protein
  misc_feature (1)..(586): Homolog of NCBI NO: 2827002 NR Description: HSP70 [Triticum aestivum]
MNPINTVFDAKRLIGRRFSDTSVQSDAKLWPFKVIPGSGDKPMIGVQFRGEEKQFSAEEISSMILNKMKETAEAYLGTTIKNAVVTVPAYFNDSQRQATKDAGVISGLNVMRIINEPTAAAIAYGLDKKSSSDGEKNVLIFDLGGGTFDVSLLTIEEGIFEVKATAGDTHLGGEDFDNRLVNHFVQEFKRKNKKDITGNPRALRRLRTACERAKRTLSSTAQTTIEIDSLYEGIDFYTTITRARFEELNMDLFRKCMEPVEKCLRDAKMDKSSVHDVVLVGGSTRIPRVQQLLQDFFNGKELCKSINPDEAVAYGAAVQAAILTGEGNEKVQDLLLLDVSPLSLGLETAGGVMTVLIPRNTTIPTKKEQVFSTYSDNQPGVLIQVYEGERARTKDNNLLGKFELSGIPPAPRGVPQITVCFDMDANGILNVSAEDKTTGQKNKITITNDKGRLSKEEIEKMVQEAEKYKAEDEEHQKKVNAKNTLENYAYNMRNTIRDDKIASKLPVDDKKKIDDAVEGAINWLDNNQLAEVDEFEDKMKELEGICNPIIAKMYQGAAGPDMAGGMDRDASPAGGSGAGPKIEEVD

SEQ ID NO: 1268 - DNA, 938 bp, Zea mays subsp. mays
  misc_feature (1)..(938): Ceres Seq. ID no. 14306355
actgctcgagctcagctcaagtaaccacagaaaatggcgtcacttctccgccctctcgtcctcgtgctcctgatcgcctcctgcacagcgcagcagtcaccgccggcgcagcccccgccaacgccgaacgcgccaccggccaactcgccgccccaggcgcctccagccggcaacccgccgccggcaggcaacccgccacccgcgcccaccgccactccacctccggccccgaccactccgcccccggccccgaccactcctcccccggctcccacaacgccgcccccggcgccgacaactccacctccggcccccaccacgccgcctccgtccccaccagcgtcgccaccgcccgctcccaccactccgccaccgtctcccccggcaagcccgccgcccgctcccgccaccccgccaccgtctccgcccatggcgccacctcccgccacgccccctccacccgccaccccgccgccaccggccgcgcccacgccggccccgagcgtgggtacggtggtggccgtggaggcggcggctacggcggtggcgggcgccgtgatggcggcggcggctacggcggtggcggcggcggctacggtggcggcggcggctacggtggtggtggcggcggctacggcggtggcaaccgtggcggcggctacggcaactccgacgggaactggaggaactgagcggtggggcccgcgcggccaagttatcctgttcgctaccgtgttgtttaccctagtccagagggtttatcttcgttcgtctcatgtttgttgttgcccatctgtgtttttgattgcaaggtcgctttgtgtcagttttagtgctgtgttcatcctcggctccagcagacccatgcatcaaccagcatggactgcggatcgatggatgctgttacccccgtcaggctttatcctaagttaatcttc

SEQ ID NO: 1269 - protein, 299 aa, Zea mays subsp. mays
  peptide (1)..(299): Ceres Seq. ID no. 14306356
  misc_feature (21)..(156): Pfam Name: Formin Homology 2 Domain Pfam Description: Formin Homology 2 Domain
  misc_feature (23)..(156): Homolog of NCBI NO: 21322711 NR Description: pherophorin-dz1 protein [Volvox carteri f.
  misc_feature (23)..(156): Homolog of NCBI NO: 21322711 NR Description: pherophorin-dz1 protein [Volvox carteri f.
  misc_feature (23)..(156): Homolog of NCBI NO: 21322711 NR Description: pherophorin-dz1 protein [Volvox carteri f.
  misc_feature (23)..(156): Homolog of NCBI NO: 21322711 NR Description: pherophorin-dz1 protein [Volvox carteri f.
  misc_feature (23)..(156): Homolog of NCBI NO: 21322711 NR Description: pherophorin-dz1 protein [Volvox carteri f.
  misc_feature (23)..(156): Homolog of NCBI NO: 21322711 NR Description: pherophorin-dz1 protein [Volvox carteri f.
  misc_feature (23)..(156): Homolog of NCBI NO: 21322711 NR Description: pherophorin-dz1 protein [Volvox carteri f.
  misc_feature (23)..(156): Homolog of NCBI NO: 21322711 NR Description: pherophorin-dz1 protein [Volvox carteri f.
  misc_feature (22)..(157): Homolog of NCBI NO: 6523547 NR Description: hydroxyproline-rich glycoprotein DZ-HRGP
  misc_feature (23)..(157): Homolog of NCBI NO: 6523547 NR Description: hydroxyproline-rich glycoprotein DZ-HRGP
MASLLRPLVLVLLIASCTAQQSPPAQPPPTPNAPPANSPPQAPPAGNPPPAGNPPPAPTATPPPAPTTPPPAPTTPPPAPTTPPPAPTTPPPAPTTPPPSPPASPPPAPTTPPPSPPASPPPAPATPPPSPPMAPPPATPPPPATPPPPAAPTPAPSVGTVVAVEAAATAVAGAVMAAAATAVAAAATVAAAATVVVAAATAVATVAAATATPTGTGGTERWGPRGQVILFATVLFTLVQRVYLRSSHVCCCPSVFLIARSLCVSFSAVFILGSSRPMHQPAWTADRWMLLPPSGFILS

SEQ ID NO: 1270 - protein, 229 aa, Zea mays subsp. mays
  peptide (1)..(229): Ceres Seq. ID no. 14306357
  misc_feature (61)..(225): Pfam Name: Herpesvirus large structural phosphoprotein UL32 Pfam Description: Herpesvirus large structural phosphoprotein UL32
  misc_feature (2)..(219): Homolog of NCBI NO: 15805485 NR Description: hypothetical protein [Deinococcus radiodurans]
  misc_feature (4)..(226): Homolog of NCBI NO: 15805485 NR Description: hypothetical protein [Deinococcus radiodurans]
  misc_feature (29)..(226): Homolog of NCBI NO: 15805485 NR Description: hypothetical protein [Deinococcus radiodurans]
  misc_feature (166)..(229): Homolog of NCBI NO: 34809540 NR Description: Epa3p [Candida glabrata]
  misc_feature (160)..(229): Homolog of NCBI NO: 82696 NR Description: glycine-rich protein - maize
CSSSAQVTTENGVTSPPSRPRAPDRLLHSAAVTAGAAPANAERATGQLAAPGASSRQPAAGRQPATRAHRHSTSGPDHSAPGPDHSSPGSHNAAPGADNSTSGPHHAASVPTSVATARSHHSATVSPGKPAARSRHPATVSAHGATSRHAPSTRHPAATGRAHAGPERGYGGGRGGGGYGGGGRRDGGGGYGGGGGGYGGGGGYGGGGGGYGGGNRGGGYGNSDGNWRN

SEQ ID NO: 1271 - protein, 167 aa, Zea mays subsp. mays
  peptide (1)..(167): Ceres Seq. ID no. 14306358
  misc_feature (1)..(87): Pfam Name: Equine herpesvirus glycoprotein gp2 Pfam Description: Equine herpesvirus glycoprotein gp2
  misc_feature (1)..(24): Homolog of NCBI NO: 21322711 NR Description: pherophorin-dz1 protein [Volvox carteri f.
  misc_feature (1)..(24): Homolog of NCBI NO: 21322711 NR Description: pherophorin-dz1 protein [Volvox carteri f.
  misc_feature (1)..(24): Homolog of NCBI NO: 21322711 NR Description: pherophorin-dz1 protein [Volvox carteri f.
  misc_feature (1)..(24): Homolog of NCBI NO: 21322711 NR Description: pherophorin-dz1 protein [Volvox carteri f.
  misc_feature (1)..(24): Homolog of NCBI NO: 21322711 NR Description: pherophorin-dz1 protein [Volvox carteri f.
  misc_feature (1)..(24): Homolog of NCBI NO: 21322711 NR Description: pherophorin-dz1 protein [Volvox carteri f.
  misc_feature (1)..(24): Homolog of NCBI NO: 21322711 NR Description: pherophorin-dz1 protein [Volvox carteri f.
  misc_feature (1)..(24): Homolog of NCBI NO: 21322711 NR Description: pherophorin-dz1 protein [Volvox carteri f.
  misc_feature (1)..(25): Homolog of NCBI NO: 6523547 NR Description: hydroxyproline-rich glycoprotein DZ-HRGP
  misc_feature (1)..(25): Homolog of NCBI NO: 6523547 NR Description: hydroxyproline-rich glycoprotein DZ-HRGP
MAPPPATPPPPATPPPPAAPTPAPSVGTVVAVEAAATAVAGAVMAAAATAVAAAATVAAAATVVVAAATAVATVAAATATPTGTGGTERWGPRGQVILFATVLFTLVQRVYLRSSHVCCCPSVFLIARSLCVSFSAVFILGSSRPMHQPAWTADRWMLLPPSGFILS

SEQ ID NO: 1272 - DNA, 1268 bp, Zea mays subsp. mays
  misc_feature (1)..(1268): Ceres Seq. ID no. 15180309
acctctctcctcccttccctcgcctcgctcctctctatcctcatcgagcagcagcggccgagaagcacgcattcagcagatccggggacacctcagctagggacgcagtggtacaagaaggcgccgtcgagtgccttgtctgggcgctcgacccctcctcctcctcgtcgtcgtcgaaggtgcgggaggtggccctccgcgccatcgacgtgttgtgcctgtcgccgcccaactctaccgggcgtctcctcgccgccgggttcctcgaccgcgtcctctccctcctccgcaatggcgacaacacgctgctgcggcactgcgcgctgaaggccgcgcaccgcctgtgctaggtgtcggaggaggtgaagaaggcgatgagcgacgccgggttcatgccggagctggtgggcgtcctcggcgcgtccagtaagtccctcgaggcacgggagatggcgggcgagtcgctgtgcgccctggttaccgtgccccgcaaccggaagcggttcgtccaggaggaccgcgacgtggcgcgggtgctgcagctgctgggccccgacgaggagaaggagaagcccgcgccggcgaggcggttcctgctttcgacggtggcgcacctcacggacagcagctccggccggaggaagatcatgtcctcggagcacatcaggaatctcgagaagcttgcggaggcctatgtcccagacgccaaacggatcgtgaagaggcttggcgggagcaggctgaggagcattttccatggcatttggagcctgtaatgttgtgttgtaacccttggaggcaagacaagcagtcaagcacgcagtagtagtgtctctggctaacacatacagtactattgttccttgcatcgtttgttactgtgaaggaatcaaagaatgagtcacccagtgatttgcggaacatggcggccgggatgatgatgagcccgccgaggctcagccccaacaacggctgggattagatggttggatgatcggatgacaggcaattgaaaaagagaattgatcttttttatgggcgaagtgttgaagatggctttggtgaaggaaatgtcttgttagcatcaagtaagtggcgatatcacaacccctacaagcttgtgccttaaaacaagaggatacaagaagttggagtgcttttgtgaaggcttttgcgaatcacttgaagcgttagtacttttgtgaatgattttgtaaagtgtttgcaaatatgtgcaaaacataataacatgtgtaggttttgtgaat

SEQ ID NO: 1273 - protein, 133 aa, Zea mays subsp. mays
  peptide (1)..(133): Ceres Seq. ID no. 15180310
  misc_feature (1)..(128): Homolog of NCBI NO: 25518344 NR Description: hypothetical protein T1N6.25 [imported] -
  misc_feature (1)..(128): Homolog of NCBI NO: 18378889 NR Description: armadillo repeat containing protein [Arabidopsis
  misc_feature (1)..(127): Homolog of NCBI NO: 15225552 NR Description: expressed protein [Arabidopsis thaliana]
  misc_feature (1)..(127): Homolog of NCBI NO: 15224987 NR Description: expressed protein [Arabidopsis thaliana]
  misc_feature (1)..(127): Homolog of NCBI NO: 15241309 NR Description: expressed protein [Arabidopsis thaliana]
  misc_feature (1)..(127): Homolog of NCBI NO: 14532770 NR Description: unknown protein [Arabidopsis thaliana]
  misc_feature (1)..(131): Homolog of NCBI NO: 16209658 NR Description: At1g61350/T1F9_16 [Arabidopsis thaliana]
  misc_feature (1)..(131): Homolog of NCBI NO: 18407140 NR Description: expressed protein [Arabidopsis thaliana]
  misc_feature (1)..(133): Homolog of NCBI NO: 34394021 NR Description: arm repeat containing protein-like
MSDAGFMPELVGVLGASSKSLEAREMAGESLCALVTVPRNRKRFVQEDRDVARVLQLLGPDEEKEKPAPARRFLLSTVAHLTDSSSGRRKIMSSEHIRNLEKLAEAYVPDAKRIVKRLGGSRLRSIFHGIWSL

SEQ ID NO: 1274 - protein, 127 aa, Zea mays subsp. mays
  peptide (1)..(127): Ceres Seq. ID no. 15180311
  misc_feature (1)..(122): Homolog of NCBI NO: 18378889 NR Description: armadillo repeat containing protein [Arabidopsis
  misc_feature (1)..(121): Homolog of NCBI NO: 15225552 NR Description: expressed protein [Arabidopsis thaliana]
  misc_feature (1)..(121): Homolog of NCBI NO: 15224987 NR Description: expressed protein [Arabidopsis thaliana]
  misc_feature (1)..(121): Homolog of NCBI NO: 15241309 NR Description: expressed protein [Arabidopsis thaliana]
  misc_feature (1)..(121): Homolog of NCBI NO: 14532770 NR Description: unknown protein [Arabidopsis thaliana]
  misc_feature (1)..(125): Homolog of NCBI NO: 16209658 NR Description: At1g61350/T1F9_16 [Arabidopsis thaliana]
  misc_feature (1)..(125): Homolog of NCBI NO: 18407140 NR Description: expressed protein [Arabidopsis thaliana]
  misc_feature (1)..(127): Homolog of NCBI NO: 34394021 NR Description: arm repeat containing protein-like
  misc_feature (1)..(122): Homolog of NCBI NO: 25518344 NR Description: hypothetical protein T1N6.25 [imported] -
MPELVGVLGASSKSLEAREMAGESLCALVTVPRNRKRFVQEDRDVARVLQLLGPDEEKEKPAPARRFLLSTVAHLTDSSSGRRKIMSSEHIRNLEKLAEAYVPDAKRIVKRLGGSRLRSIFHGIWSL

SEQ ID NO: 1275 - protein, 115 aa, Zea mays subsp. mays
  peptide (1)..(115): Ceres Seq. ID no. 15180312
  misc_feature (29)..(72): Pfam Name: Armadillo/beta-catenin-like repeat Pfam Description: Armadillo/beta-catenin-like repeat
  misc_feature (33)..(115): Homolog of NCBI NO: 25518344 NR Description: hypothetical protein T1N6.25 [imported] -
  misc_feature (33)..(115): Homolog of NCBI NO: 18378889 NR Description: armadillo repeat containing protein [Arabidopsis
  misc_feature (25)..(115): Homolog of NCBI NO: 15224987 NR Description: expressed protein [Arabidopsis thaliana]
  misc_feature (27)..(115): Homolog of NCBI NO: 15241309 NR Description: expressed protein [Arabidopsis thaliana]
  misc_feature (27)..(115): Homolog of NCBI NO: 14532770 NR Description: unknown protein [Arabidopsis thaliana]
  misc_feature (29)..(115): Homolog of NCBI NO: 16209658 NR Description: At1g61350/T1F9_16 [Arabidopsis thaliana]
  misc_feature (29)..(115): Homolog of NCBI NO: 18407140 NR Description: expressed protein [Arabidopsis thaliana]
  misc_feature (18)..(115): Homolog of NCBI NO: 34394021 NR Description: arm repeat containing protein-like
LSPPFPRLAPLYPHRAAAAEKHAFSRSGDTSARDAVVQEGAVECLVWALDPSSSSSSSKVREVALRAIDVLCLSPPNSTGRLLAAGFLDRVLSLLRNGDNTLLRHCALKAAHRLC

SEQ ID NO: 1276 - DNA, 950 bp, Zea mays subsp. mays
  misc_feature (1)..(950): Ceres Seq. ID no. 14305363
agacctagaccctccaaaaacaactcaacaacaatgctcctcctcctcctcctgctcgtcgcctcctcctccctgtcccaggagggtgtcctcgccgacgtgccgccgtccaacaagctggtcttcatcctggcggggcagtccaacatggccggccgcggcggggtggtggcgaaccgctgggacggcgtggtgccgggcgactgcgcgccgtcccccgcggtgctgcgtctctcgcccgacctgcgctgggaggaggcgcgggagccgctgcacgccggcatcgacgccgccaaccacgccgtcggggtgggccccgggatggcgtttgccaacgcgctgctgcgctcgggccgcgcggggggcgccgtggtagggctcgtcccctgcgccgtgggaggcacgcggatggcagagtggggcaggggcaccgagctctacgccgagatgctgcgccgggccagggtcgccgtcgagacgggggggcgcatcggtgcgctgttgtggtaccagggggagagtgacaccgtccgctggtccgacgccaccgagtacggccgccggatggggatgctcgtccgtgatctccgcgccgatcttggcatcccgcacctcctcgtcatccaggtcgggttagcatcgggcctaggacagtatactcaagtcgtgagagacgctcagaaagggatcaaacttcgcaacgtcagattcgttgatgcgatggggttgccattgcaagacggccatctgcatctaagcacccaagctcaggtccagcttgggcgtatgttggctcagtcctatctaaattatggtacatcccaactctagctagtacttgtgagatagaaattcctgccctgtttggacgattcattgagaacccattcttataattattgttgtatggaatcaacttgttacagctcgatgcaatatcttcatcatct

SEQ ID NO: 1277 - protein, 276 aa, Zea mays subsp. mays
  peptide (1)..(276): Ceres Seq. ID no. 14305364
  misc_feature (32)..(268): Homolog of NCBI NO: 32473459 NR Description: probable acetyl xylan esterase AxeA [Pirellula
  misc_feature (50)..(210): Homolog of NCBI NO: 11357879 NR Description: hypothetical protein F8J2.180 - Arabidopsis
  misc_feature (38)..(210): Homolog of NCBI NO: 30693749 NR Description: expressed protein [Arabidopsis thaliana]
  misc_feature (30)..(213): Homolog of NCBI NO: 7488258 NR Description: protein kinase homolog F28A23.20 - Arabidopsis
  misc_feature (41)..(270): Homolog of NCBI NO: 38347110 NR Description: OSJNBa0009K15.7 [Oryza sativa (japonica
  misc_feature (9)..(275): Homolog of NCBI NO: 38345580 NR Description: OSJNBa0027H06.16 [Oryza sativa (japonica
  misc_feature (30)..(270): Homolog of NCBI NO: 18418402 NR Description: expressed protein [Arabidopsis thaliana]
  misc_feature (30)..(270): Homolog of NCBI NO: 21594009 NR Description: unknown [Arabidopsis thaliana]
  misc_feature (13)..(270): Homolog of NCBI NO: 30102977 NR Description: hypothetical protein [Oryza sativa (japonica
  misc_feature (12)..(276): Homolog of NCBI NO: 30102980 NR Description: unknown protein [Oryza sativa (japonica
RPRPSKNNSTTMLLLLLLLVASSSLSQEGVLADVPPSNKLVFILAGQSNMAGRGGVVANRWDGVVPGDCAPSPAVLRLSPDLRWEEAREPLHAGIDAANHAVGVGPGMAFANALLRSGRAGGAVVGLVPCAVGGTRMAEWGRGTELYAEMLRRARVAVETGGRIGALLWYQGESDTVRWSDATEYGRRMGMLVRDLRADLGIPHLLVIQVGLASGLGQYTQVVRDAQKGIKLRNVRFVDAMGLPLQDGHLHLSTQAQVQLGRMLAQSYLNYGTSQL

SEQ ID NO: 1278 - protein, 265 aa, Zea mays subsp. mays
  peptide (1)..(265): Ceres Seq. ID no. 14305365
  misc_feature (21)..(257): Homolog of NCBI NO: 32473459 NR Description: probable acetyl xylan esterase AxeA [Pirellula
  misc_feature (39)..(199): Homolog of NCBI NO: 11357879 NR Description: hypothetical protein F8J2.180 - Arabidopsis
  misc_feature (27)..(199): Homolog of NCBI NO: 30693749 NR Description: expressed protein [Arabidopsis thaliana]
  misc_feature (19)..(202): Homolog of NCBI NO: 7488258 NR Description: protein kinase homolog F28A23.20 - Arabidopsis
  misc_feature (30)..(259): Homolog of NCBI NO: 38347110 NR Description: OSJNBa0009K15.7 [Oryza sativa (japonica
  misc_feature (1)..(264): Homolog of NCBI NO: 38345580 NR Description: OSJNBa0027H06.16 [Oryza sativa (japonica
  misc_feature (19)..(259): Homolog of NCBI NO: 18418402 NR Description: expressed protein [Arabidopsis thaliana]
  misc_feature (19)..(259): Homolog of NCBI NO: 21594009 NR Description: unknown [Arabidopsis thaliana]
  misc_feature (2)..(259): Homolog of NCBI NO: 30102977 NR Description: hypothetical protein [Oryza sativa (japonica
  misc_feature (1)..(265): Homolog of NCBI NO: 30102980 NR Description: unknown protein [Oryza sativa (japonica
MLLLLLLLVASSSLSQEGVLADVPPSNKLVFILAGQSNMAGRGGVVANRWDGVVPGDCAPSPAVLRLSPDLRWEEAREPLHAGIDAANHAVGVGPGMAFANALLRSGRAGGAVVGLVPCAVGGTRMAEWGRGTELYAEMLRRARVAVETGGRIGALLWYQGESDTVRWSDATEYGRRMGMLVRDLRADLGIPHLLVIQVGLASGLGQYTQVVRDAQKGIKLRNVRFVDAMGLPLQDGHLHLSTQAQVQLGRMLAQSYLNYGTSQL

SEQ ID NO: 1279 - protein, 227 aa, Zea mays subsp. mays
  peptide (1)..(227): Ceres Seq. ID no. 14305366
  misc_feature (1)..(219): Homolog of NCBI NO: 32473459 NR Description: probable acetyl xylan esterase AxeA [Pirellula
  misc_feature (1)..(161): Homolog of NCBI NO: 11357879 NR Description: hypothetical protein F8J2.180 - Arabidopsis
  misc_feature (1)..(161): Homolog of NCBI NO: 30693749 NR Description: expressed protein [Arabidopsis thaliana]
  misc_feature (1)..(164): Homolog of NCBI NO: 7488258 NR Description: protein kinase homolog F28A23.20 - Arabidopsis
  misc_feature (1)..(221): Homolog of NCBI NO: 38347110 NR Description: OSJNBa0009K15.7 [Oryza sativa (japonica
  misc_feature (1)..(226): Homolog of NCBI NO: 38345580 NR Description: OSJNBa0027H06.16 [Oryza sativa (japonica
  misc_feature (1)..(221): Homolog of NCBI NO: 18418402 NR Description: expressed protein [Arabidopsis thaliana]
  misc_feature (1)..(221): Homolog of NCBI NO: 21594009 NR Description: unknown [Arabidopsis thaliana]
  misc_feature (1)..(221): Homolog of NCBI NO: 30102977 NR Description: hypothetical protein [Oryza sativa (japonica
  misc_feature (1)..(227): Homolog of NCBI NO: 30102980 NR Description: unknown protein [Oryza sativa (japonica
MAGRGGVVANRWDGVVPGDCAPSPAVLRLSPDLRWEEAREPLHAGIDAANHAVGVGPGMAFANALLRSGRAGGAVVGLVPCAVGGTRMAEWGRGTELYAEMLRRARVAVETGGRIGALLWYQGESDTVRWSDATEYGRRMGMLVRDLRADLGIPHLLVIQVGLASGLGQYTQVVRDAQKGIKLRNVRFVDAMGLPLQDGHLHLSTQAQVQLGRMLAQSYLNYGTSQL

SEQ ID NO: 1280 - DNA, 839 bp, Zea mays subsp. mays
  misc_feature (1)..(839): Ceres Seq. ID no. 12588828
tcatcattcatcacatcgatggcatagccagcgaacggcagacggaatcgcgcctcccatcctctgctttccccaaaaggccagctccaccgcggcggcgccgctcctataaaccgtcagctccctctaggcgcgctttccccgcggcagcctgagcagccagccatgcctgggcggcgggcgatcgaggtccggcagctgctgccggccggcggtgacgccgcgacgccgaggtggcgcatgtcgctgcttgagaacacgttcaacgggttcgtgcagggcgccggcgccgaagccgtgttcgcggaggggtccctgttcagcccgttcctgttcggcaagttctttgacccagccgacccgttcccgctgtgggagttcgagccggacgcgctgctcgccgcgctgcgccgcggcaacgccaggaccgccgtcgactgggctgagaccgactccgattactacctcacagccgacgtgccaggtggaagtggaaggagatgcgacgtggaggtgagcggggacgcgatgaaggtggtcgacatcagcggcctgtggcgggcgccgccggcggacggccgggactggcgcgcgggccggtggtgggagcacggcttcgtccggcgggtggagctgccggaggacgcggagtggaggaaagtggaggcatgcttcgacgacagcgaggggtccctggagatcagggttcccaagaccgccgatgcccgccaggccacggcctgacgccgccgagaatcggaaccttgcaatgcgtgcgtgtcgctgaaaaacgatgtatgtgatatgttcttcagtgccagctgttgaattggctagct

SEQ ID NO: 1281 - protein, 192 aa, Zea mays subsp. mays
  peptide (1)..(192): Ceres Seq. ID no. 12588829
  misc_feature (62)..(183): Homolog of NCBI NO: 4185756 NR Description: cytosolic I small heat shock protein HSP17.2IC
  misc_feature (50)..(183): Homolog of NCBI NO: 4185748 NR Description: cytosolic I small heat shock protein HSP17.2IA
  misc_feature (50)..(183): Homolog of NCBI NO: 4185754 NR Description: cytosolic I small heat shock protein HSP17.2IB
  misc_feature (50)..(183): Homolog of NCBI NO: 123555 NR Description: 18.1 KD CLASS I HEAT SHOCK PROTEIN (HSP 18.1)
  misc_feature (18)..(183): Homolog of NCBI NO: 18423654 NR Description: expressed protein
MPGRRAIEVRQLLPAGGDAATPRWRMSLLENTFNGFVQGAGAEAVFAEGSLFSPFLFGKFFDPADPFPLWEFEPDALLAALRRGNARTAVDWAETDSDYYLTADVPGGSGRRCDVEVSGDAMKVVDISGLWRAPPADGRDWRAGRWWEHGFVRRVELPEDAEWRKVEACFDDSEGSLEIRVPKTADARQATA

SEQ ID NO: 1282 - protein, 167 aa, Zea mays subsp. mays
  peptide (1)..(167): Ceres Seq. ID no. 12588830
  misc_feature (37)..(158): Homolog of NCBI NO: 4185756 NR Description: cytosolic I small heat shock protein HSP17.2IC
  misc_feature (25)..(158): Homolog of NCBI NO: 4185748 NR Description: cytosolic I small heat shock protein HSP17.2IA
  misc_feature (25)..(158): Homolog of NCBI NO: 4185754 NR Description: cytosolic I small heat shock protein HSP17.2IB
  misc_feature (25)..(158): Homolog of NCBI NO: 123555 NR Description: 18.1 KD CLASS I HEAT SHOCK PROTEIN (HSP 18.1)
  misc_feature (1)..(158): Homolog of NCBI NO: 18423654 NR Description: expressed protein
MSLLENTFNGFVQGAGAEAVFAEGSLFSPFLFGKFFDPADPFPLWEFEPDALLAALRRGNARTAVDWAETDSDYYLTADVPGGSGRRCDVEVSGDAMKVVDISGLWRAPPADGRDWRAGRWWEHGFVRRVELPEDAEWRKVEACFDDSEGSLEIRVPKTADARQATA

SEQ ID NO: 1283 - protein, 100 aa, Zea mays subsp. mays
  peptide (1)..(100): Ceres Seq. ID no. 12588831
MRRGGERGRDEGGRHQRPVAGAAGGRPGLARGPVVGARLRPAGGAAGGRGVEESGGMLRRQRGVPGDQGSQDRRCPPGHGLTPPRIGTLQCVRVAEKRCM

SEQ ID NO: 1284 - DNA, 802 bp, Zea mays subsp. mays
  misc_feature (1)..(802): Ceres Seq. ID no. 15169763
  misc_feature: MA Experiment ID: 108543 Result: Down-regulated in Transcription
acagagcaaacaaagccaacgtgatcagagagggatatatagctagctagctagcatagcatggcgcttgtagccgacgacgacgccgagctcaaggccaaggccaaggccaaggccgaggtctactacggcgacgaggcctgtcagctgtgcgcgcagctcctgctgagggaagcaggcctccccaacggcctgctgccgctggaggacctgacggagtgcggctacgtccaggagaccgggtacgtgtggctgaagcagggcaggagggtcgaccacgtcttccggagcctcggacgcctcgtctcctacggcgccgagatcaccgggtacgccgagaagggccggatcaggaaggtgaaggggataaagaccagggagctcatgctgtgggtgcccgtcgaggagatcgccgctctcggcgacccggcggccggcgggaagcttgtctgcaagagcgttgctgggatcaccaggaccttccctgcgtcggccttccatgtccctgagaaggcggcggcggcggaggaggtgaaggtggactgtgccagggcgccgcccgccacaccggtgctcgtcctcatggacagatcaggagctccaccagttgttaagaacaactgatgcttgcgtgcttacgaacgaaagcgaaccatgcatgaccccccaaccaagttcatttcatcctttcatgcatgtactatgtatgtagctctacatatatatatatattgctactactatcaagcatgtatgtcgccgttgtggagacacatctattgatctatacatgagcttgtgg

SEQ ID NO: 1285 - protein, 187 aa, Zea mays subsp. mays
  peptide (1)..(187): Ceres Seq. ID no. 15169764
  misc_feature (14)..(157): Pfam Name: Protein of unknown function, DUF538 Pfam Description: Protein of unknown function, DUF538
  misc_feature (10)..(150): Homolog of NCBI NO: 18422648 NR Description: expressed protein [Arabidopsis thaliana]
  misc_feature (16)..(150): Homolog of NCBI NO: 34915430 NR Description: hypothetical protein~similar to Arabidopsis
  misc_feature (16)..(146): Homolog of NCBI NO: 34915418 NR Description: hypothetical protein~similar to Arabidopsis
  misc_feature (16)..(150): Homolog of NCBI NO: 34915410 NR Description: hypothetical protein~similar to Arabidopsis
  misc_feature (25)..(146): Homolog of NCBI NO: 34911878 NR Description: OSJNBb0032K15.16 [Oryza sativa (japonica
  misc_feature (16)..(146): Homolog of NCBI NO: 34915416 NR Description: hypothetical protein~similar to Arabidopsis
  misc_feature (16)..(146): Homolog of NCBI NO: 34915378 NR Description: hypothetical protein~similar to Oryza sativa
  misc_feature (14)..(164): Homolog of NCBI NO: 18391006 NR Description: expressed protein [Arabidopsis thaliana]
  misc_feature (14)..(157): Homolog of NCBI NO: 18405887 NR Description: expressed protein [Arabidopsis thaliana]
MALVADDDAELKAKAKAKAEVYYGDEACQLCAQLLLREAGLPNGLLPLEDLTECGYVQETGYVWLKQGRRVDHVFRSLGRLVSYGAEITGYAEKGRIRKVKGIKTRELMLWVPVEEIAALGDPAAGGKLVCKSVAGITRTFPASAFHVPEKAAAAEEVKVDCARAPPATPVLVLMDRSGAPPVVKNN

SEQ ID NO: 1286 - DNA, 2512 bp, Zea mays subsp. mays
  misc_feature (1)..(2512): Ceres Seq. ID no. 13623192
  misc_feature: MA Experiment ID: 108527 Result: Up-regulated in Transcription
  misc_feature: MA Experiment 108527 PARAMETER Experiment Name: Zm_5mM_NO_P Parameter: Age (day) Value: 8
  misc_feature: MA Experiment 108527 PARAMETER Experiment Name: Zm_5mM_NO_P Parameter: Organism Value: Zea mays
  misc_feature: MA Experiment 108527 PARAMETER Experiment Name: Zm_5mM_NO_P Parameter: Plant Line Value: 35A19
  misc_feature: MA Experiment 108527 PARAMETER Experiment Name: Zm_5mM_NO_P Parameter: Timepoint (hr) Value: 6
  misc_feature: MA Experiment 108527 PARAMETER Experiment Name: Zm_5mM_NO_P Parameter: Tissue Value: Aerial
  misc_feature: MA Experiment 108527 PARAMETER Experiment Name: Zm_5mM_NO_P Parameter: Treatment Value: 5mM NO vs. No Treatment
  misc_feature: MA Experiment ID: 108535 Result: Up-regulated in Transcription
  misc_feature: MA Experiment 108535 PARAMETER Experiment Name: Zm_Meristem_P Parameter: Age (day) Value: 8
  misc_feature: MA Experiment 108535 PARAMETER Experiment Name: Zm_Meristem_P Parameter: Organism Value: Zea mays
  misc_feature: MA Experiment 108535 PARAMETER Experiment Name: Zm_Meristem_P Parameter: Plant Line Value: 35A19
  misc_feature: MA Experiment 108535 PARAMETER Experiment Name: Zm_Meristem_P Parameter: Tissue Value: Root Meristem vs. Above Root Meristem
  misc_feature: MA Experiment ID: 108559 Result: Up-regulated in Transcription
  misc_feature: MA Experiment 108559 PARAMETER Experiment Name: Zm_5mM_NO_P Parameter: Age (day) Value: 8
  misc_feature: MA Experiment 108559 PARAMETER Experiment Name: Zm_5mM_NO_P Parameter: Organism Value: Zea mays
  misc_feature: MA Experiment 108559 PARAMETER Experiment Name: Zm_5mM_NO_P Parameter: Plant Line Value: 35A19
  misc_feature: MA Experiment 108559 PARAMETER Experiment Name: Zm_5mM_NO_P Parameter: Timepoint (hr) Value: 12
  misc_feature: MA Experiment 108559 PARAMETER Experiment Name: Zm_5mM_NO_P Parameter: Tissue Value: Aerial
  misc_feature: MA Experiment 108559 PARAMETER Experiment Name: Zm_5mM_NO_P Parameter: Treatment Value: 5mM NO vs. No Treatment
  misc_feature: MA Experiment ID: 20000478 Result: Up-regulated in Transcription
  misc_feature: MA Experiment 20000478 PARAMETER Experiment Name: Zm_5mM_SA_P Parameter: Age (day) Value: 11
  misc_feature: MA Experiment 20000478 PARAMETER Experiment Name: Zm_5mM_SA_P Parameter: Organism Value: Zea mays
  misc_feature: MA Experiment 20000478 PARAMETER Experiment Name: Zm_5mM_SA_P Parameter: Plant Line Value: 35A19
  misc_feature: MA Experiment 20000478 PARAMETER Experiment Name: Zm_5mM_SA_P Parameter: Timepoint (hr) Value: 72
  misc_feature: MA Experiment 20000478 PARAMETER Experiment Name: Zm_5mM_SA_P Parameter: Tissue Value: Aerial
  misc_feature: MA Experiment 20000478 PARAMETER Experiment Name: Zm_5mM_SA_P Parameter: Treatment Value: 5mM SA vs. No Treatment
  misc_feature: MA Experiment ID: 20000479 Result: Up-regulated in Transcription
  misc_feature: MA Experiment 20000479 PARAMETER Experiment Name: Zm_Drought_P Parameter: Age (day) Value: 10
  misc_feature: MA Experiment 20000479 PARAMETER Experiment Name: Zm_Drought_P Parameter: Organism Value: Zea mays
  misc_feature: MA Experiment 20000479 PARAMETER Experiment Name: Zm_Drought_P Parameter: Plant Line Value: 35A19
  misc_feature: MA Experiment 20000479 PARAMETER Experiment Name: Zm_Drought_P Parameter: Timepoint (hr) Value: 48
  misc_feature: MA Experiment 20000479 PARAMETER Experiment Name: Zm_Drought_P Parameter: Tissue Value: Aerial
  misc_feature: MA Experiment 20000479 PARAMETER Experiment Name: Zm_Drought_P Parameter: Treatment Value: Drought vs. No Drought
  misc_feature: MA Experiment ID: 20000480 Result: Up-regulated in Transcription
  misc_feature: MA Experiment 20000480 PARAMETER Experiment Name: Zm_Drought_P Parameter: Age (day) Value: 11
  misc_feature: MA Experiment 20000480 PARAMETER Experiment Name: Zm_Drought_P Parameter: Organism Value: Zea mays
  misc_feature: MA Experiment 20000480 PARAMETER Experiment Name: Zm_Drought_P Parameter: Plant Line Value: 35A19
  misc_feature: MA Experiment 20000480 PARAMETER Experiment Name: Zm_Drought_P Parameter: Timepoint (hr) Value: 72
  misc_feature: MA Experiment 20000480 PARAMETER Experiment Name: Zm_Drought_P Parameter: Tissue Value: Aerial
  misc_feature: MA Experiment 20000480 PARAMETER Experiment Name: Zm_Drought_P Parameter: Treatment Value: Drought vs. No Drought
gtccccccccccccccaacgggtggaaaattagaattatgtgttgtttgtgaataaagataggcatataaagggacaaaattaacgaatctctctgataatccagtatcattgaatattatgctatatatctgaaagcagaggtcagaaaaaatcaatcgataacgtttctctcgtggatatcttgcttttactttttttaatttggctggaacttctgctcgcactttttaactcttcctgcctctagcacaatctctatatcctgtcgcaagtactacatataccattgatcattgccttcaatgcatcgtggtccaaaataaatggatctatgtgcatcattgaaattcaacgaccatgtgaatggtagtcagttggcagatataacttggagcagactgccttgctaacagttccatgtgaagttcaagtttggattctgtgtagattgttactatgaaatacaggcagtagcttttttcatataactttttcctggcacttccttttgccattataatgaagtgagaaagaggtctttggcctcttttaaatttgaactcttgtttctatttttgggtgctgcgtctcctgttaatttgtttagccctttgctgattagtgatttcttagttccctagtaatatatgttttggatgttgcagatagagtctctttctttaacattccatggacacgaccttattgtggattctgatttggagctgaactacggaaggtaaacacataaatacataatgctaccattcagttacgagctggtatgctcttggagcatgtcacttgtaccttttatctgttatatttttatttgatatatcaggcgatacggtttgcttgggttgaatggctgtggaaaatctactcttctcacagcaataggctgcagagaacttcctatccctgaacacatggacatataccatctaagccatgagattgaagcttctgacatgtctgcactgcaagccattgttagttgtgacgaagaaagagtgaagttggaaaaggaagctgaaattttggctgcacaggatgatggtggtggtgaagcattggagcgtgtttatgagcgtctagatgcaatggatgctggaactgcagaaaagcgagctgctgaaattttatttggtctgggttttgacaaacaaatgcaagcaaagaaaactaaagatttctctggaggttggcgtatgaggattgctttagcaagagcactgtttatgaatccaacaatccttttgcttgatgagcccacaaaccatctagatcttgaggcttgtgtctggttggaagagacactgaagaaatttgaccgcatacttgttgtcatatcacactcccaagattttctaaatggagtgtgtactaacattatccatatgcaaaacaagaagctcaagttatacaccggtaactacgatcagtatgttcaaactcgctccgatcttgaagagaatcaaatgaagcagtacaaatgggagcaggaacagattgcttcaatgaaggagtacattgctcgcttcggtcatggttctgcaaagcttgctcgtcaggctcagagcaaagagaaaactcttgcaaagatggagcgaggtggtctcaccgagaaggttgttagggacagagttctagtgttcaggtttacagatgttggcaaacttcctccacctgtgctgcagtttgttgaagtcaagtttgggtatacaccagataatctcatatacaagagtcttgactttggagttgatcttgactctagaatcgcattggttggtcccaatggtgcagggaagagcactcttctgaagcttatgactggtgaccttgctccattagatggcatggttcggcgccacaatcacctgcgcattgcacagtaccatcagcatcttgcggacaagctggatctggacatgccggctctggcttacatgatgaaggaataccctgggaccgaagaagagaagatgcgagctgctgttggcaggtttggcctatcaggaaaggcgcaggtgatgccaatgaggaatctttctgatgggcaaaggagccgtgtcatctttgcatggttggcatataggcagccgcaactgctactgctcgatgagccgacaaatcatttggacattgagaccattgactccctggcggaggcactgaatgagtgggatggtggtttggtcttggtgagccatgatttcaggctgatcaaccaggttgctcaagagatttgggtgtgtgagaatcaggcggtgacaaggtgggaaggtgatatcatggatttcaaggcacacttgaagagcaaggctggtttatctgattagagggctttttccagcaaccatgagctttttaactctgtatcacgaagtcccagttttccaatagcgaactatcagagtactttattgtatcggatttcttttgacttgcattgcaacctgattaccttatactacctggaatatttatttatatatcttttg

SEQ ID NO: 1287 - protein, 471 aa, Zea mays subsp. mays
  peptide (1)..(471): Ceres Seq. ID no. 13623193
  misc_feature (1)..(161): Pfam Name: ABC transporter Pfam Description: ABC transporter
  misc_feature (1)..(161): Pfam Name: ABC transporter Pfam Description: ABC transporter
  misc_feature (1)..(466): Homolog of NCBI NO: 10947137 NR Description: ATP-binding cassette, sub-family F, member 2 b; ABC- type transport protein; Iron inhibited ABC transporter 2
  misc_feature (1)..(466): Homolog of NCBI NO: 10179834 NR Description: iron inhibited ABC transporter 2 [Homo sapiens]
  misc_feature (1)..(471): Homolog of NCBI NO: 28071305 NR Description: putative ABC transporter [Oryza sativa (japonica
  misc_feature (1)..(422): Homolog of NCBI NO: 7573600 NR Description: ABC transporter homolog [Populus nigra]
  misc_feature (1)..(466): Homolog of NCBI NO: 27707592 NR Description: similar to ATP-binding cassette, sub-family F,
  misc_feature (1)..(466): Homolog of NCBI NO: 10947137 NR Description: ATP-binding cassette, sub-family F, member 2 b; ABC- type transport protein; Iron inhibited ABC transporter 2
  misc_feature (1)..(466): Homolog of NCBI NO: 27881506 NR Description: ATP-binding cassette, sub-family F, member 2 a; ABC- type transport protein; Iron inhibited ABC transporter 2
  misc_feature (1)..(466): Homolog of NCBI NO: 3005931 NR Description: ABC transporter [Homo sapiens]
  misc_feature (1)..(466): Homolog of NCBI NO: 27707592 NR Description: similar to ATP-binding cassette, sub-family F,
  misc_feature (1)..(468): Homolog of NCBI NO: 28436765 NR Description: Similar to ATP-binding cassette, sub-family F
  misc_feature (1)..(422): Homolog of NCBI NO: 7573600 NR Description: ABC transporter homolog [Populus nigra]
  misc_feature (1)..(471): Homolog of NCBI NO: 15239436 NR Description: ABC transporter family protein [Arabidopsis >gi|10176907|dbj|BAB10100.1| ABC transporter [Arabidopsis
  misc_feature (1)..(471): Homolog of NCBI NO: 28071305 NR Description: putative ABC transporter [Oryza sativa (japonica
  misc_feature (1)..(466): Homolog of NCBI NO: 23956078 NR Description: ATP-binding cassette, sub-family F (GCN20),
  misc_feature (1)..(466): Homolog of NCBI NO: 10179834 NR Description: iron inhibited ABC transporter 2 [Homo sapiens]
  misc_feature (1)..(466): Homolog of NCBI NO: 3005931 NR Description: ABC transporter [Homo sapiens]
  misc_feature (1)..(468): Homolog of NCBI NO: 28436765 NR Description: Similar to ATP-binding cassette, sub-family F
  misc_feature (1)..(471): Homolog of NCBI NO: 15239436 NR Description: ABC transporter family protein [Arabidopsis >gi|10176907|dbj|BAB10100.1| ABC transporter [Arabidopsis
  misc_feature (1)..(466): Homolog of NCBI NO: 27881506 NR Description: ATP-binding cassette, sub-family F, member 2 a; ABC- type transport protein; Iron inhibited ABC transporter 2
  misc_feature (1)..(466): Homolog of NCBI NO: 23956078 NR Description: ATP-binding cassette, sub-family F (GCN20),
MDIYHLSHEIEASDMSALQAIVSCDEERVKLEKEAEILAAQDDGGGEALERVYERLDAMDAGTAEKRAAEILFGLGFDKQMQAKKTKDFSGGWRMRIALARALFMNPTILLLDEPTNHLDLEACVWLEETLKKFDRILVVISHSQDFLNGVCTNIIHMQNKKLKLYTGNYDQYVQTRSDLEENQMKQYKWEQEQIASMKEYIARFGHGSAKLARQAQSKEKTLAKMERGGLTEKVVRDRVLVFRFTDVGKLPPPVLQFVEVKFGYTPDNLIYKSLDFGVDLDSRIALVGPNGAGKSTLLKLMTGDLAPLDGMVRRHNHLRIAQYHQHLADKLDLDMPALAYMMKEYPGTEEEKMRAAVGRFGLSGKAQVMPMRNLSDGQRSRVIFAWLAYRQPQLLLLDEPTNHLDIETIDSLAEALNEWDGGLVLVSHDFRLINQVAQEIWVCENQAVTRWEGDIMDFKAHLKSKAGLSD

SEQ ID NO: 1288 - protein, 457 aa, Zea mays subsp. mays
  peptide (1)..(457): Ceres Seq. ID no. 13623194
  misc_feature (1)..(147): Pfam Name: ABC transporter Pfam Description: ABC transporter
  misc_feature (1)..(147): Pfam Name: ABC transporter Pfam Description: ABC transporter
  misc_feature (1)..(457): Homolog of NCBI NO: 28071305 NR Description: putative ABC transporter [Oryza sativa (japonica
  misc_feature (1)..(457): Homolog of NCBI NO: 15239436 NR Description: ABC transporter family protein [Arabidopsis >gi|10176907|dbj|BAB10100.1| ABC transporter [Arabidopsis
  misc_feature (1)..(408): Homolog of NCBI NO: 7573600 NR Description: ABC transporter homolog [Populus nigra]
  misc_feature (1)..(454): Homolog of NCBI NO: 28436765 NR Description: Similar to ATP-binding cassette, sub-family F
  misc_feature (1)..(452): Homolog of NCBI NO: 27707592 NR Description: similar to ATP-binding cassette, sub-family F,
  misc_feature (1)..(457): Homolog of NCBI NO: 15239436 NR Description: ABC transporter family protein [Arabidopsis >gi|10176907|dbj|BAB10100.1| ABC transporter [Arabidopsis
  misc_feature (1)..(454): Homolog of NCBI NO: 28436765 NR Description: Similar to ATP-binding cassette, sub-family F
  misc_feature (1)..(452): Homolog of NCBI NO: 23956078 NR Description: ATP-binding cassette, sub-family F (GCN20),
  misc_feature (1)..(452): Homolog of NCBI NO: 10179834 NR Description: iron inhibited ABC transporter 2 [Homo sapiens]
  misc_feature (1)..(452): Homolog of NCBI NO: 27881506 NR Description: ATP-binding cassette, sub-family F, member 2 a; ABC- type transport protein; Iron inhibited ABC transporter 2
  misc_feature (1)..(452): Homolog of NCBI NO: 10947137 NR Description: ATP-binding cassette, sub-family F, member 2 b; ABC- type transport protein; Iron inhibited ABC transporter 2
  misc_feature (1)..(452): Homolog of NCBI NO: 3005931 NR Description: ABC transporter [Homo sapiens]
  misc_feature (1)..(452): Homolog of NCBI NO: 27707592 NR Description: similar to ATP-binding cassette, sub-family F,
  misc_feature (1)..(408): Homolog of NCBI NO: 7573600 NR Description: ABC transporter homolog [Populus nigra]
  misc_feature (1)..(457): Homolog of NCBI NO: 28071305 NR Description: putative ABC transporter [Oryza sativa (japonica
  misc_feature (1)..(452): Homolog of NCBI NO: 3005931 NR Description: ABC transporter [Homo sapiens]
  misc_feature (1)..(452): Homolog of NCBI NO: 10947137 NR Description: ATP-binding cassette, sub-family F, member 2 b; ABC- type transport protein; Iron inhibited ABC transporter 2
  misc_feature (1)..(452): Homolog of NCBI NO: 27881506 NR Description: ATP-binding cassette, sub-family F, member 2 a; ABC- type transport protein; Iron inhibited ABC transporter 2
  misc_feature (1)..(452): Homolog of NCBI NO: 10179834 NR Description: iron inhibited ABC transporter 2 [Homo sapiens]
  misc_feature (1)..(452): Homolog of NCBI NO: 23956078 NR Description: ATP-binding cassette, sub-family F (GCN20),
MSALQAIVSCDEERVKLEKEAEILAAQDDGGGEALERVYERLDAMDAGTAEKRAAEILFGLGFDKQMQAKKTKDFSGGWRMRIALARALFMNPTILLLDEPTNHLDLEACVWLEETLKKFDRILVVISHSQDFLNGVCTNIIHMQNKKLKLYTGNYDQYVQTRSDLEENQMKQYKWEQEQIASMKEYIARFGHGSAKLARQAQSKEKTLAKMERGGLTEKVVRDRVLVFRFTDVGKLPPPVLQFVEVKFGYTPDNLIYKSLDFGVDLDSRIALVGPNGAGKSTLLKLMTGDLAPLDGMVRRHNHLRIAQYHQHLADKLDLDMPALAYMMKEYPGTEEEKMRAAVGRFGLSGKAQVMPMRNLSDGQRSRVIFAWLAYRQPQLLLLDEPTNHLDIETIDSLAEALNEWDGGLVLVSHDFRLINQVAQEIWVCENQAVTRWEGDIMDFKAHLKSKAGLSD

SEQ ID NO: 1289 - protein, 413 aa, Zea mays subsp. mays
  peptide (1)..(413): Ceres Seq. ID no. 13623195
  misc_feature (1)..(103): Pfam Name: ABC transporter Pfam Description: ABC transporter
  misc_feature (1)..(103): Pfam Name: ABC transporter Pfam Description: ABC transporter
  misc_feature (1)..(413): Homolog of NCBI NO: 15239436 NR Description: ABC transporter family protein [Arabidopsis >gi|10176907|dbj|BAB10100.1| ABC transporter [Arabidopsis
  misc_feature (1)..(364): Homolog of NCBI NO: 7573600 NR Description: ABC transporter homolog [Populus nigra]
  misc_feature (1)..(410): Homolog of NCBI NO: 28436765 NR Description: Similar to ATP-binding cassette, sub-family F
  misc_feature (1)..(408): Homolog of NCBI NO: 27707592 NR Description: similar to ATP-binding cassette, sub-family F,
  misc_feature (1)..(408): Homolog of NCBI NO: 3005931 NR Description: ABC transporter [Homo sapiens]
  misc_feature (1)..(413): Homolog of NCBI NO: 15239436 NR Description: ABC transporter family protein [Arabidopsis >gi|10176907|dbj|BAB10100.1| ABC transporter [Arabidopsis
  misc_feature (1)..(410): Homolog of NCBI NO: 28436765 NR Description: Similar to ATP-binding cassette, sub-family F
  misc_feature (1)..(408): Homolog of NCBI NO: 3005931 NR Description: ABC transporter [Homo sapiens]
  misc_feature (1)..(413): Homolog of NCBI NO: 28071305 NR Description: putative ABC transporter [Oryza sativa (japonica
  misc_feature (1)..(408): Homolog of NCBI NO: 23956078 NR Description: ATP-binding cassette, sub-family F (GCN20),
  misc_feature (1)..(408): Homolog of NCBI NO: 10947137 NR Description: ATP-binding cassette, sub-family F, member 2 b; ABC- type transport protein; Iron inhibited ABC transporter 2
  misc_feature (1)..(408): Homolog of NCBI NO: 27881506 NR Description: ATP-binding cassette, sub-family F, member 2 a; ABC- type transport protein; Iron inhibited ABC transporter 2
  misc_feature (1)..(408): Homolog of NCBI NO: 10179834 NR Description: iron inhibited ABC transporter 2 [Homo sapiens]
  misc_feature (1)..(408): Homolog of NCBI NO: 27707592 NR Description: similar to ATP-binding cassette, sub-family F,
  misc_feature (1)..(364): Homolog of NCBI NO: 7573600 NR Description: ABC transporter homolog [Populus nigra]
  misc_feature (1)..(413): Homolog of NCBI NO: 28071305 NR Description: putative ABC transporter [Oryza sativa (japonica
  misc_feature (1)..(408): Homolog of NCBI NO: 10179834 NR Description: iron inhibited ABC transporter 2 [Homo sapiens]
  misc_feature (1)..(408): Homolog of NCBI NO: 27881506 NR Description: ATP-binding cassette, sub-family F, member 2 a; ABC- type transport protein; Iron inhibited ABC transporter 2
  misc_feature (1)..(408): Homolog of NCBI NO: 10947137 NR Description: ATP-binding cassette, sub-family F, member 2 b; ABC- type transport protein; Iron inhibited ABC transporter 2
  misc_feature (1)..(408): Homolog of NCBI NO: 23956078 NR Description: ATP-binding cassette, sub-family F (GCN20),
MDAGTAEKRAAEILFGLGFDKQMQAKKTKDFSGGWRMRIALARALFMNPTILLLDEPTNHLDLEACVWLEETLKKFDRILVVISHSQDFLNGVCTNIIHMQNKKLKLYTGNYDQYVQTRSDLEENQMKQYKWEQEQIASMKEYIARFGHGSAKLARQAQSKEKTLAKMERGGLTEKVVRDRVLVFRFTDVGKLPPPVLQFVEVKFGYTPDNLIYKSLDFGVDLDSRIALVGPNGAGKSTLLKLMTGDLAPLDGMVRRHNHLRIAQYHQHLADKLDLDMPALAYMMKEYPGTEEEKMRAAVGRFGLSGKAQVMPMRNLSDGQRSRVIFAWLAYRQPQLLLLDEPTNHLDIETIDSLAEALNEWDGGLVLVSHDFRLINQVAQEIWVCENQAVTRWEGDIMDFKAHLKSKAGLSD

SEQ ID NO: 1290 - DNA, 1645 bp, Zea mays subsp. mays
  misc_feature (1)..(1645): Ceres Seq. ID no. 15224641
agatgtgaggctaacattttcaaatgctatgaagtataatcctccaggcaatgatgtgcatatttttgctaaagaattgaatgaaatgtttgattcagaatgggaatcagtagaaaggaaatttagaggccgaaaccttggtcaagaccagcagacaatgaaggccataaaagttcgagctatgatggattcaaagtctacagttgctagagggccggttgcatgctcaaaccctaaaactttggttgctagaggtccagtagcttgctcaaattcgattgcaaagaagacactgacagatgcattatcctccaaagtaaaaatcaaattttccgtgcgcagctctgcgcatacctcttccaaagatatactcgttcaagcagctggtagcaaagaggggtccttaaatcactctgtccctactggcaacaaagaggcatcttcaaattgtactattcctatcgctaaggaggctaaaatatcaagggcacgagaaattgagcgctgctctggttcaattggaaaacaatcatggtcttgcaatgacacttctacttcacctctcgcttcctctgtgcaaggtgaggaaagttaccttcatgatgaacctttgtcaccaagcagggctcttcgtgcagcaatgctcaggagtcgttttgctgggactatagtgaaggctcaacagaaggcacttctagatcatgggaagaatatagaccctgtgaaattgcaattggaaaaggagaggctggaaaagaggcagcaagaagagaaagcaaggatcgaggcccaggtgaaggctgctgaagcagctgcacaacaaaagtttgaggaagaaatgaggatgaagagaaagcaggaaagggaggcagcacgcctggcactacgcatgatgaagaagactgttgatattgacaacagtgacttcctaaaggagctggagaacttcagcaaaacatggcaggcaaatccacctggcaaattaatcgtggattttatcagtggggacttgccaccggggttagggagtccgctggagaggctcggcctcttcatgaaggaagatttcgaggatgaggtagaacaggaaatggaggacagagtgtcaccctcaatggatgttgacatcaggaaagatttccaggaagacttaggacatgaaatgcaggacagtgcatcacccgtgactgtcattggcacaaagaatgacgtacagggagtggcaggacatgaaatggaggacagcggatcaccagccacagtcattgacacgaagaaagaagagacagaacatgagatggtggacagcgtatcacctttgatggatgttgacaaggaggaaggggagatcagctgctgacggtagctacacctctcttcacccgcataatttattgaggcagacatccttgcttggttgttagattaggcaatttcataagcagagtgatgcagaaacattagttttatctgctttcatcgtagaaccatgtggtgtggagaacatgtctcagacgaaatgacgagtggttttggatttgctgcggattttaattttcgtggtcttgtcagtctggcaagagtatgatgactctgtatgttgaatttgacctcccccgctggatgacatgtataaaaggatgag

SEQ ID NO: 1291 - protein, 452 aa, Zea mays subsp. mays
  peptide (1)..(452): Ceres Seq. ID no. 15224642
  misc_feature (189)..(375): Homolog of NCBI NO: 6016737 NR Description: hypothetical protein [Arabidopsis thaliana]
  misc_feature (1)..(173): Homolog of NCBI NO: 11358472 NR Description: kinase-like protein - Arabidopsis thaliana
  misc_feature (189)..(378): Homolog of NCBI NO: 11358472 NR Description: kinase-like protein - Arabidopsis thaliana
  misc_feature (1)..(72): Homolog of NCBI NO: 15232127 NR Description: DNA-binding protein family [Arabidopsis thaliana]
  misc_feature (113)..(436): Homolog of NCBI NO: 15232127 NR Description: DNA-binding protein family [Arabidopsis thaliana]
  misc_feature (1)..(72): Homolog of NCBI NO: 9294219 NR Description: gb|AAF01563.1~gene_id:K17E12.8~similar to unknown
  misc_feature (115)..(436): Homolog of NCBI NO: 9294219 NR Description: gb|AAF01563.1~gene_id:K17E12.8~similar to unknown
  misc_feature (352)..(451): Homolog of NCBI NO: 33146482 NR Description: putative RING3 protein [Oryza sativa (japonica
  misc_feature (1)..(169): Homolog of NCBI NO: 33146482 NR Description: putative RING3 protein [Oryza sativa (japonica
  misc_feature (78)..(378): Homolog of NCBI NO: 33146482 NR Description: putative RING3 protein [Oryza sativa (japonica
DVRLTFSNAMKYNPPGNDVHIFAKELNEMFDSEWESVERKFRGRNLGQDQQTMKAIKVRAMMDSKSTVARGPVACSNPKTLVARGPVACSNSIAKKTLTDALSSKVKIKFSVRSSAHTSSKDILVQAAGSKEGSLNHSVPTGNKEASSNCTIPIAKEAKISRAREIERCSGSIGKQSWSCNDTSTSPLASSVQGEESYLHDEPLSPSRALRAAMLRSRFAGTIVKAQQKALLDHGKNIDPVKLQLEKERLEKRQQEEKARIEAQVKAAEAAAQQKFEEEMRMKRKQEREAARLALRMMKKTVDIDNSDFLKELENFSKTWQANPPGKLIVDFISGDLPPGLGSPLERLGLFMKEDFEDEVEQEMEDRVSPSMDVDIRKDFQEDLGHEMQDSASPVTVIGTKNDVQGVAGHEMEDSGSPATVIDTKKEETEHEMVDSVSPLMDVDKEEGEISC

SEQ ID NO: 1292 - protein, 443 aa, Zea mays subsp. mays
  peptide (1)..(443): Ceres Seq. ID no. 15224643
  misc_feature (180)..(366): Homolog of NCBI NO: 6016737 NR Description: hypothetical protein [Arabidopsis thaliana]
  misc_feature (1)..(164): Homolog of NCBI NO: 11358472 NR Description: kinase-like protein - Arabidopsis thaliana
  misc_feature (180)..(369): Homolog of NCBI NO: 11358472 NR Description: kinase-like protein - Arabidopsis thaliana
  misc_feature (1)..(63): Homolog of NCBI NO: 15232127 NR Description: DNA-binding protein family [Arabidopsis thaliana]
  misc_feature (104)..(427): Homolog of NCBI NO: 15232127 NR Description: DNA-binding protein family [Arabidopsis thaliana]
  misc_feature (1)..(63): Homolog of NCBI NO: 9294219 NR Description: gb|AAF01563.1~gene_id:K17E12.8~similar to unknown
  misc_feature (106)..(427): Homolog of NCBI NO: 9294219 NR Description: gb|AAF01563.1~gene_id:K17E12.8~similar to unknown
  misc_feature (343)..(442): Homolog of NCBI NO: 33146482 NR Description: putative RING3 protein [Oryza sativa (japonica
  misc_feature (1)..(160): Homolog of NCBI NO: 33146482 NR Description: putative RING3 protein [Oryza sativa (japonica
  misc_feature (69)..(369): Homolog of NCBI NO: 33146482 NR Description: putative RING3 protein [Oryza sativa (japonica
MKYNPPGNDVHIFAKELNEMFDSEWESVERKFRGRNLGQDQQTMKAIKVRAMMDSKSTVARGPVACSNPKTLVARGPVACSNSIAKKTLTDALSSKVKIKFSVRSSAHTSSKDILVQAAGSKEGSLNHSVPTGNKEASSNCTIPIAKEAKISRAREIERCSGSIGKQSWSCNDTSTSPLASSVQGEESYLHDEPLSPSRALRAAMLRSRFAGTIVKAQQKALLDHGKNIDPVKLQLEKERLEKRQQEEKARIEAQVKAAEAAAQQKFEEEMRMKRKQEREAARLALRMMKKTVDIDNSDFLKELENFSKTWQANPPGKLIVDFISGDLPPGLGSPLERLGLFMKEDFEDEVEQEMEDRVSPSMDVDIRKDFQEDLGHEMQDSASPVTVIGTKNDVQGVAGHEMEDSGSPATVIDTKKEETEHEMVDSVSPLMDVDKEEGEISC

SEQ ID NO: 1293 - protein, 424 aa, Zea mays subsp. mays
  peptide (1)..(424): Ceres Seq. ID no. 15224644
  misc_feature (161)..(347): Homolog of NCBI NO: 6016737 NR Description: hypothetical protein [Arabidopsis thaliana]
  misc_feature (1)..(145): Homolog of NCBI NO: 11358472 NR Description: kinase-like protein - Arabidopsis thaliana
  misc_feature (161)..(350): Homolog of NCBI NO: 11358472 NR Description: kinase-like protein - Arabidopsis thaliana
  misc_feature (1)..(44): Homolog of NCBI NO: 15232127 NR Description: DNA-binding protein family [Arabidopsis thaliana]
  misc_feature (85)..(408): Homolog of NCBI NO: 15232127 NR Description: DNA-binding protein family [Arabidopsis thaliana]
  misc_feature (1)..(44): Homolog of NCBI NO: 9294219 NR Description: gb|AAF01563.1~gene_id:K17E12.8~similar to unknown
  misc_feature (87)..(408): Homolog of NCBI NO: 9294219 NR Description: gb|AAF01563.1~gene_id:K17E12.8~similar to unknown
  misc_feature (324)..(423): Homolog of NCBI NO: 33146482 NR Description: putative RING3 protein [Oryza sativa (japonica
  misc_feature (1)..(141): Homolog of NCBI NO: 33146482 NR Description: putative RING3 protein [Oryza sativa (japonica
  misc_feature (50)..(350): Homolog of NCBI NO: 33146482 NR Description: putative RING3 protein [Oryza sativa (japonica
MFDSEWESVERKFRGRNLGQDQQTMKAIKVRAMMDSKSTVARGPVACSNPKTLVARGPVACSNSIAKKTLTDALSSKVKIKFSVRSSAHTSSKDILVQAAGSKEGSLNHSVPTGNKEASSNCTIPIAKEAKISRAREIERCSGSIGKQSWSCNDTSTSPLASSVQGEESYLHDEPLSPSRALRAAMLRSRFAGTIVKAQQKALLDHGKNIDPVKLQLEKERLEKRQQEEKARIEAQVKAAEAAAQQKFEEEMRMKRKQEREAARLALRMMKKTVDIDNSDFLKELENFSKTWQANPPGKLIVDFISGDLPPGLGSPLERLGLFMKEDFEDEVEQEMEDRVSPSMDVDIRKDFQEDLGHEMQDSASPVTVIGTKNDVQGVAGHEMEDSGSPATVIDTKKEETEHEMVDSVSPLMDVDKEEGEISC

SEQ ID NO: 1294 - DNA, 2398 bp, Zea mays subsp. mays
  misc_feature (1)..(2398): Ceres Seq. ID no. 15226167
atggtatagatcgagccacagaggttagataaaagatcaacactaaaggcagtaattacatgatgccatgatcatataagcaaagattaatttaatctactatgaagcagcaaaaacgagtgtttattccaagaatttgtagggaggtattaaaaaatacataaaatatatatgcttagtcgataaagaagctttttatacttataaaatatttatacctagattggttttgtctaggtttgtcctcagccaaacctttttagcttttactgtcgacatctaaaattttacatagattgacaatacaagcaaggttgttgacattcctaaattcattgtgaaaactacttttatgatatataactcttccattgaatataatatatttttatggatgctgccagacaaaattagagtagctagtttgagtttggacaaacttagatggacctacatctgtgatcggatgaagtaatttattcaatctttacattgaatttcacttattatttcaactatagctgagttggactccttttcttttttttaaaaaaaaacattgactaaatttggatttcacctttttattctattaacttatatgtaccaaatattacagctcctggatgacagagcagataagaagcgtgcaggcttcatcgttctcatttcggatggtctagacggccagttcaaatggggagatgagagtatcacccccacggatcccatccgaggcctcctccgaaagtacccagtccacacctttggtttgggcaaggctcacgacccaagggcactgcactatatcgctaacatatcctacggaatctattcctccatcaccgacaacctcgagaacaagatcatagaggcatttgccgtctgcttagctgggttcaagaccgtagtagccgtcgacgtctgtgttgacatcaggtcaagcagtttgctgataacaaagatcgactctgggggttacatactccgggggagtaccggaggcatcttggttggcacactctatgctggggaggtgaaggacttcattgtctacttttcatatcataccgggagttggtcgagtggttaccatacaactttgaatgggattgctgctagtgtcacgtacaaggaagcgccgggcaggcagtcaactgccactgactcttgctcagtgtcactcccgattcacgtgaccgacaccgtgtatcctcctgaaaacccctgcccaccctaccccatggtcctgcagcagatggtgcggttcaaggtgctagacttgcttataagcgtcctgaaagaattcctggtcctgaagggggaggctgctagtgccgtccacgggaaggaaggaggagatgacccggtcttgcaggccatcgcagcgagcttgctgcagaggaagtggaaagagttcaagcagtccgatgaatcctggaaagaagccccgaggaacttccttgacctgggaggcatcgacaaggacatcaacaccatggtggatatcctggagcagggcttgggtgttggatgcatccactcatggctgtcgagctatcagatgcagcgcgcgacaattacaggcttgccaggatctcacatggttgcaaccggccaattccgcacgccagcgatgaacgcaatggtccaggaggcccataggcatttggccaaggaagcatctgcccaagatgcggggacgtcaattgtctgcaagcgcgccgttgagcttctagatggggtcaacaagcgattcgacctctggtgcaagctggaccatgacttgccgcgcactaaccaaccgtcatcgcaccaagaagaaggccatgagtcccgcgacatcaccgacgtcctgcatgggaacatcaaccgagcgaggcagcatgacatatacatggtacgtatatacatatctatggatctgaattcattaaggtcccattctgtgtttgtcttggatgcaggctgccgatcacgcgatcaagcaatggcggagcttcctcacatccgtggagaagacacatggccatgggccggacaagtaggcgcatgatgaggccaccggcagctaccacaaaccccagaacacagcgtgagtggtgttgtgtcgatgcagactcagacatactacaccatataaataaataaatttaatgagcgagaggccctgacaccagtgcctccgccgactccctccgatcctgagaataatatttgtgcgtactgtccctccgtcctcatggccattatattggtcatttgatttcccgtgtgttcactactgttgttctctaattactagtcctgatcagttccggacgactaagctgtaataatgtatcttttattttcttttttatattaatataaaagaccatatgtgtatgcgtcggtc

SEQ ID NO: 1295 - protein, 484 aa, Zea mays subsp. mays
  peptide (1)..(484): Ceres Seq. ID no. 15226168
  misc_feature (6)..(151): Homolog of NCBI NO: 30694117 NR Description: zinc finger (C3HC4-type RING finger) protein
  misc_feature (6)..(151): Homolog of NCBI NO: 11358375 NR Description: hypothetical protein T5N23.140 - Arabidopsis
  misc_feature (6)..(151): Homolog of NCBI NO: 28393354 NR Description: unknown protein [Arabidopsis thaliana]
  misc_feature (5)..(151): Homolog of NCBI NO: 32489531 NR Description: OSJNBa0043L24.22 [Oryza sativa (japonica
  misc_feature (6)..(195): Homolog of NCBI NO: 37535182 NR Description: hypothetical protein [Oryza sativa (japonica
  misc_feature (6)..(151): Homolog of NCBI NO: 21539497 NR Description: putative protein [Arabidopsis thaliana]
  misc_feature (6)..(151): Homolog of NCBI NO: 15239414 NR Description: zinc finger (C3HC4-type RING finger) protein
  misc_feature (6)..(200): Homolog of NCBI NO: 27754463 NR Description: unknown protein [Arabidopsis thaliana]
  misc_feature (6)..(200): Homolog of NCBI NO: 15223093 NR Description: zinc finger (C3HC4-type RING finger) protein
  misc_feature (6)..(293): Homolog of NCBI NO: 37535178 NR Description: unknown protein [Oryza sativa (japonica
MYQILQLLDDRADKKRAGFIVLISDGLDGQFKWGDESITPTDPIRGLLRKYPVHTFGLGKAHDPRALHYIANISYGIYSSITDNLENKIIEAFAVCLAGFKTVVAVDVCVDIRSSSLLITKIDSGGYILRGSTGGILVGTLYAGEVKDFIVYFSYHTGSWSSGYHTTLNGIAASVTYKEAPGRQSTATDSCSVSLPIHVTDTVYPPENPCPPYPMVLQQMVRFKVLDLLISVLKEFLVLKGEAASAVHGKEGGDDPVLQAIAASLLQRKWKEFKQSDESWKEAPRNFLDLGGIDKDINTMVDILEQGLGVGCIHSWLSSYQMQRATITGLPGSHMVATGQFRTPAMNAMVQEAHRHLAKEASAQDAGTSIVCKRAVELLDGVNKRFDLWCKLDHDLPRTNQPSSHQEEGHESRDITDVLHGNINRARQHDIYMVRIYISMDLNSLRSHSVFVLDAGCRSRDQAMAELPHIRGEDTWPWAGQVGA

SEQ ID NO: 1296 - protein, 270 aa, Zea mays subsp. mays
  peptide (1)..(270): Ceres Seq. ID no. 15226169
  misc_feature (1)..(79): Homolog of NCBI NO: 37535178 NR Description: unknown protein [Oryza sativa (japonica
MVLQQMVRFKVLDLLISVLKEFLVLKGEAASAVHGKEGGDDPVLQAIAASLLQRKWKEFKQSDESWKEAPRNFLDLGGIDKDINTMVDILEQGLGVGCIHSWLSSYQMQRATITGLPGSHMVATGQFRTPAMNAMVQEAHRHLAKEASAQDAGTSIVCKRAVELLDGVNKRFDLWCKLDHDLPRTNQPSSHQEEGHESRDITDVLHGNINRARQHDIYMVRIYISMDLNSLRSHSVFVLDAGCRSRDQAMAELPHIRGEDTWPWAGQVGA

SEQ ID NO: 1297 - protein, 265 aa, Zea mays subsp. mays
  peptide (1)..(265): Ceres Seq. ID no. 15226170
  misc_feature (1)..(74): Homolog of NCBI NO: 37535178 NR Description: unknown protein [Oryza sativa (japonica
MVRFKVLDLLISVLKEFLVLKGEAASAVHGKEGGDDPVLQAIAASLLQRKWKEFKQSDESWKEAPRNFLDLGGIDKDINTMVDILEQGLGVGCIHSWLSSYQMQRATITGLPGSHMVATGQFRTPAMNAMVQEAHRHLAKEASAQDAGTSIVCKRAVELLDGVNKRFDLWCKLDHDLPRTNQPSSHQEEGHESRDITDVLHGNINRARQHDIYMVRIYISMDLNSLRSHSVFVLDAGCRSRDQAMAELPHIRGEDTWPWAGQVGA

SEQ ID NO: 1298 - DNA, 614 bp, Zea mays subsp. mays
  misc_feature (1)..(614): Ceres Seq. ID no. 13623460
gcgcctgccgccggccaagttttgtccctctccctcgtccggttcggatcgtcgtcgccagccaggtgctggatccgtagcggcggcggcggccatggacaagagcatgctcggcgacctggatggcctccccgaggaggacaagatgtggatggccgccatgatcgaccagctccagatccacgacaggttcatgctataccaacgcatctcgtgggtggagcagggccgctgcttcgtggtgtggaagcccgtggagctggcgcgcgacctcctcccgctccacttcaagcactacaacttctcctttgtccgccagctcaacacctacgtgagtacatcaaaaacacactcgtccatctatacatcatatgttctgttggtgactgagattgttgttgcaaaacaaaggtctgctttggttcgatcagtgtgtcttttgtttatgtccaatgaaactgatggaagaaaaaagcctctcgatcggcggtgtcagagttgcctgtgacgatgtaaaaaacatgctagatgtagcaatgactaaacctgtgatgatggcatagttgtgcagaaagatttgacagggttgtgggatgttaatcttaatggaaagg

SEQ ID NO: 1299 - protein, 168 aa, Zea mays subsp. mays
  peptide (1)..(168): Ceres Seq. ID no. 13623461
  misc_feature (70)..(110): Homolog of NCBI NO: 15234583 NR Description: heat shock transcription factor 4 (HSF4)
  misc_feature (70)..(110): Homolog of NCBI NO: 2129612 NR Description: heat shock transcription factor HSF4 -
  misc_feature (70)..(110): Homolog of NCBI NO: 15227413 NR Description: heat shock transcription factor family
  misc_feature (70)..(110): Homolog of NCBI NO: 15234264 NR Description: heat shock factor protein 7 (HSF7) [Arabidopsis
  misc_feature (70)..(110): Homolog of NCBI NO: 30697614 NR Description: heat shock transcription factor 6 (HSF6)
  misc_feature (70)..(110): Homolog of NCBI NO: 6624618 NR Description: heat shock factor 7 [Arabidopsis thaliana]
  misc_feature (32)..(79): Homolog of NCBI NO: 12230181 NR Description: Mitochondrial import inner membrane translocase
  misc_feature (68)..(110): Homolog of NCBI NO: 38344369 NR Description: OSJNBb0032E06.3 [Oryza sativa (japonica
  misc_feature (68)..(110): Homolog of NCBI NO: 33591096 NR Description: heat shock factor RHSF1 [Oryza sativa (japonica
RLPPAKFCPSPSSGSDRRRQPGAGSVAAAAAMDKSMLGDLDGLPEEDKMWMAAMIDQLQIHDRFMLYQRISWVEQGRCFVVWKPVELARDLLPLHFKHYNFSFVRQLNTYVSTSKTHSSIYTSYVLLVTEIVVAKQRSALVRSVCLLFMSNETDGRKKPLDRRCQSCL

SEQ ID NO: 1300 - protein, 137 aa, Zea mays subsp. mays
  peptide (1)..(137): Ceres Seq. ID no. 13623462
  misc_feature (39)..(79): Homolog of NCBI NO: 15234583 NR Description: heat shock transcription factor 4 (HSF4)
  misc_feature (39)..(79): Homolog of NCBI NO: 2129612 NR Description: heat shock transcription factor HSF4 -
  misc_feature (39)..(79): Homolog of NCBI NO: 15227413 NR Description: heat shock transcription factor family
  misc_feature (39)..(79): Homolog of NCBI NO: 15234264 NR Description: heat shock factor protein 7 (HSF7) [Arabidopsis
  misc_feature (39)..(79): Homolog of NCBI NO: 30697614 NR Description: heat shock transcription factor 6 (HSF6)
  misc_feature (39)..(79): Homolog of NCBI NO: 6624618 NR Description: heat shock factor 7 [Arabidopsis thaliana]
  misc_feature (1)..(48): Homolog of NCBI NO: 12230181 NR Description: Mitochondrial import inner membrane translocase
  misc_feature (37)..(79): Homolog of NCBI NO: 38344369 NR Description: OSJNBb0032E06.3 [Oryza sativa (japonica
  misc_feature (37)..(79): Homolog of NCBI NO: 33591096 NR Description: heat shock factor RHSF1 [Oryza sativa (japonica
MDKSMLGDLDGLPEEDKMWMAAMIDQLQIHDRFMLYQRISWVEQGRCFVVWKPVELARDLLPLHFKHYNFSFVRQLNTYVSTSKTHSSIYTSYVLLVTEIVVAKQRSALVRSVCLLFMSNETDGRKKPLDRRCQSCL

SEQ ID NO: 1301 - protein, 133 aa, Zea mays subsp. mays
  peptide (1)..(133): Ceres Seq. ID no. 13623463
  misc_feature (35)..(75): Homolog of NCBI NO: 15234583 NR Description: heat shock transcription factor 4 (HSF4)
  misc_feature (35)..(75): Homolog of NCBI NO: 2129612 NR Description: heat shock transcription factor HSF4 -
  misc_feature (35)..(75): Homolog of NCBI NO: 15227413 NR Description: heat shock transcription factor family
  misc_feature (35)..(75): Homolog of NCBI NO: 15234264 NR Description: heat shock factor protein 7 (HSF7) [Arabidopsis
  misc_feature (35)..(75): Homolog of NCBI NO: 30697614 NR Description: heat shock transcription factor 6 (HSF6)
  misc_feature (35)..(75): Homolog of NCBI NO: 6624618 NR Description: heat shock factor 7 [Arabidopsis thaliana]
  misc_feature (1)..(44): Homolog of NCBI NO: 12230181 NR Description: Mitochondrial import inner membrane translocase
  misc_feature (33)..(75): Homolog of NCBI NO: 38344369 NR Description: OSJNBb0032E06.3 [Oryza sativa (japonica
  misc_feature (33)..(75): Homolog of NCBI NO: 33591096 NR Description: heat shock factor RHSF1 [Oryza sativa (japonica
MLGDLDGLPEEDKMWMAAMIDQLQIHDRFMLYQRISWVEQGRCFVVWKPVELARDLLPLHFKHYNFSFVRQLNTYVSTSKTHSSIYTSYVLLVTEIVVAKQRSALVRSVCLLFMSNETDGRKKPLDRRCQSCL

SEQ ID NO: 1302 - DNA, 1208 bp, Zea mays subsp. mays
  misc_feature (1)..(1208): Ceres Seq. ID no. 15226728
gctcactagtcccccccccccgatcttcttaataagttggcgcaaggatacgaaggaagcactgaagaaagccagtttgaagacatgaaggattctgatccagttatggatgagttctatcgtagttgtgaattcccatcggttcctgacagtgaacctgagaccgtgtcttctgcgaaaccatactgctcagcgcccatccaagatgtgttacatgtacaaacagaagaacctcctagtaaaatagtgaaatccgattctagttcatcggatgagattaagaggataatggatggttcaaaccattatgaagttttgggtgtgcctcgtaatagaagcattgaccaaaaggccctgaaaaaagaatatcacagaatggtcctgcttgtacatcctgataaaaatatgggaaatccattggcttgtgaatctttcaaaaagcttcagtcagcttatgaggtcctctctgatttcacaaagaaaaacagctatgatcagcaactgaggaaagaagaatcacagaaaatgaccccaagatcacgtgctgtctcgcaacagagtggtgtagagtttctctcagaagagtccagacgcatacagtgcactaagtgtggtaatttccatatatggatatgcacgaagagaagcaaaacaaaagcaagattctgtcagggctgcgatcggtttcatcaagccaaggatggagatggatgggttgaaaccagattttcatcctccatcaagatggaaataccacgagcctttgtttgtgccgagagcaaaatatttgatgtgtctgagtgggctacctgccagggaatggagtgtaagcctaacactcacggtccaacttttatggtaaacatggtcggcgcagataggatgcctcagagatcctacagttcccggtatcccttcagcttggacgcagagatgatccccgacgatgaattcgagatgtggcttcagcaggcactggcgtcaggcgtcttcgctgacagcccgaagcgcaggaaaagctggagcccgttcaaactgcctcaaaagggaattaaaagttggcgaaggtcgtcatgagggtgtggcattatgcagcagctggggtctaggcggctacagcattggaaagaaggcgacaatacaaggcttcatgggtgtaaatagactgaccaacaatttgcctggatggataactaatttttgttccg

SEQ ID NO: 1303 - protein, 330 aa, Zea mays subsp. mays
  peptide (1)..(330): Ceres Seq. ID no. 15226729
  misc_feature (73)..(140): Pfam Name: DnaJ domain Pfam Description: DnaJ domain
  misc_feature (126)..(315): Homolog of NCBI NO: 29371958 NR Description: DNAJ-like protein [Oryza sativa (japonica
  misc_feature (57)..(212): Homolog of NCBI NO: 15240510 NR Description: DnaJ protein family [Arabidopsis thaliana]
  misc_feature (49)..(215): Homolog of NCBI NO: 31249740 NR Description: putative heat shock protein
  misc_feature (1)..(159): Homolog of NCBI NO: 30699386 NR Description: S-locus protein, putative [Arabidopsis thaliana]
  misc_feature (152)..(330): Homolog of NCBI NO: 32400881 NR Description: s-locus protein 5 [Triticum aestivum]
  misc_feature (1)..(321): Homolog of NCBI NO: 25518299 NR Description: hypothetical protein F19K19.3 - Arabidopsis
  misc_feature (1)..(321): Homolog of NCBI NO: 15219309 NR Description: S-locus protein, putative [Arabidopsis thaliana]
  misc_feature (1)..(330): Homolog of NCBI NO: 6069485 NR Description: S-locus protein 5 [Brassica rapa]
  misc_feature (1)..(159): Homolog of NCBI NO: 7487909 NR Description: hypothetical protein YUP8H12R.35 - Arabidopsis
  misc_feature (126)..(330): Homolog of NCBI NO: 7487909 NR Description: hypothetical protein YUP8H12R.35 - Arabidopsis
MKDSDPVMDEFYRSCEFPSVPDSEPETVSSAKPYCSAPIQDVLHVQTEEPPSKIVKSDSSSSDEIKRIMDGSNHYEVLGVPRNRSIDQKALKKEYHRMVLLVHPDKNMGNPLACESFKKLQSAYEVLSDFTKKNSYDQQLRKEESQKMTPRSRAVSQQSGVEFLSEESRRIQCTKCGNFHIWICTKRSKTKARFCQGCDRFHQAKDGDGWVETRFSSSIKMEIPRAFVCAESKIFDVSEWATCQGMECKPNTHGPTFMVNMVGADRMPQRSYSSRYPFSLDAEMIPDDEFEMWLQQALASGVFADSPKRRKSWSPFKLPQKGIKSWRRSS

SEQ ID NO: 1304 - protein, 323 aa, Zea mays subsp. mays
  peptide (1)..(323): Ceres Seq. ID no. 15226730
  misc_feature (66)..(133): Pfam Name: DnaJ domain Pfam Description: DnaJ domain
  misc_feature (119)..(308): Homolog of NCBI NO: 29371958 NR Description: DNAJ-like protein [Oryza sativa (japonica
  misc_feature (50)..(205): Homolog of NCBI NO: 15240510 NR Description: DnaJ protein family [Arabidopsis thaliana]
  misc_feature (42)..(208): Homolog of NCBI NO: 31249740 NR Description: putative heat shock protein
  misc_feature (1)..(152): Homolog of NCBI NO: 30699386 NR Description: S-locus protein, putative [Arabidopsis thaliana]
  misc_feature (145)..(323): Homolog of NCBI NO: 32400881 NR Description: s-locus protein 5 [Triticum aestivum]
  misc_feature (1)..(314): Homolog of NCBI NO: 25518299 NR Description: hypothetical protein F19K19.3 - Arabidopsis
  misc_feature (1)..(314): Homolog of NCBI NO: 15219309 NR Description: S-locus protein, putative [Arabidopsis thaliana]
  misc_feature (1)..(323): Homolog of NCBI NO: 6069485 NR Description: S-locus protein 5 [Brassica rapa]
  misc_feature (1)..(152): Homolog of NCBI NO: 7487909 NR Description: hypothetical protein YUP8H12R.35 - Arabidopsis
  misc_feature (119)..(323): Homolog of NCBI NO: 7487909 NR Description: hypothetical protein YUP8H12R.35 - Arabidopsis
MDEFYRSCEFPSVPDSEPETVSSAKPYCSAPIQDVLHVQTEEPPSKIVKSDSSSSDEIKRIMDGSNHYEVLGVPRNRSIDQKALKKEYHRMVLLVHPDKNMGNPLACESFKKLQSAYEVLSDFTKKNSYDQQLRKEESQKMTPRSRAVSQQSGVEFLSEESRRIQCTKCGNFHIWICTKRSKTKARFCQGCDRFHQAKDGDGWVETRFSSSIKMEIPRAFVCAESKIFDVSEWATCQGMECKPNTHGPTFMVNMVGADRMPQRSYSSRYPFSLDAEMIPDDEFEMWLQQALASGVFADSPKRRKSWSPFKLPQKGIKSWRRSS

SEQ ID NO: 1305 - protein, 262 aa, Zea mays subsp. mays
  peptide (1)..(262): Ceres Seq. ID no. 15226731
  misc_feature (5)..(72): Pfam Name: DnaJ domain Pfam Description: DnaJ domain
  misc_feature (58)..(262): Homolog of NCBI NO: 7487909 NR Description: hypothetical protein YUP8H12R.35 - Arabidopsis
  misc_feature (58)..(247): Homolog of NCBI NO: 29371958 NR Description: DNAJ-like protein [Oryza sativa (japonica
  misc_feature (1)..(144): Homolog of NCBI NO: 15240510 NR Description: DnaJ protein family [Arabidopsis thaliana]
  misc_feature (1)..(147): Homolog of NCBI NO: 31249740 NR Description: putative heat shock protein
  misc_feature (1)..(91): Homolog of NCBI NO: 30699386 NR Description: S-locus protein, putative [Arabidopsis thaliana]
  misc_feature (84)..(262): Homolog of NCBI NO: 32400881 NR Description: s-locus protein 5 [Triticum aestivum]
  misc_feature (1)..(253): Homolog of NCBI NO: 25518299 NR Description: hypothetical protein F19K19.3 - Arabidopsis
  misc_feature (1)..(253): Homolog of NCBI NO: 15219309 NR Description: S-locus protein, putative [Arabidopsis thaliana]
  misc_feature (1)..(262): Homolog of NCBI NO: 6069485 NR Description: S-locus protein 5 [Brassica rapa]
  misc_feature (1)..(91): Homolog of NCBI NO: 7487909 NR Description: hypothetical protein YUP8H12R.35 - Arabidopsis
MDGSNHYEVLGVPRNRSIDQKALKKEYHRMVLLVHPDKNMGNPLACESFKKLQSAYEVLSDFTKKNSYDQQLRKEESQKMTPRSRAVSQQSGVEFLSEESRRIQCTKCGNFHIWICTKRSKTKARFCQGCDRFHQAKDGDGWVETRFSSSIKMEIPRAFVCAESKIFDVSEWATCQGMECKPNTHGPTFMVNMVGADRMPQRSYSSRYPFSLDAEMIPDDEFEMWLQQALASGVFADSPKRRKSWSPFKLPQKGIKSWRRSS

SEQ ID NO: 1306 - DNA, 2289 bp, Zea mays subsp. mays
  misc_feature (1)..(2289): Ceres Seq. ID no. 15226012
cccccccccccccccccccctttttcatctttgattttatctgaacagagacttgaactcgctatcaactttcagtagacctgctaaggagcgatctctgtccaattatcaaccagtgaatttatgccctgtaccatgaatagagatagtcaagaaattagactatttcaagttcagcgagagggactatatggcactggaggcgtctttcttagagtgattgaaaatacaatctacctcaaaactaataacatcgtcagagggaggaagatcagcttgcgtattggtgaagagaggatccttggttgaaagtgatgtttctccatatctttataaggttaaggaagagcagttggggttcttgtgaaacgtagattgtatgaggtctataaatttttatgctctatcattacttgaatgaatcatgtatcactggcaagcaacttcagctcatactctgtaggaattctaattcacattgcattctatttaattgtttgttttatgttccgttcacacgaccatgatttttgtttgcacaaatcactatatatatcctcgttgaattaaaagtccagcttttgtgtcataagcatattgtctatttccccttttggctattgcaaatagcaagtatagtttgttgtttaaatgttagtctattctgtttcaagaaaaaaagaatgcgccatcgctggggatgggtacgatgatcaagatcgtcgaacgacgaagggcaccgaggtgttcgtcagcgggttgccaatgtcgaccacggaaagcatgctcctctctcatctccacaccgtgcagtagctgctgcccgtagcatgtaatgcaatggaatgagttatcaaggcaactaacactgaacatagttcttgggctccttggcagcgtcgaggcatggtatctgcccacgccattgtcagggcctcctgagggtacccatgctcgacctacttcatcaaagatgtggtatggacaaatatacatgccactttccagatgaagtgaagagaccaaatgtggatgtcaatcaatctctagatgaaggaatgaaaggaaggagctaagttattgcactggatgtacggggtctagaaaaggtgtcactttgatgccatttattagtgctgttgtacaaaagaaaaggttgaattgatgaattcatgggctaccttataaaataaaactatattgaattcatgtgatcttgtgattttatgtaagactatcctataaataaaaactatgatttcactgtcttctctatgttgtagctagcagtgcaagcatagaacctatgaaacatggatacttggttacaaaattcaactttcagtcaagttttgttcaacaagggtctgattgagacttccatgaaactgatcgatttgtcgttgctgtcatgtatgtgaacttatggtttagaagcagctaagtttccaacatgttacatggtagggaatgtatttgctaacactatttgctagcactacaagttccgtatgccctatgtgatagatggaaagattgaatgaagggctgtcattatttgatgcaatactgattgttccaatgtttcaaattgtttggaccttcttctctatttgtacaggatttgtttactttcaagaatatcaagtatttgatacgctcaggataattatgtgtgtgttaggcatgacatttgtctttgttgggatctccttgctagcacccgatgacagtaaaggaaagatggttcaagcacctccgaggactccataattgacatagacagaaatggaaagatgccgatggaggagacagacacagatgatagcatctcctttgttacttctgtaaaatctgcatgctccatgtcccttggccttggggagagcaccataagcgcttcatcggtgcttgccatgcttatggtctcgtcaagaacgaacaaccggcttcagaggaatcggaaatgaccgtccaaagtatgcccctttaagaaccactgattggagtaacctatagccgatggtaatatataggtacacaggaaaggtctttgttttttatgttgcctagcgaatggcagtgaagtttttttgttgcttccaaaggcacaactgtttgttgtgatcgtagctagctataacacgagtgtatagttcaccgttgtacccttcaaaacactgtccatacctagctgcatatacatgtgtaagttttagaatacaacaaatttttggaagattaagattagatggagtagcatttgtcagcttttagcttgttgctact

SEQ ID NO: 1307 - protein, 81 aa, Zea mays subsp. mays
  peptide (1)..(81): Ceres Seq. ID no. 15226013
  misc_feature (1)..(71): Pfam Name: Protein of unknown function (DUF803) Pfam Description: Protein of unknown function (DUF803)
  misc_feature (1)..(71): Homolog of NCBI NO: 15231596 NR Description: expressed protein [Arabidopsis thaliana]
MERLNEGLSLFDAILIVPMFQIVWTFFSICTGFVYFQEYQVFDTLRIIMCVLGMTFVFVGISLLAPDDSKGKMVQAPPRTP

SEQ ID NO: 1308 - protein, 63 aa, Zea mays subsp. mays
  peptide (1)..(63): Ceres Seq. ID no. 15226014
  misc_feature (1)..(53): Pfam Name: Protein of unknown function (DUF803) Pfam Description: Protein of unknown function (DUF803)
  misc_feature (1)..(53): Homolog of NCBI NO: 15231596 NR Description: expressed protein [Arabidopsis thaliana]
MFQIVWTFFSICTGFVYFQEYQVFDTLRIIMCVLGMTFVFVGISLLAPDDSKGKMVQAPPRTP

SEQ ID NO: 1309 - protein, 61 aa, Zea mays subsp. mays
  peptide (1)..(61): Ceres Seq. ID no. 15226015
MPCTMNRDSQEIRLFQVQREGLYGTGGVFLRVIENTIYLKTNNIVRGRKISLRIGEERILG

SEQ ID NO: 1310 - protein, 54 aa, Zea mays subsp. mays
  peptide (1)..(54): Ceres Seq. ID no. 15226016
MLVYSVSRKKECAIAGDGYDDQDRRTTKGTEVFVSGLPMSTTESMLLSHLHTVQ

SEQ ID NO: 1311 - DNA, 1912 bp, Zea mays subsp. mays
  misc_feature (1)..(1912): Ceres Seq. ID no. 15225748
tcacctgtacgggcgacttcacctgcacgggcgcatccttcagccgatccgaagacaccatgcctccagggaggaagggaatacgaagcacaagggaacccccaccagaaatcacttctactgagtatgagaaacaaagggcagcaaatgtgatgaggaacaatcagatgttccaacggcttgggattaatcagttacgcacaatgatgactgctacaagagtaaagagcaaatatgatggtccagaggaatcagggtctttgtttgatggcgaggatagtgaaggctctgagccagaggaggattcccatgttgcacaaggtgtacgtagccacaacccaactcatgttgctgacaaacctacacaacaaacacgaggttctaaaagggttgtggcccctgatgttcatggacaacagattagattcactaggcaaaggagtgctgccataaatcaacaatcctccctaagcctaactactactacacaagctggttcaagagccaccacaaaccaagaatccacccaaaacttggctgctgcaacacaatttacttcaagtgttgccactgagcaagattacaccgcaggcctgactactactgcacaacctacttctcccacacaagctgaggtcactgaccacaatagagatgaagaattggtaccaaggcaaagaagtaggggcaaacaacttgaatccttgagcagagggttaggcactaagattccaatccaaatctctaatgggaagcgaaggccagagccacctattcaggctgcaaagtttgcatcggagggtgggatcatattgaggcaacacattccaatatttccgcactggaaggagtacaagaagcaagagaacgagggtaaaattacagactacattgggaagcttgctggtcaattcaccatggatgttgagagtaatgcagtaaaagatgcatgtgttgatatgctaaagggtggacagcgccaaatgaggtataggctgaaaaaaaagtacttcactggagttcctgcaaatcaagtgaggactacatcacctgtttcatgtatgactgatgatcaatggagagagttggtacaaatgtggtctagcccaaaccacaagaacaattgtgtgaagaacaaacttaatcgtgagaaggtgcaatttccacagtgcacaggatctcaatcatatgttgcaaaagcttatgtagtgagacaagaaaaatataaagatgtcgaacctagtgcaattgatcttttcaaggagatgcattgcagcaagaaaaaaggatttagtgaagttgttcagaaagccataggtgatatggaagcaatggtggcaacaccagctgaagatggacagcttgcaaagtctgcaacagaagttgtttccaatgtactgccgggttcaagtaaatttcttcacaatgctggccttttgccctcctccaagagaagcaacacagggactgtttcagcaagaatgcaagagcttcagtctcaattggacaatgagaggcgagaaaaagatggacttcgagaagatatggataccttaaaagccaagtcacaatcatctgaggcaaccattgctaatcaatcaactgagattgcagatttaaagaagtccttagcagaaaatagcatcctacttcgacagatattaagtattagtcgtgatcagctgaatccttaagcatgcttgctaagatgctggtgtcaaccatcctgaatacacatctcacaaaactgtggacctctttttatccttatgtttgctatatggaactgcaacttacagtctattatatgtgttctcttgctatagagttttagtacttgtctggttaaagaattatgaaccatgttcctttgtgtgttggacatattatgcttgaaatatatggatgttgg

SEQ ID NO: 1312 - protein, 563 aa, Zea mays subsp. mays
  peptide (1)..(563): Ceres Seq. ID no. 15225749
  misc_feature (325)..(555): Homolog of NCBI NO: 38344559 NR Description: OSJNBa0065B15.5 [Oryza sativa (japonica
  misc_feature (218)..(341): Homolog of NCBI NO: 38344559 NR Description: OSJNBa0065B15.5 [Oryza sativa (japonica
  misc_feature (214)..(397): Homolog of NCBI NO: 32487860 NR Description: OSJNBb0061C13.10 [Oryza sativa (japonica
  misc_feature (203)..(301): Homolog of NCBI NO: 34905050 NR Description: P0686C03.7 [Oryza sativa (japonica
  misc_feature (303)..(562): Homolog of NCBI NO: 34905050 NR Description: P0686C03.7 [Oryza sativa (japonica
  misc_feature (298)..(543): Homolog of NCBI NO: 37806218 NR Description: hypothetical protein [Oryza sativa (japonica
  misc_feature (298)..(553): Homolog of NCBI NO: 37531906 NR Description: hypothetical protein [Oryza sativa (japonica
TCTGDFTCTGASFSRSEDTMPPGRKGIRSTREPPPEITSTEYEKQRAANVMRNNQMFQRLGINQLRTMMTATRVKSKYDGPEESGSLFDGEDSEGSEPEEDSHVAQGVRSHNPTHVADKPTQQTRGSKRVVAPDVHGQQIRFTRQRSAAINQQSSLSLTTTTQAGSRATTNQESTQNLAAATQFTSSVATEQDYTAGLTTTAQPTSPTQAEVTDHNRDEELVPRQRSRGKQLESLSRGLGTKIPIQISNGKRRPEPPIQAAKFASEGGIILRQHIPIFPHWKEYKKQENEGKITDYIGKLAGQFTMDVESNAVKDACVDMLKGGQRQMRYRLKKKYFTGVPANQVRTTSPVSCMTDDQWRELVQMWSSPNHKNNCVKNKLNREKVQFPQCTGSQSYVAKAYVVRQEKYKDVEPSAIDLFKEMHCSKKKGFSEVVQKAIGDMEAMVATPAEDGQLAKSATEVVSNVLPGSSKFLHNAGLLPSSKRSNTGTVSARMQELQSQLDNERREKDGLREDMDTLKAKSQSSEATIANQSTEIADLKKSLAENSILLRQILSISRDQLNP

SEQ ID NO: 1313 - protein, 544 aa, Zea mays subsp. mays
  peptide (1)..(544): Ceres Seq. ID no. 15225750
  misc_feature (306)..(536): Homolog of NCBI NO: 38344559 NR Description: OSJNBa0065B15.5 [Oryza sativa (japonica
  misc_feature (199)..(322): Homolog of NCBI NO: 38344559 NR Description: OSJNBa0065B15.5 [Oryza sativa (japonica
  misc_feature (195)..(378): Homolog of NCBI NO: 32487860 NR Description: OSJNBb0061C13.10 [Oryza sativa (japonica
  misc_feature (184)..(282): Homolog of NCBI NO: 34905050 NR Description: P0686C03.7 [Oryza sativa (japonica
  misc_feature (284)..(543): Homolog of NCBI NO: 34905050 NR Description: P0686C03.7 [Oryza sativa (japonica
  misc_feature (279)..(524): Homolog of NCBI NO: 37806218 NR Description: hypothetical protein [Oryza sativa (japonica
  misc_feature (279)..(534): Homolog of NCBI NO: 37531906 NR Description: hypothetical protein [Oryza sativa (japonica
MPPGRKGIRSTREPPPEITSTEYEKQRAANVMRNNQMFQRLGINQLRTMMTATRVKSKYDGPEESGSLFDGEDSEGSEPEEDSHVAQGVRSHNPTHVADKPTQQTRGSKRVVAPDVHGQQIRFTRQRSAAINQQSSLSLTTTTQAGSRATTNQESTQNLAAATQFTSSVATEQDYTAGLTTTAQPTSPTQAEVTDHNRDEELVPRQRSRGKQLESLSRGLGTKIPIQISNGKRRPEPPIQAAKFASEGGIILRQHIPIFPHWKEYKKQENEGKITDYIGKLAGQFTMDVESNAVKDACVDMLKGGQRQMRYRLKKKYFTGVPANQVRTTSPVSCMTDDQWRELVQMWSSPNHKNNCVKNKLNREKVQFPQCTGSQSYVAKAYVVRQEKYKDVEPSAIDLFKEMHCSKKKGFSEVVQKAIGDMEAMVATPAEDGQLAKSATEVVSNVLPGSSKFLHNAGLLPSSKRSNTGTVSARMQELQSQLDNERREKDGLREDMDTLKAKSQSSEATIANQSTEIADLKKSLAENSILLRQILSISRDQLNP

SEQ ID NO: 1314 - protein, 513 aa, Zea mays subsp. mays
  peptide (1)..(513): Ceres Seq. ID no. 15225751
  misc_feature (275)..(505): Homolog of NCBI NO: 38344559 NR Description: OSJNBa0065B15.5 [Oryza sativa (japonica
  misc_feature (168)..(291): Homolog of NCBI NO: 38344559 NR Description: OSJNBa0065B15.5 [Oryza sativa (japonica
  misc_feature (164)..(347): Homolog of NCBI NO: 32487860 NR Description: OSJNBb0061C13.10 [Oryza sativa (japonica
  misc_feature (153)..(251): Homolog of NCBI NO: 34905050 NR Description: P0686C03.7 [Oryza sativa (japonica
  misc_feature (253)..(512): Homolog of NCBI NO: 34905050 NR Description: P0686C03.7 [Oryza sativa (japonica
  misc_feature (248)..(493): Homolog of NCBI NO: 37806218 NR Description: hypothetical protein [Oryza sativa (japonica
  misc_feature (248)..(503): Homolog of NCBI NO: 37531906 NR Description: hypothetical protein [Oryza sativa (japonica
MRNNQMFQRLGINQLRTMMTATRVKSKYDGPEESGSLFDGEDSEGSEPEEDSHVAQGVRSHNPTHVADKPTQQTRGSKRVVAPDVHGQQIRFTRQRSAAINQQSSLSLTTTTQAGSRATTNQESTQNLAAATQFTSSVATEQDYTAGLTTTAQPTSPTQAEVTDHNRDEELVPRQRSRGKQLESLSRGLGTKIPIQISNGKRRPEPPIQAAKFASEGGIILRQHIPIFPHWKEYKKQENEGKITDYIGKLAGQFTMDVESNAVKDACVDMLKGGQRQMRYRLKKKYFTGVPANQVRTTSPVSCMTDDQWRELVQMWSSPNHKNNCVKNKLNREKVQFPQCTGSQSYVAKAYVVRQEKYKDVEPSAIDLFKEMHCSKKKGFSEVVQKAIGDMEAMVATPAEDGQLAKSATEVVSNVLPGSSKFLHNAGLLPSSKRSNTGTVSARMQELQSQLDNERREKDGLREDMDTLKAKSQSSEATIANQSTEIADLKKSLAENSILLRQILSISRDQLNP

SEQ ID NO: 1315 - DNA, 1575 bp, Zea mays subsp. mays
  misc_feature (1)..(1575): Ceres Seq. ID no. 13599832
gaggagagagagagctcactagtcccccccccccccccccccccgatggattaagaagcagtgattgttggttgctgttgaaggaagttgctttgggtggagaaaccatggattttccacctgagttgcaagaggttgcaggaactcttgttgcaatggtgaagggttcacctttagctgctaaagctattgggcaaatggcaaggagcaccaggagcacacggaaatggagaaccctggtgaacacagaaattagtaatgatatcattatctcttcatccaactcagttataaacacttgccaggtcatctccagcgctgctttgcatactgcagcatatttccatcaacttggaggttcagtcgctctcagttggtcaatatgtggatagctctcggtttcattcaatcatcagcagaagggaaagggctggaagaattagggcaaaaatactttgatgatctcctatcacgatccttctttggtactgcaaataaagaccagcaaacatattacttccttgatgacctaatgcacattttggcacagcacttctctgctcatgattgtatgaaaatcaacgagggcatccctgttgtgattccaccaacagttcgtcatctgtctgtttcaaccgattatttaccacagctgaagagcaaatacaggttgggaaggcttcaaacattgttagtcctcagaagctcgtcattatcttcaggtcatttgcctagaaaacttctggccaaatttaagaacttgcgggtcctggatctgagtggatctgatattgtagaattgccagaaagcattaatcagttggtacatcttcattacctagctatctgcagtataactaacaaacttcccaagactatatacatgcttaaacatcttgaggtgtgtgatatacctatattcttatttcatgatgatcatcctagaggtgttggtaaatctgttacagttaaacgtctcaaaacatgctgtggcaagcaggcaagatcagttaagtccttgattgatgtgtaaggactgttataggaattggattaaccttcacgacttattagtcattcgatcagccgatgtctgactttcagaatcaaattttacagtaatcccagcagcaggcatgaagtgcaatttttcttttcaattcgacaccttcaagctctagaatccatttctactcagcctgtttatgtgatttggtgtcagaataactccagtttggtggatcaagaatctggttgtgttggtttgtttgatagtcccaggttggtactttgcaacctttcaagccctctttattgcaggactacttggctgttttgcctatccgcaacttatgtatagttattttatttttacttttattttttttatttccatttgtaaggtattccattttggttttcactgccaactggtgcaaacaagaccgttgcaacagggaaaaaatagactatgataccataactaaaaaaaaaaaaaaaaaaactcgagggggggcccggtacccaattcgccctwkttaaacacaataaagttggaactggaggggtgaaagg

SEQ ID NO: 1316 - protein, 216 aa, Zea mays subsp. mays
  peptide (1)..(216): Ceres Seq. ID no. 15218626
  misc_feature (1)..(177): Homolog of NCBI NO: 34896592 NR Description: putative resistance protein [Oryza sativa]
  misc_feature (1)..(199): Homolog of NCBI NO: 6606266 NR Description: Vrga1 [Aegilops ventricosa]
  misc_feature (1)..(199): Homolog of NCBI NO: 38345280 NR Description: OSJNBb0060M15.6 [Oryza sativa (japonica
MWIALGFIQSSAEGKGLEELGQKYFDDLLSRSFFGTANKDQQTYYFLDDLMHILAQHFSAHDCMKINEGIPVVIPPTVRHLSVSTDYLPQLKSKYRLGRLQTLLVLRSSSLSSGHLPRKLLAKFKNLRVLDLSGSDIVELPESINQLVHLHYLAICSITNKLPKTIYMLKHLEVCDIPIFLFHDDHPRGVGKSVTVKRLKTCCGKQARSVKSLIDV

SEQ ID NO: 1317 - protein, 166 aa, Zea mays subsp. mays
  peptide (1)..(166): Ceres Seq. ID no. 15218627
  misc_feature (1)..(127): Homolog of NCBI NO: 34896592 NR Description: putative resistance protein [Oryza sativa]
  misc_feature (1)..(149): Homolog of NCBI NO: 6606266 NR Description: Vrga1 [Aegilops ventricosa]
  misc_feature (1)..(149): Homolog of NCBI NO: 38345280 NR Description: OSJNBb0060M15.6 [Oryza sativa (japonica
MHILAQHFSAHDCMKINEGIPVVIPPTVRHLSVSTDYLPQLKSKYRLGRLQTLLVLRSSSLSSGHLPRKLLAKFKNLRVLDLSGSDIVELPESINQLVHLHYLAICSITNKLPKTIYMLKHLEVCDIPIFLFHDDHPRGVGKSVTVKRLKTCCGKQARSVKSLIDV

SEQ ID NO: 1318 - protein, 153 aa, Zea mays subsp. mays
  peptide (1)..(153): Ceres Seq. ID no. 15218628
  misc_feature (1)..(114): Homolog of NCBI NO: 34896592 NR Description: putative resistance protein [Oryza sativa]
  misc_feature (1)..(136): Homolog of NCBI NO: 6606266 NR Description: Vrga1 [Aegilops ventricosa]
  misc_feature (1)..(136): Homolog of NCBI NO: 38345280 NR Description: OSJNBb0060M15.6 [Oryza sativa (japonica
MKINEGIPVVIPPTVRHLSVSTDYLPQLKSKYRLGRLQTLLVLRSSSLSSGHLPRKLLAKFKNLRVLDLSGSDIVELPESINQLVHLHYLAICSITNKLPKTIYMLKHLEVCDIPIFLFHDDHPRGVGKSVTVKRLKTCCGKQARSVKSLIDV

SEQ ID NO: 1319 - DNA, 2120 bp, Zea mays subsp. mays
  misc_feature (1)..(2120): Ceres Seq. ID no. 13599881
taaatggcttacgcccgaggggcttattcttccttatcatggtatgatataattatcatacaaaaatgttacactgcttttacagggtgtacctcatctatttgcttgtacaattcatcttactactgctttgacaaacattggtctgcactgctttggtctgtgctttaggattctgtttcattgggagaaacaaatgcccttgcttacttttatttatgcttttctgaataattaagaagactagcctcatgttggaatcttcagcgttatatataatacaaaaaaagaggtttgcaatgaaaagttaaaaaggggacttttctccaatacaaggaatcatcttgacagaatataaaacttttcttctaaacatagcatacaatggttttagctgattattgtgtatttcagaagatggtgaattgtgtgaatacttccctagccctttttgctacatcgaggtcttcaggaggaaccttgcttttgacaccaggaatgttgtaagcattacagtatgcaattagttccttctttattaccatatatatgaacttaggtgttcctctactgaccaggcttcagaccaatctggagaagtgtcaggtcatacccatccagttatccatggtcaaacttgcctttgtacaggagattttcagctgtcagattgctcctttcccctgccactacttaggtgttcctctctcaatctacaagcctaaacacagtaaggattaaggagcagccgttgtatacttgtatataattgtggatagaattcccacttggatgggcaacatgctaaatttagctgggcgagctaccttggtgaaggtcacacactctgcaattccgatattcatctccattgacacctgtttgtcggtatgggccattgaacagattgatctgtcaccctactgagcttggtagggtatgccctcatattaaggtgggaatggcttcacataactgacccatatcgtacttggattgatcttctgagtctggcttgatggttcctcaattaagcatgtggctgatctgtgcaactgtgggtagataaattcattggatttttttttgctgaggttgctttttttgcatccgtgtctatgtcgacatagaggcatcattatggtgcatgataataaaaactatttgtaaacctttgttgtacatgcccagattggggaagactttacagtcgataactttactatatacccttctttgtcaaggctttgatgataagccaatggttaaaagggttgtcattgtaacccccacaagcttagttagcaactgggaatctgagataattaagtggttgaaaggcagagtgcaggtgctggccatctgtgaaagcacacgtgctgatgttctttccggaattgaaagtttcttaaaacccttgagccgtctccatgttttcttttgcttactaattatttgttaatatacactatactaaatgaaaatgtagctgcaagttaatgacaatttctgtggtgcatgaataatcttcaggtacttatcatatcttatgagactttccgcatgcattcttcatgcgcgcaccaagtgcgcgcagtgccataccgtggagcgaggtggcgcgcacaggcaggggcccaacctgcacggcctcttcggtcgtcagtcaggcaccaccctcggctaagcctactccacgaccaacaagaacatggtcatcgtctgggaggagggcaccctgtacgactacctcttcaaccccaagaagtacattctaggcacaaagatggtcttcccggggctcaagaagcccaaggaacgaaccgatctcatcgcctacttgacctatcgacgcaacaggggatactcacactgtcatccttagctctgtggcaataagtcgttcgtctgcaacacagccgacagaaaactgagcatgtgcttcagagaccaggcattattgaactttgctgccactaatttacattagatgaactgagttacagcagaatgaatttcctggatcctaaatgcagagaataaataaataaaaatatataaaaggaaaaaaaaaaaaaaaaaaaaaaaaaaaaaaaaaaaaacctcgagggggggcccgg

SEQ ID NO: 1320 - protein, 126 aa, Zea mays subsp. mays
  peptide (1)..(126): Ceres Seq. ID no. 13599882
  misc_feature (4)..(19): Homolog of NCBI NO: 9294624 NR Description: DNA repair protein RAD54-like [Arabidopsis
  misc_feature (4)..(19): Homolog of NCBI NO: 22331177 NR Description: DNA repair protein RAD54, putative [Arabidopsis
MNNLQVLIISYETFRMHSSCAHQVRAVPYRGARWRAQAGAQPARPLRSSVRHHPRLSLLHDQQEHGHRLGGGHPVRLPLQPQEVHSRHKDGLPGAQEAQGTNRSHRLLDLSTQQGILTLSSLALWQ

SEQ ID NO: 1321 - protein, 111 aa, Zea mays subsp. mays
  peptide (1)..(111): Ceres Seq. ID no. 13599883
MHSSCAHQVRAVPYRGARWRAQAGAQPARPLRSSVRHHPRLSLLHDQQEHGHRLGGGHPVRLPLQPQEVHSRHKDGLPGAQEAQGTNRSHRLLDLSTQQGILTLSSLALWQ

SEQ ID NO: 1322 - protein, 104 aa, Zea mays subsp. mays
  peptide (1)..(104): Ceres Seq. ID no. 13599884
  misc_feature (16)..(96): Pfam Name: SNF2 family N-terminal domain Pfam Description: SNF2 family N-terminal domain
  misc_feature (16)..(88): Homolog of NCBI NO: 26326753 NR Description: unnamed protein product [Mus musculus]
  misc_feature (16)..(88): Homolog of NCBI NO: 26353994 NR Description: unnamed protein product [Mus musculus]
  misc_feature (16)..(88): Homolog of NCBI NO: 28277973 NR Description: Similar to RAD54-like (S. cerevisiae) [Danio
  misc_feature (16)..(87): Homolog of NCBI NO: 23612971 NR Description: DNA repair protein rad54, putative [Plasmodium
  misc_feature (16)..(87): Homolog of NCBI NO: 23482686 NR Description: DNA repair protein RAD54-like-related [Plasmodium
  misc_feature (16)..(94): Homolog of NCBI NO: 27819922 NR Description: LD35220p [Drosophila melanogaster]
  misc_feature (16)..(94): Homolog of NCBI NO: 1765914 NR Description: RAD54 [Drosophila melanogaster]
  misc_feature (16)..(94): Homolog of NCBI NO: 3329473 NR Description: RAD54 DNA repair protein [Drosophila melanogaster]
  misc_feature (16)..(96): Homolog of NCBI NO: 9294624 NR Description: DNA repair protein RAD54-like [Arabidopsis
  misc_feature (16)..(96): Homolog of NCBI NO: 22331177 NR Description: DNA repair protein RAD54, putative [Arabidopsis
MIIKTICKPLLYMPRLGKTLQSITLLYTLLCQGFDDKPMVKRVVIVTPTSLVSNWESEIIKWLKGRVQVLAICESTRADVLSGIESFLKPLSRLHVFFCLLIIC

SEQ ID NO: 1323 - DNA, 787 bp, Zea mays subsp. mays
  misc_feature (1)..(787): Ceres Seq. ID no. 13599859
aaatccgatcgatctccgcggcctccagatcccccggcgggcggagacggcgagctccaggcggccaagaagcccccccctcgcagcgctcctctcctctgcctctccgaatcccttaccagggggaaaaaacattgcctgaaagttcttcaggccctggtgtagcagctgaattacccagtttaatggcgaagaacgagctttagatggtctaaagatggagatgagatagaagcaccacaaagtgtacagtggggtagcaaggatatgactgtcatgatgcctcagcgccaccgggctacagccaagaagcccatgtggataatcgtgctcttgtgcatggtttgcatcgtgctgattggggcttacgtcttcccaccgcggcgcttctctaactgctacctctctgcttcaagtgtatgcgcacctttcaaggattggctcccttctatgggccgtcgggagagaactgacgaggagattatttcatctgtagttattagggatatcctttcaatgcccatgcctatgccaaaaaatccaaagattgcccttatgttcttgacaccaggttcattgccctttgagaaattgtgggagaagtttttacagggacatgagggaagatactccatctatgtgcacgcatcacgtgaaaagcctgttcatactagttctttgtttgctggccgggatattcacagtgatgcggtagtatggggattgatttcaatggttgatgctgagaaaagattgttagcgaatgcactggaagatgttgataatc

SEQ ID NO: 1324 - protein, 173 aa, Zea mays subsp. mays
  peptide (1)..(173): Ceres Seq. ID no. 13599860
  misc_feature (8)..(172): Homolog of NCBI NO: 22327910 NR Description: expressed protein [Arabidopsis thaliana]
  misc_feature (8)..(172): Homolog of NCBI NO: 8777360 NR Description: gene_id:MJB24.8~pir||T04241~strong similarity to
  misc_feature (4)..(172): Homolog of NCBI NO: 26452247 NR Description: unknown protein [Arabidopsis thaliana]
  misc_feature (1)..(172): Homolog of NCBI NO: 22329024 NR Description: expressed protein [Arabidopsis thaliana]
  misc_feature (1)..(172): Homolog of NCBI NO: 7486517 NR Description: hypothetical protein F6G3.90 - Arabidopsis
  misc_feature (1)..(172): Homolog of NCBI NO: 38346557 NR Description: OSJNBa0035M09.18 [Oryza sativa (japonica
  misc_feature (1)..(172): Homolog of NCBI NO: 15235920 NR Description: expressed protein [Arabidopsis thaliana]
  misc_feature (1)..(172): Homolog of NCBI NO: 38637182 NR Description: unknown protein [Oryza sativa (japonica
  misc_feature (8)..(172): Homolog of NCBI NO: 30680587 NR Description: expressed protein [Arabidopsis thaliana]
  misc_feature (8)..(172): Homolog of NCBI NO: 7487281 NR Description: hypothetical protein T20K24.18 - Arabidopsis
MTVMMPQRHRATAKKPMWIIVLLCMVCIVLIGAYVFPPRRFSNCYLSASSVCAPFKDWLPSMGRRERTDEEIISSVVIRDILSMPMPMPKNPKIALMFLTPGSLPFEKLWEKFLQGHEGRYSIYVHASREKPVHTSSLFAGRDIHSDAVVWGLISMVDAEKRLLANALEDVDN

SEQ ID NO: 1325 - protein, 170 aa, Zea mays subsp. mays
  peptide (1)..(170): Ceres Seq. ID no. 13599861
  misc_feature (5)..(169): Homolog of NCBI NO: 22327910 NR Description: expressed protein [Arabidopsis thaliana]
  misc_feature (5)..(169): Homolog of NCBI NO: 8777360 NR Description: gene_id:MJB24.8~pir||T04241~strong similarity to
  misc_feature (1)..(169): Homolog of NCBI NO: 26452247 NR Description: unknown protein [Arabidopsis thaliana]
  misc_feature (1)..(169): Homolog of NCBI NO: 22329024 NR Description: expressed protein [Arabidopsis thaliana]
  misc_feature (1)..(169): Homolog of NCBI NO: 7486517 NR Description: hypothetical protein F6G3.90 - Arabidopsis
  misc_feature (1)..(169): Homolog of NCBI NO: 38346557 NR Description: OSJNBa0035M09.18 [Oryza sativa (japonica
  misc_feature (1)..(169): Homolog of NCBI NO: 15235920 NR Description: expressed protein [Arabidopsis thaliana]
  misc_feature (1)..(169): Homolog of NCBI NO: 38637182 NR Description: unknown protein [Oryza sativa (japonica
  misc_feature (5)..(169): Homolog of NCBI NO: 30680587 NR Description: expressed protein [Arabidopsis thaliana]
  misc_feature (5)..(169): Homolog of NCBI NO: 7487281 NR Description: hypothetical protein T20K24.18 - Arabidopsis
MMPQRHRATAKKPMWIIVLLCMVCIVLIGAYVFPPRRFSNCYLSASSVCAPFKDWLPSMGRRERTDEEIISSVVIRDILSMPMPMPKNPKIALMFLTPGSLPFEKLWEKFLQGHEGRYSIYVHASREKPVHTSSLFAGRDIHSDAVVWGLISMVDAEKRLLANALEDVDN

SEQ ID NO: 1326 - protein, 169 aa, Zea mays subsp. mays
  peptide (1)..(169): Ceres Seq. ID no. 13599862
  misc_feature (4)..(168): Homolog of NCBI NO: 22327910 NR Description: expressed protein [Arabidopsis thaliana]
  misc_feature (4)..(168): Homolog of NCBI NO: 8777360 NR Description: gene_id:MJB24.8~pir||T04241~strong similarity to
  misc_feature (1)..(168): Homolog of NCBI NO: 26452247 NR Description: unknown protein [Arabidopsis thaliana]
  misc_feature (1)..(168): Homolog of NCBI NO: 22329024 NR Description: expressed protein [Arabidopsis thaliana]
  misc_feature (1)..(168): Homolog of NCBI NO: 7486517 NR Description: hypothetical protein F6G3.90 - Arabidopsis
  misc_feature (1)..(168): Homolog of NCBI NO: 38346557 NR Description: OSJNBa0035M09.18 [Oryza sativa (japonica
  misc_feature (1)..(168): Homolog of NCBI NO: 15235920 NR Description: expressed protein [Arabidopsis thaliana]
  misc_feature (1)..(168): Homolog of NCBI NO: 38637182 NR Description: unknown protein [Oryza sativa (japonica
  misc_feature (4)..(168): Homolog of NCBI NO: 30680587 NR Description: expressed protein [Arabidopsis thaliana]
  misc_feature (4)..(168): Homolog of NCBI NO: 7487281 NR Description: hypothetical protein T20K24.18 - Arabidopsis
MPQRHRATAKKPMWIIVLLCMVCIVLIGAYVFPPRRFSNCYLSASSVCAPFKDWLPSMGRRERTDEEIISSVVIRDILSMPMPMPKNPKIALMFLTPGSLPFEKLWEKFLQGHEGRYSIYVHASREKPVHTSSLFAGRDIHSDAVVWGLISMVDAEKRLLANALEDVDN

SEQ ID NO: 1327 - DNA, 781 bp, Zea mays subsp. mays
  misc_feature (1)..(781): Ceres Seq. ID no. 14305790
  misc_feature: MA Experiment ID: 108504 Result: Up-regulated in Transcription
  misc_feature: MA Experiment 108504 PARAMETER Experiment Name: Zm_Drought_P Parameter: Age (day) Value: 8
  misc_feature: MA Experiment 108504 PARAMETER Experiment Name: Zm_Drought_P Parameter: Organism Value: Zea mays
  misc_feature: MA Experiment 108504 PARAMETER Experiment Name: Zm_Drought_P Parameter: Plant Line Value: 35A19
  misc_feature: MA Experiment 108504 PARAMETER Experiment Name: Zm_Drought_P Parameter: Timepoint (hr) Value: 12
  misc_feature: MA Experiment 108504 PARAMETER Experiment Name: Zm_Drought_P Parameter: Tissue Value: Aerial
  misc_feature: MA Experiment 108504 PARAMETER Experiment Name: Zm_Drought_P Parameter: Treatment Value: Drought vs. No Drought
  misc_feature: MA Experiment ID: 108526 Result: Up-regulated in Transcription
  misc_feature: MA Experiment 108526 PARAMETER Experiment Name: Zm_5mM_NO_P Parameter: Age (day) Value: 8
  misc_feature: MA Experiment 108526 PARAMETER Experiment Name: Zm_5mM_NO_P Parameter: Organism Value: Zea mays
  misc_feature: MA Experiment 108526 PARAMETER Experiment Name: Zm_5mM_NO_P Parameter: Plant Line Value: 35A19
  misc_feature: MA Experiment 108526 PARAMETER Experiment Name: Zm_5mM_NO_P Parameter: Timepoint (hr) Value: 1
  misc_feature: MA Experiment 108526 PARAMETER Experiment Name: Zm_5mM_NO_P Parameter: Tissue Value: Aerial
  misc_feature: MA Experiment 108526 PARAMETER Experiment Name: Zm_5mM_NO_P Parameter: Treatment Value: 5mM NO vs. No Treatment
  misc_feature: MA Experiment ID: 108527 Result: Up-regulated in Transcription
  misc_feature: MA Experiment 108527 PARAMETER Experiment Name: Zm_5mM_NO_P Parameter: Age (day) Value: 8
  misc_feature: MA Experiment 108527 PARAMETER Experiment Name: Zm_5mM_NO_P Parameter: Organism Value: Zea mays
  misc_feature: MA Experiment 108527 PARAMETER Experiment Name: Zm_5mM_NO_P Parameter: Plant Line Value: 35A19
  misc_feature: MA Experiment 108527 PARAMETER Experiment Name: Zm_5mM_NO_P Parameter: Timepoint (hr) Value: 6
  misc_feature: MA Experiment 108527 PARAMETER Experiment Name: Zm_5mM_NO_P Parameter: Tissue Value: Aerial
  misc_feature: MA Experiment 108527 PARAMETER Experiment Name: Zm_5mM_NO_P Parameter: Treatment Value: 5mM NO vs. No Treatment
  misc_feature: MA Experiment ID: 108529 Result: Up-regulated in Transcription
  misc_feature: MA Experiment 108529 PARAMETER Experiment Name: Zm_Imbibed_Seeds_P Parameter: Age (day) Value: 5 vs. 2
  misc_feature: MA Experiment 108529 PARAMETER Experiment Name: Zm_Imbibed_Seeds_P Parameter: Organism Value: Zea mays
  misc_feature: MA Experiment 108529 PARAMETER Experiment Name: Zm_Imbibed_Seeds_P Parameter: Plant Line Value: 35A19
  misc_feature: MA Experiment 108529 PARAMETER Experiment Name: Zm_Imbibed_Seeds_P Parameter: Tissue Value: Roots vs. Embryo
  misc_feature: MA Experiment ID: 108534 Result: Up-regulated in Transcription
  misc_feature: MA Experiment 108534 PARAMETER Experiment Name: Zm_4deg_Cold_P Parameter: Age (hr) Value: 8
  misc_feature: MA Experiment 108534 PARAMETER Experiment Name: Zm_4deg_Cold_P Parameter: Organism Value: Zea mays
  misc_feature: MA Experiment 108534 PARAMETER Experiment Name: Zm_4deg_Cold_P Parameter: Plant Line Value: 35A19
  misc_feature: MA Experiment 108534 PARAMETER Experiment Name: Zm_4deg_Cold_P Parameter: Temperature (deg C) Value: 4 vs. 22
  misc_feature: MA Experiment 108534 PARAMETER Experiment Name: Zm_4deg_Cold_P Parameter: Timepoint (hr) Value: 6
  misc_feature: MA Experiment 108534 PARAMETER Experiment Name: Zm_4deg_Cold_P Parameter: Tissue Value: Aerial
  misc_feature: MA Experiment ID: 108535 Result: Down-regulated in Transcription
  misc_feature: MA Experiment 108535 PARAMETER Experiment Name: Zm_Meristem_P Parameter: Age (day) Value: 8
  misc_feature: MA Experiment 108535 PARAMETER Experiment Name: Zm_Meristem_P Parameter: Organism Value: Zea mays
  misc_feature: MA Experiment 108535 PARAMETER Experiment Name: Zm_Meristem_P Parameter: Plant Line Value: 35A19
  misc_feature: MA Experiment 108535 PARAMETER Experiment Name: Zm_Meristem_P Parameter: Tissue Value: Root Meristem vs. Above Root Meristem
  misc_feature: MA Experiment ID: 108536 Result: Up-regulated in Transcription
  misc_feature: MA Experiment 108536 PARAMETER Experiment Name: Zm_Meristem_P Parameter: Age (day) Value: 8
  misc_feature: MA Experiment 108536 PARAMETER Experiment Name: Zm_Meristem_P Parameter: Organism Value: Zea mays
  misc_feature: MA Experiment 108536 PARAMETER Experiment Name: Zm_Meristem_P Parameter: Plant Line Value: 35A19
  misc_feature: MA Experiment 108536 PARAMETER Experiment Name: Zm_Meristem_P Parameter: Tissue Value: Shoot Meristem vs. Above Shoot Meristem
  misc_feature: MA Experiment ID: 108539 Result: Up-regulated in Transcription
  misc_feature: MA Experiment 108539 PARAMETER Experiment Name: Zm_20percent_PEG_P Parameter: Age (day) Value: 8
  misc_feature: MA Experiment 108539 PARAMETER Experiment Name: Zm_20percent_PEG_P Parameter: Organism Value: Zea mays
  misc_feature: MA Experiment 108539 PARAMETER Experiment Name: Zm_20percent_PEG_P Parameter: Plant Line Value: 35A19
  misc_feature: MA Experiment 108539 PARAMETER Experiment Name: Zm_20percent_PEG_P Parameter: Timepoint (hr) Value: 1
  misc_feature: MA Experiment 108539 PARAMETER Experiment Name: Zm_20percent_PEG_P Parameter: Tissue Value: Aerial
  misc_feature: MA Experiment 108539 PARAMETER Experiment Name: Zm_20percent_PEG_P Parameter: Treatment Value: 20percent PEG vs. No Treatment
  misc_feature: MA Experiment ID: 108556 Result: Up-regulated in Transcription
  misc_feature: MA Experiment 108556 PARAMETER Experiment Name: Zm_Drought_P Parameter: Age (day) Value: 9
  misc_feature: MA Experiment 108556 PARAMETER Experiment Name: Zm_Drought_P Parameter: Organism Value: Zea mays
  misc_feature: MA Experiment 108556 PARAMETER Experiment Name: Zm_Drought_P Parameter: Plant Line Value: 35A19
  misc_feature: MA Experiment 108556 PARAMETER Experiment Name: Zm_Drought_P Parameter: Timepoint (hr) Value: 24
  misc_feature: MA Experiment 108556 PARAMETER Experiment Name: Zm_Drought_P Parameter: Tissue Value: Aerial
  misc_feature: MA Experiment 108556 PARAMETER Experiment Name: Zm_Drought_P Parameter: Treatment Value: Drought vs. No Drought
  misc_feature: MA Experiment ID: 20000108 Result: Down-regulated in Transcription
  misc_feature: MA Experiment 20000108 PARAMETER Experiment Name: Zm_Root-Tips_P Parameter: Age (day) Value: 12
  misc_feature: MA Experiment 20000108 PARAMETER Experiment Name: Zm_Root-Tips_P Parameter: Organism Value: Zea mays
  misc_feature: MA Experiment 20000108 PARAMETER Experiment Name: Zm_Root-Tips_P Parameter: Tissue Value: Root tips vs. Root mid region    35
  misc_feature: MA Experiment 20000108 PARAMETER Experiment Name: Zm_Root-Tips_P Parameter: Tissue Value: Root tips vs. Root mid region   Sequence Listing-Misc Features (4)
  misc_feature: MA Experiment ID: 20000487 Result: Up-regulated in Transcription
  misc_feature: MA Experiment 20000487 PARAMETER Experiment Name: Zm_50mM_NH4NO3_L_to_H_P Parameter: Organism Value: Zea mays
  misc_feature: MA Experiment 20000487 PARAMETER Experiment Name: Zm_50mM_NH4NO3_L_to_H_P Parameter: Timepoint (hr) Value: 4
  misc_feature: MA Experiment 20000487 PARAMETER Experiment Name: Zm_50mM_NH4NO3_L_to_H_P Parameter: Tissue Value: Leaves
  misc_feature: MA Experiment 20000487 PARAMETER Experiment Name: Zm_50mM_NH4NO3_L_to_H_P Parameter: Treatment Value: 50mM NH4NO3 vs. 100mM Mannitol
  misc_feature: MA Experiment ID: 20000535 Result: Down-regulated in Transcription
  misc_feature: MA Experiment 20000535 PARAMETER Experiment Name: Zm_Hybrid_Seed_Dev_P Parameter: DAP Value: 30 vs. 12
  misc_feature: MA Experiment 20000535 PARAMETER Experiment Name: Zm_Hybrid_Seed_Dev_P Parameter: Organism Value: Zea mays
  misc_feature: MA Experiment 20000535 PARAMETER Experiment Name: Zm_Hybrid_Seed_Dev_P Parameter: Plant Line Value: 35A19
  misc_feature: MA Experiment 20000535 PARAMETER Experiment Name: Zm_Hybrid_Seed_Dev_P Parameter: Tissue Value: Embryo vs. Unfert Floret
gaatatatccatcctaacatccacccacccacacaccagacacacataccttattctccgccgtttcttggcctccggaaatctcctcccccaagttgcaagcatgggcgggttcagcctcagcggcgctacaggtctcgcggcgtaccgcgaggaagacgacgaggagctgttcgagacgtcgtcttcgatctccggcgactccgacgatgagggccaccagctctccgatggagaggggggcgcctatgatttgtcatctgtgatggcacagctccctgtcaagaaagggctatccagatactacgacggcaagtcccagtccttcgcgtgcatgtctgaagtgcgatgcctggaagatctgcgcaagaaagagacgccctacaagaagatcaagacatcaaggagtagcgtcgcgttagacgaagagcaggactgtcatacgccgggtcgtacgaacagcagcagagcgcccggaagttgttgcgcaaacctggtggctcggaacaacggcaaaaacatgctgtacagacctcccccagtccctgtaaacaaaagtggataccgtcagtaggctctaggacattactggatgatatctatccagggtttcacctcttgttttttttccatttttgagggattttgttgacaggcgtattggcctgtctcagatgtaatgtaagagggtttccttctctgctcttagcagagttatctcctatgatcttgtccatgagacattggttcgtgtaaataatagtgatgttgtaaccacttt

SEQ ID NO: 1328 - protein, 190 aa, Zea mays subsp. mays
  peptide (1)..(190): Ceres Seq. ID no. 14305791
  misc_feature (35)..(96): Homolog of NCBI NO: 34909358 NR Description: P0638D12.11 [Oryza sativa (japonica
  misc_feature (51)..(136): Homolog of NCBI NO: 38346806 NR Description: OSJNBa0088A01.13 [Oryza sativa (japonica
  misc_feature (51)..(170): Homolog of NCBI NO: 15241248 NR Description: expressed protein [Arabidopsis thaliana]
  misc_feature (83)..(190): Homolog of NCBI NO: 20159729 NR Description: unknown cold induced protein [Deschampsia
  misc_feature (51)..(190): Homolog of NCBI NO: 34909358 NR Description: P0638D12.11 [Oryza sativa (japonica
NISILTSTHPHTRHTYLILRRFLASGNLLPQVASMGGFSLSGATGLAAYREEDDEELFETSSSISGDSDDEGHQLSDGEGGAYDLSSVMAQLPVKKGLSRYYDGKSQSFACMSEVRCLEDLRKKETPYKKIKTSRSSVALDEEQDCHTPGRTNSSRAPGSCCANLVARNNGKNMLYRPPPVPVNKSGYRQ

SEQ ID NO: 1329 - protein, 156 aa, Zea mays subsp. mays
  peptide (1)..(156): Ceres Seq. ID no. 14305792
  misc_feature (1)..(62): Homolog of NCBI NO: 34909358 NR Description: P0638D12.11 [Oryza sativa (japonica
  misc_feature (17)..(102): Homolog of NCBI NO: 38346806 NR Description: OSJNBa0088A01.13 [Oryza sativa (japonica
  misc_feature (17)..(136): Homolog of NCBI NO: 15241248 NR Description: expressed protein [Arabidopsis thaliana]
  misc_feature (49)..(156): Homolog of NCBI NO: 20159729 NR Description: unknown cold induced protein [Deschampsia
  misc_feature (17)..(156): Homolog of NCBI NO: 34909358 NR Description: P0638D12.11 [Oryza sativa (japonica
MGGFSLSGATGLAAYREEDDEELFETSSSISGDSDDEGHQLSDGEGGAYDLSSVMAQLPVKKGLSRYYDGKSQSFACMSEVRCLEDLRKKETPYKKIKTSRSSVALDEEQDCHTPGRTNSSRAPGSCCANLVARNNGKNMLYRPPPVPVNKSGYRQ

SEQ ID NO: 1330 - protein, 102 aa, Zea mays subsp. mays
  peptide (1)..(102): Ceres Seq. ID no. 14305793
  misc_feature (1)..(48): Homolog of NCBI NO: 38346806 NR Description: OSJNBa0088A01.13 [Oryza sativa (japonica
  misc_feature (1)..(82): Homolog of NCBI NO: 15241248 NR Description: expressed protein [Arabidopsis thaliana]
  misc_feature (1)..(102): Homolog of NCBI NO: 20159729 NR Description: unknown cold induced protein [Deschampsia
  misc_feature (1)..(102): Homolog of NCBI NO: 34909358 NR Description: P0638D12.11 [Oryza sativa (japonica
MAQLPVKKGLSRYYDGKSQSFACMSEVRCLEDLRKKETPYKKIKTSRSSVALDEEQDCHTPGRTNSSRAPGSCCANLVARNNGKNMLYRPPPVPVNKSGYRQ

SEQ ID NO: 1331 - DNA, 934 bp, Zea mays subsp. mays
  misc_feature (1)..(934): Ceres Seq. ID no. 13586712
  misc_feature: MA Experiment ID: 108504 Result: Down-regulated in Transcription
  misc_feature: MA Experiment 108504 PARAMETER Experiment Name: Zm_Drought_P Parameter: Age (day) Value: 8
  misc_feature: MA Experiment 108504 PARAMETER Experiment Name: Zm_Drought_P Parameter: Organism Value: Zea mays
  misc_feature: MA Experiment 108504 PARAMETER Experiment Name: Zm_Drought_P Parameter: Plant Line Value: 35A19
  misc_feature: MA Experiment 108504 PARAMETER Experiment Name: Zm_Drought_P Parameter: Timepoint (hr) Value: 12
  misc_feature: MA Experiment 108504 PARAMETER Experiment Name: Zm_Drought_P Parameter: Tissue Value: Aerial
  misc_feature: MA Experiment 108504 PARAMETER Experiment Name: Zm_Drought_P Parameter: Treatment Value: Drought vs. No Drought
  misc_feature: MA Experiment ID: 108523 Result: Down-regulated in Transcription
  misc_feature: MA Experiment 108523 PARAMETER Experiment Name: Zm_42deg_Heat_P Parameter: Age (day) Value: 8
  misc_feature: MA Experiment 108523 PARAMETER Experiment Name: Zm_42deg_Heat_P Parameter: Organism Value: Zea mays
  misc_feature: MA Experiment 108523 PARAMETER Experiment Name: Zm_42deg_Heat_P Parameter: Plant Line Value: 35A19
  misc_feature: MA Experiment 108523 PARAMETER Experiment Name: Zm_42deg_Heat_P Parameter: Temperature (deg C) Value: 42 vs. 22
  misc_feature: MA Experiment 108523 PARAMETER Experiment Name: Zm_42deg_Heat_P Parameter: Timepoint (hr) Value: 6
  misc_feature: MA Experiment 108523 PARAMETER Experiment Name: Zm_42deg_Heat_P Parameter: Tissue Value: Aerial
  misc_feature: MA Experiment ID: 108536 Result: Down-regulated in Transcription
  misc_feature: MA Experiment 108536 PARAMETER Experiment Name: Zm_Meristem_P Parameter: Age (day) Value: 8
  misc_feature: MA Experiment 108536 PARAMETER Experiment Name: Zm_Meristem_P Parameter: Organism Value: Zea mays
  misc_feature: MA Experiment 108536 PARAMETER Experiment Name: Zm_Meristem_P Parameter: Plant Line Value: 35A19
  misc_feature: MA Experiment 108536 PARAMETER Experiment Name: Zm_Meristem_P Parameter: Tissue Value: Shoot Meristem vs. Above Shoot Meristem
  misc_feature: MA Experiment ID: 108540 Result: Down-regulated in Transcription
  misc_feature: MA Experiment 108540 PARAMETER Experiment Name: Zm_20percent_PEG_P Parameter: Age (day) Value: 8
  misc_feature: MA Experiment 108540 PARAMETER Experiment Name: Zm_20percent_PEG_P Parameter: Organism Value: Zea mays
  misc_feature: MA Experiment 108540 PARAMETER Experiment Name: Zm_20percent_PEG_P Parameter: Plant Line Value: 35A19
  misc_feature: MA Experiment 108540 PARAMETER Experiment Name: Zm_20percent_PEG_P Parameter: Timepoint (hr) Value: 6
  misc_feature: MA Experiment 108540 PARAMETER Experiment Name: Zm_20percent_PEG_P Parameter: Tissue Value: Aerial
  misc_feature: MA Experiment 108540 PARAMETER Experiment Name: Zm_20percent_PEG_P Parameter: Treatment Value: 20percent PEG vs. No Treatment
  misc_feature: MA Experiment ID: 108543 Result: Up-regulated in Transcription
  misc_feature: MA Experiment ID: 108545 Result: Down-regulated in Transcription
  misc_feature: MA Experiment 108545 PARAMETER Experiment Name: Zm_Imbibed_Seeds_P Parameter: Age (day) Value: 3 vs. 2
  misc_feature: MA Experiment 108545 PARAMETER Experiment Name: Zm_Imbibed_Seeds_P Parameter: Organism Value: Zea mays
  misc_feature: MA Experiment 108545 PARAMETER Experiment Name: Zm_Imbibed_Seeds_P Parameter: Plant Line Value: 35A19
  misc_feature: MA Experiment 108545 PARAMETER Experiment Name: Zm_Imbibed_Seeds_P Parameter: Tissue Value: Aerial vs. Embryo
  misc_feature: MA Experiment ID: 108556 Result: Down-regulated in Transcription
  misc_feature: MA Experiment 108556 PARAMETER Experiment Name: Zm_Drought_P Parameter: Age (day) Value: 9
  misc_feature: MA Experiment 108556 PARAMETER Experiment Name: Zm_Drought_P Parameter: Organism Value: Zea mays
  misc_feature: MA Experiment 108556 PARAMETER Experiment Name: Zm_Drought_P Parameter: Plant Line Value: 35A19
  misc_feature: MA Experiment 108556 PARAMETER Experiment Name: Zm_Drought_P Parameter: Timepoint (hr) Value: 24
  misc_feature: MA Experiment 108556 PARAMETER Experiment Name: Zm_Drought_P Parameter: Tissue Value: Aerial
  misc_feature: MA Experiment 108556 PARAMETER Experiment Name: Zm_Drought_P Parameter: Treatment Value: Drought vs. No Drought
  misc_feature: MA Experiment ID: 108597 Result: Down-regulated in Transcription
  misc_feature: MA Experiment 108597 PARAMETER Experiment Name: Zm_100uM_ABA_P Parameter: Age (day) Value: 9
  misc_feature: MA Experiment 108597 PARAMETER Experiment Name: Zm_100uM_ABA_P Parameter: Organism Value: Zea mays
  misc_feature: MA Experiment 108597 PARAMETER Experiment Name: Zm_100uM_ABA_P Parameter: Plant Line Value: 35A19
  misc_feature: MA Experiment 108597 PARAMETER Experiment Name: Zm_100uM_ABA_P Parameter: Timepoint (hr) Value: 24
  misc_feature: MA Experiment 108597 PARAMETER Experiment Name: Zm_100uM_ABA_P Parameter: Tissue Value: Aerial
  misc_feature: MA Experiment 108597 PARAMETER Experiment Name: Zm_100uM_ABA_P Parameter: Treatment Value: 100uM ABA vs. No Treatment
  misc_feature: MA Experiment ID: 108687 Result: Down-regulated in Transcription
  misc_feature: MA Experiment 108687 PARAMETER Experiment Name: Zm_Embryos-Flowers__P Parameter: Tissue Value: Embryo vs. Aerial+
  misc_feature: MA Experiment ID: 20000478 Result: Down-regulated in Transcription
  misc_feature: MA Experiment 20000478 PARAMETER Experiment Name: Zm_5mM_SA_P Parameter: Age (day) Value: 11
  misc_feature: MA Experiment 20000478 PARAMETER Experiment Name: Zm_5mM_SA_P Parameter: Organism Value: Zea mays
  misc_feature: MA Experiment 20000478 PARAMETER Experiment Name: Zm_5mM_SA_P Parameter: Plant Line Value: 35A19
  misc_feature: MA Experiment 20000478 PARAMETER Experiment Name: Zm_5mM_SA_P Parameter: Timepoint (hr) Value: 72
  misc_feature: MA Experiment 20000478 PARAMETER Experiment Name: Zm_5mM_SA_P Parameter: Tissue Value: Aerial
  misc_feature: MA Experiment 20000478 PARAMETER Experiment Name: Zm_5mM_SA_P Parameter: Treatment Value: 5mM SA vs. No Treatment
  misc_feature: MA Experiment ID: 20000480 Result: Down-regulated in Transcription
  misc_feature: MA Experiment 20000480 PARAMETER Experiment Name: Zm_Drought_P Parameter: Age (day) Value: 11
  misc_feature: MA Experiment 20000480 PARAMETER Experiment Name: Zm_Drought_P Parameter: Organism Value: Zea mays
  misc_feature: MA Experiment 20000480 PARAMETER Experiment Name: Zm_Drought_P Parameter: Plant Line Value: 35A19
  misc_feature: MA Experiment 20000480 PARAMETER Experiment Name: Zm_Drought_P Parameter: Timepoint (hr) Value: 72
  misc_feature: MA Experiment 20000480 PARAMETER Experiment Name: Zm_Drought_P Parameter: Tissue Value: Aerial
  misc_feature: MA Experiment 20000480 PARAMETER Experiment Name: Zm_Drought_P Parameter: Treatment Value: Drought vs. No Drought
  misc_feature: MA Experiment ID: 20000488 Result: Down-regulated in Transcription
  misc_feature: MA Experiment 20000488 PARAMETER Experiment Name: Zm_50mM_NH4NO3_L_to_H_P Parameter: Organism Value: Zea mays
  misc_feature: MA Experiment 20000488 PARAMETER Experiment Name: Zm_50mM_NH4NO3_L_to_H_P Parameter: Timepoint (hr) Value: 8
  misc_feature: MA Experiment 20000488 PARAMETER Experiment Name: Zm_50mM_NH4NO3_L_to_H_P Parameter: Tissue Value: Leaves
  misc_feature: MA Experiment 20000488 PARAMETER Experiment Name: Zm_50mM_NH4NO3_L_to_H_P Parameter: Treatment Value: 50mM NH4NO3 vs. 100mM Mannitol
  misc_feature: MA Experiment ID: 20000492 Result: Down-regulated in Transcription
  misc_feature: MA Experiment 20000492 PARAMETER Experiment Name: Zm_Hybrid_Seed_Dev_P Parameter: DAP Value: 12
  misc_feature: MA Experiment 20000492 PARAMETER Experiment Name: Zm_Hybrid_Seed_Dev_P Parameter: Organism Value: Zea mays
  misc_feature: MA Experiment 20000492 PARAMETER Experiment Name: Zm_Hybrid_Seed_Dev_P Parameter: Plant Line Value: 35A19
  misc_feature: MA Experiment 20000492 PARAMETER Experiment Name: Zm_Hybrid_Seed_Dev_P Parameter: Tissue Value: Fert Kernel vs. Unfert Floret
  misc_feature: MA Experiment ID: 20000535 Result: Down-regulated in Transcription
  misc_feature: MA Experiment 20000535 PARAMETER Experiment Name: Zm_Hybrid_Seed_Dev_P Parameter: DAP Value: 30 vs. 12
  misc_feature: MA Experiment 20000535 PARAMETER Experiment Name: Zm_Hybrid_Seed_Dev_P Parameter: Organism Value: Zea mays
  misc_feature: MA Experiment 20000535 PARAMETER Experiment Name: Zm_Hybrid_Seed_Dev_P Parameter: Plant Line Value: 35A19
  misc_feature: MA Experiment 20000535 PARAMETER Experiment Name: Zm_Hybrid_Seed_Dev_P Parameter: Tissue Value: Embryo vs. Unfert Floret
agtccatgacaaggggctcggttagtccacagccctagaggctgcagctgcacacttctcttctctgttttcgccggttaaactttccccacttgttgctggccttcgaatctgtggtttgtttgagcttagcagggaagcgaagaacagggaagcaaggacatggatgctttcagtgcagtgatggacaaggtaaagagccacccagaaatgatggagaaggtcagtgcagtgatggacaaggtgaagaagagccacccagaagcggtggaaaaggtcaaggacgaggtgatgagccttgctgatgctctccatctgcgtagacatggatccaaagataaagaacctgagtctgaagagaaggccgaagaaggcgaggcagcgcagagcgtcgaagaggaggagggtacctctgctgacaagactgcagaacctaatgtgttggagcaggccgtacaggagattcaggctgtcgccgcagctttgcagcagacagcacctgaaactgaaactgaaattccagttgagactgctgctgctgctcctgaaacttcggctgaaggagacaagcctgaagacacaatcagggaggtggagaaagatgacccaaagaagcggctcgatttcgccgggttcttcgccatgctgtttgagaggttctgctccccggccaacaagaagaaagactgagtgattgcaggtcagctgtggatttctcgttttgtgatcttggacgtggaaattacattttacttgatgtatttattgtgggtggtgtacagtctgcacttgtgttctattaagataaatctgctcttgctttttttactttcttttgtgatgacagggcaatgattacattttacttgatgtatttattgtcgcccttgtggaattgatttaatttatgtgaacgattgatttatttagggtt

SEQ ID NO: 1332 - protein, 175 aa, Zea mays subsp. mays
  peptide (1)..(175): Ceres Seq. ID no. 13586713
  misc_feature (1)..(175): Homolog of NCBI NO: 4240037 NR Description: ZmGR2a [Zea mays]
  misc_feature (1)..(175): Homolog of NCBI NO: 4240041 NR Description: ZmGR2c [Zea mays]
  misc_feature (1)..(175): Homolog of NCBI NO: 4240039 NR Description: ZmGR2b [Zea mays]
  misc_feature (1)..(133): Homolog of NCBI NO: 20521262 NR Description: putative ZmGR2c [Oryza sativa (japonica
  misc_feature (1)..(175): Homolog of NCBI NO: 20521262 NR Description: putative ZmGR2c [Oryza sativa (japonica
MDAFSAVMDKVKSHPEMMEKVSAVMDKVKKSHPEAVEKVKDEVMSLADALHLRRHGSKDKEPESEEKAEEGEAAQSVEEEEGTSADKTAEPNVLEQAVQEIQAVAAALQQTAPETETEIPVETAAAAPETSAEGDKPEDTIREVEKDDPKKRLDFAGFFAMLFERFCSPANKKKD

SEQ ID NO: 1333 - protein, 168 aa, Zea mays subsp. mays
  peptide (1)..(168): Ceres Seq. ID no. 13586714
  misc_feature (1)..(126): Homolog of NCBI NO: 20521262 NR Description: putative ZmGR2c [Oryza sativa (japonica
  misc_feature (1)..(168): Homolog of NCBI NO: 20521262 NR Description: putative ZmGR2c [Oryza sativa (japonica
  misc_feature (1)..(168): Homolog of NCBI NO: 4240041 NR Description: ZmGR2c [Zea mays]
  misc_feature (1)..(168): Homolog of NCBI NO: 4240039 NR Description: ZmGR2b [Zea mays]
  misc_feature (1)..(168): Homolog of NCBI NO: 4240037 NR Description: ZmGR2a [Zea mays]
MDKVKSHPEMMEKVSAVMDKVKKSHPEAVEKVKDEVMSLADALHLRRHGSKDKEPESEEKAEEGEAAQSVEEEEGTSADKTAEPNVLEQAVQEIQAVAAALQQTAPETETEIPVETAAAAPETSAEGDKPEDTIREVEKDDPKKRLDFAGFFAMLFERFCSPANKKKD

SEQ ID NO: 1334 - protein, 159 aa, Zea mays subsp. mays
  peptide (1)..(159): Ceres Seq. ID no. 13586715
  misc_feature (1)..(117): Homolog of NCBI NO: 20521262 NR Description: putative ZmGR2c [Oryza sativa (japonica
  misc_feature (1)..(159): Homolog of NCBI NO: 20521262 NR Description: putative ZmGR2c [Oryza sativa (japonica
  misc_feature (1)..(159): Homolog of NCBI NO: 4240041 NR Description: ZmGR2c [Zea mays]
  misc_feature (1)..(159): Homolog of NCBI NO: 4240039 NR Description: ZmGR2b [Zea mays]
  misc_feature (1)..(159): Homolog of NCBI NO: 4240037 NR Description: ZmGR2a [Zea mays]
MMEKVSAVMDKVKKSHPEAVEKVKDEVMSLADALHLRRHGSKDKEPESEEKAEEGEAAQSVEEEEGTSADKTAEPNVLEQAVQEIQAVAAALQQTAPETETEIPVETAAAAPETSAEGDKPEDTIREVEKDDPKKRLDFAGFFAMLFERFCSPANKKKD

SEQ ID NO: 1335 - DNA, 789 bp, Zea mays subsp. mays
  misc_feature (1)..(789): Ceres Seq. ID no. 13599127
  misc_feature: MA Experiment ID: 108522 Result: Up-regulated in Transcription
  misc_feature: MA Experiment 108522 PARAMETER Experiment Name: Zm_42deg_Heat_P Parameter: Age (day) Value: 8
  misc_feature: MA Experiment 108522 PARAMETER Experiment Name: Zm_42deg_Heat_P Parameter: Organism Value: Zea mays
  misc_feature: MA Experiment 108522 PARAMETER Experiment Name: Zm_42deg_Heat_P Parameter: Plant Line Value: 35A19
  misc_feature: MA Experiment 108522 PARAMETER Experiment Name: Zm_42deg_Heat_P Parameter: Temperature (deg C) Value: 42 vs. 22
  misc_feature: MA Experiment 108522 PARAMETER Experiment Name: Zm_42deg_Heat_P Parameter: Timepoint (hr) Value: 1
  misc_feature: MA Experiment 108522 PARAMETER Experiment Name: Zm_42deg_Heat_P Parameter: Tissue Value: Aerial
  misc_feature: MA Experiment ID: 20000492 Result: Up-regulated in Transcription
  misc_feature: MA Experiment 20000492 PARAMETER Experiment Name: Zm_Hybrid_Seed_Dev_P Parameter: DAP Value: 12
  misc_feature: MA Experiment 20000492 PARAMETER Experiment Name: Zm_Hybrid_Seed_Dev_P Parameter: Organism Value: Zea mays
  misc_feature: MA Experiment 20000492 PARAMETER Experiment Name: Zm_Hybrid_Seed_Dev_P Parameter: Plant Line Value: 35A19
  misc_feature: MA Experiment 20000492 PARAMETER Experiment Name: Zm_Hybrid_Seed_Dev_P Parameter: Tissue Value: Fert Kernel vs. Unfert Floret
acaagaaaccaaaccgtgacgcagcacagccatggggaagcagctctgcgacatgcaccgctcgcgccgccgcgcccgcatcgtcgccgccgccctcctctccgccttcgccgccgccgccgccgcgctcacggtgtacctcgtcttccgtccgctgaagccgcaggcctccgtggtgcgcgtcgccgtgtaccgcatggccacggccgccgggaactcctcggaggggcgggccccgccgccgtacacgctcgcggcgagcgcgcggttcacggcgctgctgcacaacccgagcgaccgcgccgtggtgttctacgacggcctcttcgcctacgtgacgtaccgcggggagatggtggcgccccccgcgccgctgcccggggtggcccagggccgcggcgccgacgtggcgctgtcgccgcatttcggccttcgcggcgcggtgcccgtgccggtgtcggcagacgcggcacaagcgctggagggagactgcgcggcgggccgcgtggagctacgcctcgtcgtcatgggccgggtcaagtacatgagcgggccattcaggaccggatggcgcgggctatacctgcgctgcgatgtcaccgtcggcctcggggtggacgccaccgcgggcgacgacggagccggggacgtgccactgctcgagtaccccaagtgctccgtcgacgcttgagttgatccttgatcggcgcaatgcatgagcgctcagatgatcagattttcagaattctggtggagaataaggaattgggaaaagcatttttctgtgtc

SEQ ID NO: 1336 - protein, 231 aa, Zea mays subsp. mays
  peptide (1)..(231): Ceres Seq. ID no. 13599128
  misc_feature (44)..(217): Pfam Name: Aminotransferase class-III Pfam Description: Aminotransferase class-III
  misc_feature (11)..(227): Homolog of NCBI NO: 22960097 NR Description: hypothetical protein [Rhodobacter sphaeroides]
TRNQTVTQHSHGEAALRHAPLAPPRPHRRRRPPLRLRRRRRRAHGVPRLPSAEAAGLRGARRRVPHGHGRRELLGGAGPAAVHARGERAVHGAAAQPERPRRGVLRRPLRLRDVPRGDGGAPRAAARGGPGPRRRRGAVAAFRPSRRGARAGVGRRGTSAGGRLRGGPRGATPRRHGPGQVHERAIQDRMARAIPALRCHRRPRGGRHRGRRRSRGRATARVPQVLRRRLS

SEQ ID NO: 1337 - protein, 219 aa, Zea mays subsp. mays
  peptide (1)..(219): Ceres Seq. ID no. 13599129
  misc_feature (6)..(206): Homolog of NCBI NO: 38637038 NR Description: harpin-induced protein 1 family (HIN1)-like
  misc_feature (35)..(218): Homolog of NCBI NO: 15227538 NR Description: harpin-induced protein 1 family (HIN1)
  misc_feature (1)..(218): Homolog of NCBI NO: 22326984 NR Description: harpin-induced protein 1 family (HIN1)
  misc_feature (1)..(218): Homolog of NCBI NO: 15229906 NR Description: harpin-induced protein 1 family (HIN1)
  misc_feature (1)..(218): Homolog of NCBI NO: 38344036 NR Description: OJ991214_12.17 [Oryza sativa (japonica
  misc_feature (6)..(217): Homolog of NCBI NO: 28392929 NR Description: putative VAMP protein SEC22 [Arabidopsis thaliana]
  misc_feature (6)..(217): Homolog of NCBI NO: 18399308 NR Description: harpin-induced protein 1 family (HIN1)
  misc_feature (7)..(200): Homolog of NCBI NO: 15240001 NR Description: harpin-induced protein, putative (HIN1)
  misc_feature (13)..(218): Homolog of NCBI NO: 15234173 NR Description: harpin-induced protein 1 family (HIN1)
  misc_feature (2)..(218): Homolog of NCBI NO: 7486355 NR Description: hypothetical protein F3D13.5 - Arabidopsis
MGKQLCDMHRSRRRARIVAAALLSAFAAAAAALTVYLVFRPLKPQASVVRVAVYRMATAAGNSSEGRAPPPYTLAASARFTALLHNPSDRAVVFYDGLFAYVTYRGEMVAPPAPLPGVAQGRGADVALSPHFGLRGAVPVPVSADAAQALEGDCAAGRVELRLVVMGRVKYMSGPFRTGWRGLYLRCDVTVGLGVDATAGDDGAGDVPLLEYPKCSVDA

SEQ ID NO: 1338 - protein, 212 aa, Zea mays subsp. mays
  peptide (1)..(212): Ceres Seq. ID no. 13599130
  misc_feature (1)..(199): Homolog of NCBI NO: 38637038 NR Description: harpin-induced protein 1 family (HIN1)-like
  misc_feature (28)..(211): Homolog of NCBI NO: 15227538 NR Description: harpin-induced protein 1 family (HIN1)
  misc_feature (1)..(211): Homolog of NCBI NO: 22326984 NR Description: harpin-induced protein 1 family (HIN1)
  misc_feature (1)..(211): Homolog of NCBI NO: 15229906 NR Description: harpin-induced protein 1 family (HIN1)
  misc_feature (1)..(211): Homolog of NCBI NO: 38344036 NR Description: OJ991214_12.17 [Oryza sativa (japonica
  misc_feature (1)..(210): Homolog of NCBI NO: 28392929 NR Description: putative VAMP protein SEC22 [Arabidopsis thaliana]
  misc_feature (1)..(210): Homolog of NCBI NO: 18399308 NR Description: harpin-induced protein 1 family (HIN1)
  misc_feature (1)..(193): Homolog of NCBI NO: 15240001 NR Description: harpin-induced protein, putative (HIN1)
  misc_feature (6)..(211): Homolog of NCBI NO: 15234173 NR Description: harpin-induced protein 1 family (HIN1)
  misc_feature (1)..(211): Homolog of NCBI NO: 7486355 NR Description: hypothetical protein F3D13.5 - Arabidopsis
MHRSRRRARIVAAALLSAFAAAAAALTVYLVFRPLKPQASVVRVAVYRMATAAGNSSEGRAPPPYTLAASARFTALLHNPSDRAVVFYDGLFAYVTYRGEMVAPPAPLPGVAQGRGADVALSPHFGLRGAVPVPVSADAAQALEGDCAAGRVELRLVVMGRVKYMSGPFRTGWRGLYLRCDVTVGLGVDATAGDDGAGDVPLLEYPKCSVDA

SEQ ID NO: 1339 - DNA, 769 bp, Zea mays subsp. mays
  misc_feature (1)..(769): Ceres Seq. ID no. 12589616
  misc_feature: MA Experiment ID: 108543 Result: Down-regulated in Transcription
atgcttctttaaattctgctgccattctgctaccgtgggcgtcgtacagcccccgttcccatagaggacagtctgctgccgcaagcctagcttcgtccacctctgaatcaagaaacaaaacaactaggcatggacgaccgcacctacaagggcggcatcaaggcgtactggaagcgccggggctactaccgcatggacggcgacgccgcgcggcgccgccagccgctccccaccgtggagctcggaggtggcgtcgcccaggcccaggcccaggcccagccgccgacgggggatggctcgggccggcgccggtgccgcgggtggcgcgtgcgccgcggccagctggggcggcggctgctccgcgcgctgtcccctcgccggtggctcatgcggctccgcgacgcgtacgtgtccgccatgctgcggctggcctcctcccccgccgtcgggtacggcgccggcgcgcccttttgcgccacggcgacccacggcgcggcggcggcggcggccttcgcgcggccggcgcagctcaaggagtacgacgagaaggtgctggtggagatctacaggtccatactcgcgcgcggcgggcctctcgccggcgcgcctgccgccgccacgctgcggctaccgacggctgtttgagcttgagcggcagaagagacgtgtgttcttcttgcttatttttattcttatgtgtcgcgacttgtactgagttgtaacttgcgtgcgccccacaagctagcgtttcttcttcgttcccaattcg

SEQ ID NO: 1340 - protein, 239 aa, Zea mays subsp. mays
  peptide (1)..(239): Ceres Seq. ID no. 12589617
ASLNSAAILLPWASYSPRSHRGQSAAASLASSTSESRNKTTRHGRPHLQGRHQGVLEAPGLLPHGRRRRAAPPAAPHRGARRWRRPGPGPGPAADGGWLGPAPVPRVARAPRPAGAAAAPRAVPSPVAHAAPRRVRVRHAAAGLLPRRRVRRRRALLRHGDPRRGGGGGLRAAGAAQGVRREGAGGDLQVHTRARRASRRRACRRHAAATDGCLSLSGRRDVCSSCLFLFLCVATCTEL

SEQ ID NO: 1341 - protein, 171 aa, Zea mays subsp. mays
  peptide (1)..(171): Ceres Seq. ID no. 12589618
  misc_feature (60)..(169): Homolog of NCBI NO: 15228820 NR Description: putative protein
  misc_feature (13)..(156): Homolog of NCBI NO: 7487567 NR Description: probable mitochondrial carrier protein
MDDRTYKGGIKAYWKRRGYYRMDGDAARRRQPLPTVELGGGVAQAQAQAQPPTGDGSGRRRCRGWRVRRGQLGRRLLRALSPRRWLMRLRDAYVSAMLRLASSPAVGYGAGAPFCATATHGAAAAAAFARPAQLKEYDEKVLVEIYRSILARGGPLAGAPAAATLRLPTAV

SEQ ID NO: 1342 - protein, 150 aa, Zea mays subsp. mays
  peptide (1)..(150): Ceres Seq. ID no. 12589619
  misc_feature (39)..(148): Homolog of NCBI NO: 15228820 NR Description: putative protein
  misc_feature (1)..(135): Homolog of NCBI NO: 7487567 NR Description: probable mitochondrial carrier protein
MDGDAARRRQPLPTVELGGGVAQAQAQAQPPTGDGSGRRRCRGWRVRRGQLGRRLLRALSPRRWLMRLRDAYVSAMLRLASSPAVGYGAGAPFCATATHGAAAAAAFARPAQLKEYDEKVLVEIYRSILARGGPLAGAPAAATLRLPTAV

SEQ ID NO: 1343 - DNA, 963 bp, Zea mays subsp. mays
  misc_feature (1)..(963): Ceres Seq. ID no. 14305967
  misc_feature: MA Experiment ID: 20000535 Result: Down-regulated in Transcription
  misc_feature: MA Experiment 20000535 PARAMETER Experiment Name: Zm_Hybrid_Seed_Dev_P Parameter: DAP Value: 30 vs. 12
  misc_feature: MA Experiment 20000535 PARAMETER Experiment Name: Zm_Hybrid_Seed_Dev_P Parameter: Organism Value: Zea mays
  misc_feature: MA Experiment 20000535 PARAMETER Experiment Name: Zm_Hybrid_Seed_Dev_P Parameter: Plant Line Value: 35A19
  misc_feature: MA Experiment 20000535 PARAMETER Experiment Name: Zm_Hybrid_Seed_Dev_P Parameter: Tissue Value: Embryo vs. Unfert Floret
atgtcatatacgtactgatacagggcgtgccgactttccagggcgccaattcccctccaagatccgtcttctccggccgctccacccaattcgtcgtcctccccgcctccggatctgaacatgagcgacgcgaccacggcccccgccaccggagccggggaccacgttgtcgatgccgccgcgcacaagccgccggctgccccgtcgccggacatggcaagcatcagacggggcgggagctccgtgaccgagacagtcacccaggcaacgcagcagcagcagtcgcggctggacgacgaccagctggcggagctgcgggagatattccggtccttcgaccgcaacgccgacggcagcctgacgcagctggagctgggctccttgctccggtccctgggcctgacgcccagcgccgaccagctcgacgcgctcatcacccgtgccgacaccaactccaacggcctcatcgagttctccgagtttgtggcgctcgtggcccccgacctcctccaagaccggtccccttactcggaggaccagctccgcaagctcttcgccatcttcgaccgcgacggcaacgggttcatcaccgcggccgagctggcgcactccatggccaagctcggccacgcgctcaccgtcaaggagctcacgggaatgatcaaggaggcagacaccgacggcgatggccgcatcaatttccaggagttctcgcgcgccatcaccgccgccgcatttgacaacatcttctcctgaccgaccgaccgaccgaggccgcaaacaggatgcgttgtgtcgatcatcgattcagttcttggtgattctcagttttcaatttgttcgtcttcttttggggagattaatttaggaagctatagatgaggtgaggtgttcttatgaataacagatcaaacaaaaaaggaatcaatttagggacaaattacatgcatggttgattgtgtt

SEQ ID NO: 1344 - protein, 245 aa, Zea mays subsp. mays
  peptide (1)..(245): Ceres Seq. ID no. 14305968
  misc_feature (21)..(239): Pfam Name: APC basic domain Pfam Description: APC basic domain
VIYVLIQGVPTFQGANSPPRSVFSGRSTQFVVLPASGSEHERRDHGPRHRSRGPRCRCRRAQAAGCPVAGHGKHQTGRELRDRDSHPGNAAAAVAAGRRPAGGAAGDIPVLRPQRRRQPDAAGAGLLAPVPGPDAQRRPARRAHHPCRHQLQRPHRVLRVCGARGPRPPPRPVPLLGGPAPQALRHLRPRRQRVHHRGRAGALHGQARPRAHRQGAHGNDQGGRHRRRWPHQFPGVLARHHRRRI

SEQ ID NO: 1345 - protein, 211 aa, Zea mays subsp. mays
  peptide (1)..(211): Ceres Seq. ID no. 14305969
  misc_feature (176)..(204): Pfam Name: EF hand Pfam Description: EF hand
  misc_feature (57)..(203): Homolog of NCBI NO: 19114252 NR Description: calmodulin [Schizosaccharomyces pombe]
  misc_feature (56)..(208): Homolog of NCBI NO: 225024 NR Description: calmodulin
  misc_feature (56)..(208): Homolog of NCBI NO: 115506 NR Description: Calmodulin
  misc_feature (54)..(207): Homolog of NCBI NO: 34912426 NR Description: P0681B11.17 [Oryza sativa (japonica
  misc_feature (60)..(207): Homolog of NCBI NO: 28393082 NR Description: putative calmodulin [Arabidopsis thaliana]
  misc_feature (60)..(207): Homolog of NCBI NO: 15230858 NR Description: calmodulin, putative [Arabidopsis thaliana]
  misc_feature (59)..(207): Homolog of NCBI NO: 15221797 NR Description: calmodulin, putative [Arabidopsis thaliana]
  misc_feature (56)..(210): Homolog of NCBI NO: 15222618 NR Description: calmodulin, putative [Arabidopsis thaliana]
  misc_feature (55)..(208): Homolog of NCBI NO: 15228441 NR Description: calmodulin, putative [Arabidopsis thaliana]
  misc_feature (1)..(211): Homolog of NCBI NO: 13359053 NR Description: P0436D06.14 [Oryza sativa (japonica
MSDATTAPATGAGDHVVDAAAHKPPAAPSPDMASIRRGGSSVTETVTQATQQQQSRLDDDQLAELREIFRSFDRNADGSLTQLELGSLLRSLGLTPSADQLDALITRADTNSNGLIEFSEFVALVAPDLLQDRSPYSEDQLRKLFAIFDRDGNGFITAAELAHSMAKLGHALTVKELTGMIKEADTDGDGRINFQEFSRAITAAAFDNIFS

SEQ ID NO: 1346 - protein, 180 aa, Zea mays subsp. mays
  peptide (1)..(180): Ceres Seq. ID no. 14305970
  misc_feature (145)..(173): Pfam Name: EF hand Pfam Description: EF hand
  misc_feature (26)..(172): Homolog of NCBI NO: 19114252 NR Description: calmodulin [Schizosaccharomyces pombe]
  misc_feature (25)..(177): Homolog of NCBI NO: 225024 NR Description: calmodulin
  misc_feature (25)..(177): Homolog of NCBI NO: 115506 NR Description: Calmodulin
  misc_feature (23)..(176): Homolog of NCBI NO: 34912426 NR Description: P0681B11.17 [Oryza sativa (japonica
  misc_feature (29)..(176): Homolog of NCBI NO: 28393082 NR Description: putative calmodulin [Arabidopsis thaliana]
  misc_feature (29)..(176): Homolog of NCBI NO: 15230858 NR Description: calmodulin, putative [Arabidopsis thaliana]
  misc_feature (28)..(176): Homolog of NCBI NO: 15221797 NR Description: calmodulin, putative [Arabidopsis thaliana]
  misc_feature (25)..(179): Homolog of NCBI NO: 15222618 NR Description: calmodulin, putative [Arabidopsis thaliana]
  misc_feature (24)..(177): Homolog of NCBI NO: 15228441 NR Description: calmodulin, putative [Arabidopsis thaliana]
  misc_feature (1)..(180): Homolog of NCBI NO: 13359053 NR Description: P0436D06.14 [Oryza sativa (japonica
MASIRRGGSSVTETVTQATQQQQSRLDDDQLAELREIFRSFDRNADGSLTQLELGSLLRSLGLTPSADQLDALITRADTNSNGLIEFSEFVALVAPDLLQDRSPYSEDQLRKLFAIFDRDGNGFITAAELAHSMAKLGHALTVKELTGMIKEADTDGDGRINFQEFSRAITAAAFDNIFS

SEQ ID NO: 1347 - DNA, 1079 bp, Zea mays subsp. mays
  misc_feature (1)..(1079): Ceres Seq. ID no. 13599102
accgcagcccgccccactaactattgactgtcggattccctacccgtcggcgacaatccgctgcccccaatctgcctggtaggtctcgcacctccggtcatggctgccgaagctggcccaatctccaaggtcctcatcgtcatagcaatgcagaaggaggcgacgccgctcgtccacaagttcaatctcgtcgaggcgcccgcccaccaatccacttttcctaaaggtgccccatgggtttggtaccatggcagctacaaaggcctccacattgaccttgtattgcctggaatggatgctgttcttggagtcgacagtgttggtacagtaccagtagctgttgtgactagtttctccattcaaacattgaagccagaccttatcattaatgcgggcactgctggtggcttcaaggccaaaggagcaagcattactgatgtattccttgcatcagatgttgcattccatgacaggaggataccaatacctatttttgacatgtatggaactggagcacgcaaaacttttgcagctcctaatatcttgaaggagctcaatttgaaggttggcaagttgtcgactggggattctctggatatgtgtccccaggataaggagttgatactgcgcaatgatgctacaataaaggacatggagggagctgctgtagcatatgtcgctgacatgttctcgacaccagcgatctttgtgaaagctgtgactgatatcgtggatggggtgaagccaacgtatgaggagtttctgcagaacctgattgccgtgacgacggcactggagctggcagtcaccaaagtggtggatttcatcagcgggaaacgcatctccgatctttgaaagctcgtggtcacgaaatccaacatccccctgctctgatgcacgatgctaggctaggatacaatacaacgttgggtcaatgattttttttggaggtgttctatacgtgaggttttaccccttttgcaatggctcttgatctattcctgaataccgaccagagcagttgtctcttgctaaacagaaggaatgtaaagtgagcaaacatgccattgatcgttgcg

SEQ ID NO: 1348 - protein, 251 aa, Zea mays subsp. mays
  peptide (1)..(251): Ceres Seq. ID no. 13599103
  misc_feature (10)..(235): Pfam Name: Phosphorylase family Pfam Description: Phosphorylase family
  misc_feature (64)..(222): Homolog of NCBI NO: 23037085 NR Description: hypothetical protein [Oenococcus oeni MCW]
  misc_feature (65)..(243): Homolog of NCBI NO: 28897253 NR Description: MTA/SAH nucleosidase [Vibrio parahaemolyticus
  misc_feature (62)..(240): Homolog of NCBI NO: 15642376 NR Description: MTA/SAH nucleosidase [Vibrio cholerae]
  misc_feature (64)..(238): Homolog of NCBI NO: 16079781 NR Description: similar to purine nucleoside phosphorylase
  misc_feature (53)..(251): Homolog of NCBI NO: 7486865 NR Description: hypothetical protein T11I11.80 - Arabidopsis
  misc_feature (4)..(251): Homolog of NCBI NO: 30690140 NR Description: expressed protein [Arabidopsis thaliana]
  misc_feature (7)..(251): Homolog of NCBI NO: 15234791 NR Description: expressed protein [Arabidopsis thaliana]
  misc_feature (1)..(251): Homolog of NCBI NO: 7406708 NR Description: putative ripening-related protein [Vitis vinifera]
  misc_feature (5)..(251): Homolog of NCBI NO: 18087497 NR Description: methylthioadenosine/S-adenosyl homocysteine
  misc_feature (5)..(251): Homolog of NCBI NO: 34897892 NR Description: ESTs C28489(C61317),AU031689(R0560) correspond to region of the predicted gene.~Similar to Arabidopsis thaliana DNA
MAAEAGPISKVLIVIAMQKEATPLVHKFNLVEAPAHQSTFPKGAPWVWYHGSYKGLHIDLVLPGMDAVLGVDSVGTVPVAVVTSFSIQTLKPDLIINAGTAGGFKAKGASITDVFLASDVAFHDRRIPIPIFDMYGTGARKTFAAPNILKELNLKVGKLSTGDSLDMCPQDKELILRNDATIKDMEGAAVAYVADMFSTPAIFVKAVTDIVDGVKPTYEEFLQNLIAVTTALELAVTKVVDFISGKRISDL

SEQ ID NO: 1349 - protein, 235 aa, Zea mays subsp. mays
  peptide (1)..(235): Ceres Seq. ID no. 13599104
  misc_feature (1)..(219): Pfam Name: Phosphorylase family Pfam Description: Phosphorylase family
  misc_feature (48)..(206): Homolog of NCBI NO: 23037085 NR Description: hypothetical protein [Oenococcus oeni MCW]
  misc_feature (49)..(227): Homolog of NCBI NO: 28897253 NR Description: MTA/SAH nucleosidase [Vibrio parahaemolyticus
  misc_feature (46)..(224): Homolog of NCBI NO: 15642376 NR Description: MTA/SAH nucleosidase [Vibrio cholerae]
  misc_feature (48)..(222): Homolog of NCBI NO: 16079781 NR Description: similar to purine nucleoside phosphorylase
  misc_feature (37)..(235): Homolog of NCBI NO: 7486865 NR Description: hypothetical protein T11I11.80 - Arabidopsis
  misc_feature (1)..(235): Homolog of NCBI NO: 30690140 NR Description: expressed protein [Arabidopsis thaliana]
  misc_feature (1)..(235): Homolog of NCBI NO: 15234791 NR Description: expressed protein [Arabidopsis thaliana]
  misc_feature (1)..(235): Homolog of NCBI NO: 7406708 NR Description: putative ripening-related protein [Vitis vinifera]
  misc_feature (1)..(235): Homolog of NCBI NO: 18087497 NR Description: methylthioadenosine/S-adenosyl homocysteine
  misc_feature (1)..(235): Homolog of NCBI NO: 34897892 NR Description: ESTs C28489(C61317),AU031689(R0560) correspond to region of the predicted gene.~Similar to Arabidopsis thaliana DNA
MQKEATPLVHKFNLVEAPAHQSTFPKGAPWVWYHGSYKGLHIDLVLPGMDAVLGVDSVGTVPVAVVTSFSIQTLKPDLIINAGTAGGFKAKGASITDVFLASDVAFHDRRIPIPIFDMYGTGARKTFAAPNILKELNLKVGKLSTGDSLDMCPQDKELILRNDATIKDMEGAAVAYVADMFSTPAIFVKAVTDIVDGVKPTYEEFLQNLIAVTTALELAVTKVVDFISGKRISDL

SEQ ID NO: 1350 - protein, 187 aa, Zea mays subsp. mays
  peptide (1)..(187): Ceres Seq. ID no. 13599105
  misc_feature (1)..(171): Pfam Name: Phosphorylase family Pfam Description: Phosphorylase family
  misc_feature (1)..(174): Homolog of NCBI NO: 16079781 NR Description: similar to purine nucleoside phosphorylase
  misc_feature (1)..(187): Homolog of NCBI NO: 7486865 NR Description: hypothetical protein T11I11.80 - Arabidopsis
  misc_feature (1)..(187): Homolog of NCBI NO: 30690140 NR Description: expressed protein [Arabidopsis thaliana]
  misc_feature (1)..(187): Homolog of NCBI NO: 15234791 NR Description: expressed protein [Arabidopsis thaliana]
  misc_feature (1)..(179): Homolog of NCBI NO: 28897253 NR Description: MTA/SAH nucleosidase [Vibrio parahaemolyticus
  misc_feature (1)..(176): Homolog of NCBI NO: 15642376 NR Description: MTA/SAH nucleosidase [Vibrio cholerae]
  misc_feature (1)..(158): Homolog of NCBI NO: 23037085 NR Description: hypothetical protein [Oenococcus oeni MCW]
  misc_feature (1)..(187): Homolog of NCBI NO: 7406708 NR Description: putative ripening-related protein [Vitis vinifera]
  misc_feature (1)..(187): Homolog of NCBI NO: 18087497 NR Description: methylthioadenosine/S-adenosyl homocysteine
  misc_feature (1)..(187): Homolog of NCBI NO: 34897892 NR Description: ESTs C28489(C61317),AU031689(R0560) correspond to region of the predicted gene.~Similar to Arabidopsis thaliana DNA
MDAVLGVDSVGTVPVAVVTSFSIQTLKPDLIINAGTAGGFKAKGASITDVFLASDVAFHDRRIPIPIFDMYGTGARKTFAAPNILKELNLKVGKLSTGDSLDMCPQDKELILRNDATIKDMEGAAVAYVADMFSTPAIFVKAVTDIVDGVKPTYEEFLQNLIAVTTALELAVTKVVDFISGKRISDL

SEQ ID NO: 1351 - DNA, 998 bp, Zea mays subsp. mays
  misc_feature (1)..(998): Ceres Seq. ID no. 14306078
  misc_feature: MA Experiment ID: 108522 Result: Up-regulated in Transcription
  misc_feature: MA Experiment 108522 PARAMETER Experiment Name: Zm_42deg_Heat_P Parameter: Age (day) Value: 8
  misc_feature: MA Experiment 108522 PARAMETER Experiment Name: Zm_42deg_Heat_P Parameter: Organism Value: Zea mays
  misc_feature: MA Experiment 108522 PARAMETER Experiment Name: Zm_42deg_Heat_P Parameter: Plant Line Value: 35A19
  misc_feature: MA Experiment 108522 PARAMETER Experiment Name: Zm_42deg_Heat_P Parameter: Temperature (deg C) Value: 42 vs. 22
  misc_feature: MA Experiment 108522 PARAMETER Experiment Name: Zm_42deg_Heat_P Parameter: Timepoint (hr) Value: 1
  misc_feature: MA Experiment 108522 PARAMETER Experiment Name: Zm_42deg_Heat_P Parameter: Tissue Value: Aerial
  misc_feature: MA Experiment ID: 108543 Result: Down-regulated in Transcription
  misc_feature: MA Experiment ID: 108687 Result: Up-regulated in Transcription
  misc_feature: MA Experiment 108687 PARAMETER Experiment Name: Zm_Embryos-Flowers__P Parameter: Tissue Value: Embryo vs. Aerial+
  misc_feature: MA Experiment ID: 20000477 Result: Down-regulated in Transcription
  misc_feature: MA Experiment 20000477 PARAMETER Experiment Name: Zm_5mM_SA_P Parameter: Age (day) Value: 10
  misc_feature: MA Experiment 20000477 PARAMETER Experiment Name: Zm_5mM_SA_P Parameter: Organism Value: Zea mays
  misc_feature: MA Experiment 20000477 PARAMETER Experiment Name: Zm_5mM_SA_P Parameter: Plant Line Value: 35A19
  misc_feature: MA Experiment 20000477 PARAMETER Experiment Name: Zm_5mM_SA_P Parameter: Timepoint (hr) Value: 48
  misc_feature: MA Experiment 20000477 PARAMETER Experiment Name: Zm_5mM_SA_P Parameter: Tissue Value: Aerial
  misc_feature: MA Experiment 20000477 PARAMETER Experiment Name: Zm_5mM_SA_P Parameter: Treatment Value: 5mM SA vs. No Treatment
agctcttctcagggaatataccatccacagaaaaaaagcgtcccgcctcatcccgagatcagaatcagaggccacgcggcgatggcgatggcgatgccgatggcagtggcgcgggtgaccagcctcgcctgcgccccccgacaggcgcagcatcgccgccgccatagccttgccccgccgtgcgcctcgggtgcggtggaggtgcgggtctgcacgaaccgcacgtgcgcgcggcagggggggcgcgaggtcctggctgcgctcgcgggcctcgcaccgccggcggtcgacgtggcctcctgcgggtgcctcgggcgctgcggcgccgggcccaacgttgcggcgtccgtccctgggagcaccgcggtgttcggccacgtgggcacggcggcgcgaggcgcgcagctactggagcacctcctcggccccgcggaattcgatgcggccctagggctcaccgcgctggccacgagggagaaggcggaggctgccctcgagaagggaaacgcggacgaagcggaagcccttctcaccgaggtctggactggacgcatacgccagtctgcgattgtgcatgctctctcagttgctggatccgagtttgatgattacacttgtatgtttgcataggttattgggttcaatgcttgtggtggtctgcatttggtgtacatgagcaggtttgttccattgtttcgtgttcaatgtgcgacttgccgacttgtgtgctttgtgtaagtttggcatgaaacatcctgttgaaattacgcaggtctaaggcgagattggaaattggggatatccctggtgcacttggggatgctgaggaagcaataagaatagctcccagatttcctcaggtacttgctttagttagaacctccaaagttattgagtataacctttcttgtacaaccatattcatgttcttacatccatgggagtatattagtgtaaggttgaagaaatacaaatatcagtattggatgtctatgtct

SEQ ID NO: 1352 - protein, 209 aa, Zea mays subsp. mays
  peptide (1)..(209): Ceres Seq. ID no. 14306079
  misc_feature (67)..(179): Homolog of NCBI NO: 15229091 NR Description: hypothetical protein [Arabidopsis thaliana]
  misc_feature (67)..(179): Homolog of NCBI NO: 9294156 NR Description: gb|AAF19538.1~gene_id:MKP6.24~similar to unknown
  misc_feature (34)..(179): Homolog of NCBI NO: 38344917 NR Description: OSJNBa0018M05.8 [Oryza sativa (japonica
SSSQGIYHPQKKSVPPHPEIRIRGHAAMAMAMPMAVARVTSLACAPRQAQHRRRHSLAPPCASGAVEVRVCTNRTCARQGGREVLAALAGLAPPAVDVASCGCLGRCGAGPNVAASVPGSTAVFGHVGTAARGAQLLEHLLGPAEFDAALGLTALATREKAEAALEKGNADEAEALLTEVWTGRIRQSAIVHALSVAGSEFDDYTCMFA

SEQ ID NO: 1353 - protein, 182 aa, Zea mays subsp. mays
  peptide (1)..(182): Ceres Seq. ID no. 14306080
  misc_feature (40)..(152): Homolog of NCBI NO: 15229091 NR Description: hypothetical protein [Arabidopsis thaliana]
  misc_feature (40)..(152): Homolog of NCBI NO: 9294156 NR Description: gb|AAF19538.1~gene_id:MKP6.24~similar to unknown
  misc_feature (7)..(152): Homolog of NCBI NO: 38344917 NR Description: OSJNBa0018M05.8 [Oryza sativa (japonica
MAMAMPMAVARVTSLACAPRQAQHRRRHSLAPPCASGAVEVRVCTNRTCARQGGREVLAALAGLAPPAVDVASCGCLGRCGAGPNVAASVPGSTAVFGHVGTAARGAQLLEHLLGPAEFDAALGLTALATREKAEAALEKGNADEAEALLTEVWTGRIRQSAIVHALSVAGSEFDDYTCMFA

SEQ ID NO: 1354 - protein, 180 aa, Zea mays subsp. mays
  peptide (1)..(180): Ceres Seq. ID no. 14306081
  misc_feature (38)..(150): Homolog of NCBI NO: 15229091 NR Description: hypothetical protein [Arabidopsis thaliana]
  misc_feature (38)..(150): Homolog of NCBI NO: 9294156 NR Description: gb|AAF19538.1~gene_id:MKP6.24~similar to unknown
  misc_feature (5)..(150): Homolog of NCBI NO: 38344917 NR Description: OSJNBa0018M05.8 [Oryza sativa (japonica
MAMPMAVARVTSLACAPRQAQHRRRHSLAPPCASGAVEVRVCTNRTCARQGGREVLAALAGLAPPAVDVASCGCLGRCGAGPNVAASVPGSTAVFGHVGTAARGAQLLEHLLGPAEFDAALGLTALATREKAEAALEKGNADEAEALLTEVWTGRIRQSAIVHALSVAGSEFDDYTCMFA

SEQ ID NO: 1355 - DNA, 978 bp, Zea mays subsp. mays
  misc_feature (1)..(978): Ceres Seq. ID no. 15175941
atcgcaaaaaccacccaaggccaagtcgcatcgcagcagccaggcagatcgatcaacaccttaaaatcgagcgagctaagatgtgcccaatcaagagggagacgacgagcgccgagtccggctcgccgtgcagtagctccacctccacctcgtcgtcgtcggaacaccaccagaccgcgtgggcgtcgccgccgaagaagcggccggcggggcgcaccaagttccgggagacgcggcacccggtgttccgcggcgtgcggcgccggggccgcgccgggcggtgggtctgcgaggtgcgcgtgcccgggaggcgcggctgcaggctctggctcggcaccttcgacaccgccgaggccgcggcccgcgcgcacgacgccgcgatgctcgccgtcgccgccggcgccgcgcgcctcaacttcgcggactcggcgtggctgctcgccgtgccgacggcctcgtacgccagcttcgccgacgtccgccgcgccgtggcggaggccgtggagagcttcctgcgccgccgcgaggaggaggagggggacgcgctctcggccgcgtcctcgacgtcgcccaacgacaaggacggcgacgagtcctcctcggccaccaccaccgacgacgactcgccgttcgagctggacatgttcggtggcatgagctgggacctgtactacgcgaacttggcgcaggcgatgctcgtggagccaccgcccattgtccccgcgttatgcgacgacggcgtggcttccgaattgccgctctggagctactaggctaggactagtggtcgctgtactttcggtttttaccttttctcgttctcgtcgtgtcctgtgccacaatttggtaactgcacaaaggttactgctgcttctattaacgaaacagagcagattgggaaaaaaacagagcatggccgttgactttgtaatggtagcaaaaagtcttgagcttattattattatagtgttgactctc

SEQ ID NO: 1356 - protein, 256 aa, Zea mays subsp. mays
  peptide (1)..(256): Ceres Seq. ID no. 15175942
  misc_feature (79)..(145): Pfam Name: AP2 domain Pfam Description: AP2 domain
  misc_feature (38)..(201): Homolog of NCBI NO: 12581492 NR Description: CRT/DRE binding factor [Oryza sativa]
  misc_feature (41)..(213): Homolog of NCBI NO: 25991254 NR Description: DREB-like protein [Zea mays]
  misc_feature (39)..(217): Homolog of NCBI NO: 12658321 NR Description: CBF3-like protein BCBF3 [Hordeum vulgare subsp.
  misc_feature (39)..(217): Homolog of NCBI NO: 12581489 NR Description: CRT/DRE-binding factor [Hordeum vulgare subsp.
  misc_feature (56)..(256): Homolog of NCBI NO: 32480955 NR Description: Dre-binding protein [Oryza sativa]
  misc_feature (56)..(256): Homolog of NCBI NO: 22594973 NR Description: putative DRE-binding protein 1B [Oryza sativa]
  misc_feature (56)..(256): Homolog of NCBI NO: 27228310 NR Description: putative DRE-binding protein 1B
  misc_feature (27)..(256): Homolog of NCBI NO: 33637698 NR Description: transcription factor RCBF3 [Oryza sativa]
  misc_feature (27)..(256): Homolog of NCBI NO: 33321848 NR Description: apetala2 domain-containing CBF1-like protein
  misc_feature (27)..(256): Homolog of NCBI NO: 22594969 NR Description: DRE-binding protein 1A [Oryza sativa]
RKNHPRPSRIAAARQIDQHLKIERAKMCPIKRETTSAESGSPCSSSTSTSSSSEHHQTAWASPPKKRPAGRTKFRETRHPVFRGVRRRGRAGRWVCEVRVPGRRGCRLWLGTFDTAEAAARAHDAAMLAVAAGAARLNFADSAWLLAVPTASYASFADVRRAVAEAVESFLRRREEEEGDALSAASSTSPNDKDGDESSSATTTDDDSPFELDMFGGMSWDLYYANLAQAMLVEPPPIVPALCDDGVASELPLWSY

SEQ ID NO: 1357 - protein, 230 aa, Zea mays subsp. mays
  peptide (1)..(230): Ceres Seq. ID no. 15175943
  misc_feature (53)..(119): Pfam Name: AP2 domain Pfam Description: AP2 domain
  misc_feature (12)..(175): Homolog of NCBI NO: 12581492 NR Description: CRT/DRE binding factor [Oryza sativa]
  misc_feature (15)..(187): Homolog of NCBI NO: 25991254 NR Description: DREB-like protein [Zea mays]
  misc_feature (13)..(191): Homolog of NCBI NO: 12658321 NR Description: CBF3-like protein BCBF3 [Hordeum vulgare subsp.
  misc_feature (13)..(191): Homolog of NCBI NO: 12581489 NR Description: CRT/DRE-binding factor [Hordeum vulgare subsp.
  misc_feature (30)..(230): Homolog of NCBI NO: 32480955 NR Description: Dre-binding protein [Oryza sativa]
  misc_feature (30)..(230): Homolog of NCBI NO: 22594973 NR Description: putative DRE-binding protein 1B [Oryza sativa]
  misc_feature (30)..(230): Homolog of NCBI NO: 27228310 NR Description: putative DRE-binding protein 1B
  misc_feature (1)..(230): Homolog of NCBI NO: 33637698 NR Description: transcription factor RCBF3 [Oryza sativa]
  misc_feature (1)..(230): Homolog of NCBI NO: 33321848 NR Description: apetala2 domain-containing CBF1-like protein
  misc_feature (1)..(230): Homolog of NCBI NO: 22594969 NR Description: DRE-binding protein 1A [Oryza sativa]
MCPIKRETTSAESGSPCSSSTSTSSSSEHHQTAWASPPKKRPAGRTKFRETRHPVFRGVRRRGRAGRWVCEVRVPGRRGCRLWLGTFDTAEAAARAHDAAMLAVAAGAARLNFADSAWLLAVPTASYASFADVRRAVAEAVESFLRRREEEEGDALSAASSTSPNDKDGDESSSATTTDDDSPFELDMFGGMSWDLYYANLAQAMLVEPPPIVPALCDDGVASELPLWSY

SEQ ID NO: 1358 - protein, 218 aa, Zea mays subsp. mays
  peptide (1)..(218): Ceres Seq. ID no. 15175944
  misc_feature (35)..(191): Pfam Name: Dystroglycan (Dystrophin-associated glycoprotein 1) Pfam Description: Dystroglycan (Dystrophin-associated
  misc_feature (14)..(204): Homolog of NCBI NO: 25989119 NR Description: unknown [Streptomyces aureofaciens]
  misc_feature (2)..(213): Homolog of NCBI NO: 15807127 NR Description: conserved hypothetical protein [Deinococcus
  misc_feature (76)..(218): Homolog of NCBI NO: 7248459 NR Description: arabinogalactan protein [Zea mays]
  misc_feature (34)..(210): Homolog of NCBI NO: 25143299 NR Description: pre-mRNA splicing SR protein related (68.2 kD)
  misc_feature (32)..(218): Homolog of NCBI NO: 25989119 NR Description: unknown [Streptomyces aureofaciens]
  misc_feature (16)..(212): Homolog of NCBI NO: 25143299 NR Description: pre-mRNA splicing SR protein related (68.2 kD)
IAKTTQGQVASQQPGRSINTLKSSELRCAQSRGRRRAPSPARRAVAPPPPRRRRNTTRPRGRRRRRSGRRGAPSSGRRGTRCSAACGAGAAPGGGSARCACPGGAAAGSGSAPSTPPRPRPARTTPRCSPSPPAPRASTSRTRRGCSPCRRPRTPASPTSAAPWRRPWRASCAAARRRRGTRSRPRPRRRPTTRTATSPPRPPPPTTTRRSSWTCSVA

SEQ ID NO: 1359 - DNA, 635 bp, Zea mays subsp. mays
  misc_feature (1)..(635): Ceres Seq. ID no. 12634810
ccacacttccagacttggtaaccccaacggctacaagagaagagaagagcagcagagcagagcaggcagcacgcgaaagagagagagagacaactcgggcgcgatggacgtgtacatcgcggaggagtacgtggcccagcggcgcgccgagaggagggccgcgcgcgtcgccgcggctgcacgctgcggagaggagaaggcgcgggcggacagcgagcagaagcggcggtggacggaggacggcaagcggcctgccgacggcggcgatgccggcggtggcgccgccgccgccgcctggctgcaggcaggggaggacgccgttctcagctacttgtcggcttaggacacgtgcgtgcggtacgggcggacgtgtctccctgcgtgcgtacgtccagctaggcaatgcaaatagacacacatacacacacacatgcgccaatgccatgcacaatttgcgtggattgcgtttggtggagccaagtcagtcgcgtgcatgtggttgctgggcgataccagttcagctcatccacccttttttttttttttgccatggccaattggccgccaccgcgccacgtctcgcggatatagaagttcatgtctggcagtaaaaataaactggcctcgcttgatct

SEQ ID NO: 1360 - protein, 202 aa, Zea mays subsp. mays
  peptide (1)..(202): Ceres Seq. ID no. 12634811
TLPDLVTPTATREEKSSRAEQAARERERETTRARWTCTSRRSTWPSGAPRGGPRASPRLHAAERRRRGRTASRSGGGRRTASGLPTAAMPAVAPPPPPGCRQGRTPFSATCRLRTRACGTGGRVSLRAYVQLGNANRHTYTHTCANAMHNLRGLRLVEPSQSRACGCWAIPVQLIHPFFFFCHGQLAATAPRLADIEVHVWQ

SEQ ID NO: 1361 - protein, 114 aa, Zea mays subsp. mays
  peptide (1)..(114): Ceres Seq. ID no. 12634812
MPAVAPPPPPGCRQGRTPFSATCRLRTRACGTGGRVSLRAYVQLGNANRHTYTHTCANAMHNLRGLRLVEPSQSRACGCWAIPVQLIHPFFFFCHGQLAATAPRLADIEVHVWQ

SEQ ID NO: 1362 - protein, 113 aa, Zea mays subsp. mays
  peptide (1)..(113): Ceres Seq. ID no. 12634813
  misc_feature (35)..(113): Homolog of NCBI NO: 22758346 NR Description: hypothetical protein [Oryza sativa (japonica
  misc_feature (34)..(113): Homolog of NCBI NO: 37535828 NR Description: hypothetical protein [Oryza sativa (japonica
HTSRLGNPNGYKRREEQQSRAGSTRKRERDNSGAMDVYIAEEYVAQRRAERRAARVAAAARCGEEKARADSEQKRRWTEDGKRPADGGDAGGGAAAAAWLQAGEDAVLSYLSA

SEQ ID NO: 1363 - DNA, 735 bp, Zea mays subsp. mays
  misc_feature (1)..(735): Ceres Seq. ID no. 14306110
agtggtgcccacagctaaagccttgtgcaaaattatcattaagctgtcatcaatcatcatggctgccattacggcaggtctgctggtactcctcgctgctgccgtcgccgctccggcgcacgccacggactacacggtcggcgactcgtccgggtggagcagcggcgtggactacgccacctgggcgagcggcaagaccttcgctgctggggacaacctagtgttccagtacagcgcgatgcacacggtggtggaggtgagctccgcggactacggcgcgtgctcggccagcaactccatccagtcctacagcgaccagaacaccaagatcgcgctcacagcgcccggcacgcgctacttcatctgcggcaccccgggccactgcggcaacggcatgaagctcgccgtcacggtcgccgctgggaccgccaccaccaccccggcgtcatccccgcccgccgctgactcgcctccagagacagccacgccgtccgggtctacgcccacggcaacgacgtcgccgtcggcgcccacgacgaagcccacctcgagcagcactggcgctgcctgcggtggggaggcccggctcgctatgggcgttttggcctgggccgcgggcctcgccgggctcgccctgatgggttaggcaagaggcagtgctgtttccgttccatgcttttcctgttgcaggcttttgtggcccgttgtgtttaatctgaattcacgtctatggcc

SEQ ID NO: 1364 - protein, 214 aa, Zea mays subsp. mays
  peptide (1)..(214): Ceres Seq. ID no. 14306111
  misc_feature (52)..(132): Pfam Name: Plastocyanin-like domain Pfam Description: Plastocyanin-like domain
  misc_feature (27)..(184): Homolog of NCBI NO: 15225223 NR Description: uclacyanin I [Arabidopsis thaliana]
  misc_feature (22)..(198): Homolog of NCBI NO: 15232287 NR Description: plastocyanin-like domain containing protein
  misc_feature (20)..(186): Homolog of NCBI NO: 2493318 NR Description: Blue copper protein precursor
  misc_feature (20)..(189): Homolog of NCBI NO: 15232289 NR Description: uclacyanin 3 [Arabidopsis thaliana]
  misc_feature (15)..(200): Homolog of NCBI NO: 21554060 NR Description: phytocyanin [Arabidopsis thaliana]
  misc_feature (15)..(200): Homolog of NCBI NO: 15224960 NR Description: uclacyanin II [Arabidopsis thaliana]
  misc_feature (15)..(200): Homolog of NCBI NO: 25453522 NR Description: blue copper-binding protein II [imported] -
  misc_feature (15)..(200): Homolog of NCBI NO: 25453521 NR Description: blue copper-binding protein II [imported] -
  misc_feature (20)..(205): Homolog of NCBI NO: 38346158 NR Description: OSJNBa0079A21.5 [Oryza sativa (japonica
  misc_feature (25)..(214): Homolog of NCBI NO: 14140127 NR Description: uclacyanin 3-like protein [Oryza sativa]
VVPTAKALCKIIIKLSSIIMAAITAGLLVLLAAAVAAPAHATDYTVGDSSGWSSGVDYATWASGKTFAAGDNLVFQYSAMHTVVEVSSADYGACSASNSIQSYSDQNTKIALTAPGTRYFICGTPGHCGNGMKLAVTVAAGTATTTPASSPPAADSPPETATPSGSTPTATTSPSAPTTKPTSSSTGAACGGEARLAMGVLAWAAGLAGLALMG

SEQ ID NO: 1365 - protein, 195 aa, Zea mays subsp. mays
  peptide (1)..(195): Ceres Seq. ID no. 14306112
  misc_feature (33)..(113): Pfam Name: Plastocyanin-like domain Pfam Description: Plastocyanin-like domain
  misc_feature (8)..(165): Homolog of NCBI NO: 15225223 NR Description: uclacyanin I [Arabidopsis thaliana]
  misc_feature (3)..(179): Homolog of NCBI NO: 15232287 NR Description: plastocyanin-like domain containing protein
  misc_feature (1)..(167): Homolog of NCBI NO: 2493318 NR Description: Blue copper protein precursor
  misc_feature (1)..(170): Homolog of NCBI NO: 15232289 NR Description: uclacyanin 3 [Arabidopsis thaliana]
  misc_feature (1)..(181): Homolog of NCBI NO: 21554060 NR Description: phytocyanin [Arabidopsis thaliana]
  misc_feature (1)..(181): Homolog of NCBI NO: 15224960 NR Description: uclacyanin II [Arabidopsis thaliana]
  misc_feature (1)..(181): Homolog of NCBI NO: 25453522 NR Description: blue copper-binding protein II [imported] -
  misc_feature (1)..(181): Homolog of NCBI NO: 25453521 NR Description: blue copper-binding protein II [imported] -
  misc_feature (1)..(186): Homolog of NCBI NO: 38346158 NR Description: OSJNBa0079A21.5 [Oryza sativa (japonica
  misc_feature (6)..(195): Homolog of NCBI NO: 14140127 NR Description: uclacyanin 3-like protein [Oryza sativa]
MAAITAGLLVLLAAAVAAPAHATDYTVGDSSGWSSGVDYATWASGKTFAAGDNLVFQYSAMHTVVEVSSADYGACSASNSIQSYSDQNTKIALTAPGTRYFICGTPGHCGNGMKLAVTVAAGTATTTPASSPPAADSPPETATPSGSTPTATTSPSAPTTKPTSSSTGAACGGEARLAMGVLAWAAGLAGLALMG

SEQ ID NO: 1366 - protein, 135 aa, Zea mays subsp. mays
  peptide (1)..(135): Ceres Seq. ID no. 14306113
  misc_feature (1)..(53): Pfam Name: Plastocyanin-like domain Pfam Description: Plastocyanin-like domain
  misc_feature (1)..(105): Homolog of NCBI NO: 15225223 NR Description: uclacyanin I [Arabidopsis thaliana]
  misc_feature (1)..(119): Homolog of NCBI NO: 15232287 NR Description: plastocyanin-like domain containing protein
  misc_feature (1)..(107): Homolog of NCBI NO: 2493318 NR Description: Blue copper protein precursor
  misc_feature (1)..(110): Homolog of NCBI NO: 15232289 NR Description: uclacyanin 3 [Arabidopsis thaliana]
  misc_feature (1)..(121): Homolog of NCBI NO: 21554060 NR Description: phytocyanin [Arabidopsis thaliana]
  misc_feature (1)..(121): Homolog of NCBI NO: 15224960 NR Description: uclacyanin II [Arabidopsis thaliana]
  misc_feature (1)..(121): Homolog of NCBI NO: 25453522 NR Description: blue copper-binding protein II [imported] -
  misc_feature (1)..(121): Homolog of NCBI NO: 25453521 NR Description: blue copper-binding protein II [imported] -
  misc_feature (1)..(126): Homolog of NCBI NO: 38346158 NR Description: OSJNBa0079A21.5 [Oryza sativa (japonica
  misc_feature (1)..(135): Homolog of NCBI NO: 14140127 NR Description: uclacyanin 3-like protein [Oryza sativa]
MHTVVEVSSADYGACSASNSIQSYSDQNTKIALTAPGTRYFICGTPGHCGNGMKLAVTVAAGTATTTPASSPPAADSPPETATPSGSTPTATTSPSAPTTKPTSSSTGAACGGEARLAMGVLAWAAGLAGLALMG

SEQ ID NO: 1367 - DNA, 930 bp, Zea mays subsp. mays
  misc_feature (1)..(930): Ceres Seq. ID no. 15178954
accgcttcaccatccccgccaggcccaccaccaccatggcctctccttcccccgcccgcgcctccggccggcgcgtgccgcccccgtgctgcacgaccgacgagaccctcgcgctcgcgcgggcctacaccgcgcgccgcctcgccgtcggccgtgagcacctgacctccgctgactgggccgccgtcgccgcggccgctccgtccaagacggccaggcagtgccgccacaaggtcgagaagctccgccgacgcctccggtccaaccgccgccgcccgtgcccgctcctcgacgccatcgacctcctcgacgtcccttccccgcccttcttctccaagtcccagtcccgatccacgtcccggtcctcgtcgccgccgccgccggcggcggcgatctcttcgccgtctcccccttcccctcccgcatccccgcccagaaagaggcggcgggacgatgccggggacgaggacggtgtgagcgatgtggtgggggctctgagggccatcggagagggtttcctgcgagcggaggagaggaggatggaggccgcccgggagacgcagaggatgcggatggagatggcgcttcggcaccttgatgcacagaggaggctcatggacgcgcttgtcggccgcatcgtcgacgccttggactgaagtggtgtcacaaagatgtctcatcgaggtttcttgcttgtcctcgttgcatgctagcttgcgagtttaggagtttcttagcgctgtttatgtgtagtagctgtgatggatctgtgatgtagttgaagcggacaagccttagtgatttcccacccttgtatttgcttaaaaggggagtttcttatgaagaagaggttgcacgtctgttgcctatgcctacttgcttctttgctctcatgtatcatgctatttaatttgtttgattttgtgttcc

SEQ ID NO: 1368 - protein, 217 aa, Zea mays subsp. mays
  peptide (1)..(217): Ceres Seq. ID no. 15178955
  misc_feature (105)..(144): Homolog of NCBI NO: 100210 NR Description: extensin precursor - tomato
  misc_feature (6)..(168): Homolog of NCBI NO: 37536908 NR Description: hypothetical protein [Oryza sativa (japonica
  misc_feature (149)..(214): Homolog of NCBI NO: 15224948 NR Description: expressed protein [Arabidopsis thaliana]
  misc_feature (3)..(95): Homolog of NCBI NO: 15224948 NR Description: expressed protein [Arabidopsis thaliana]
  misc_feature (105)..(170): Homolog of NCBI NO: 20138131 NR Description: Vegetative cell wall protein gp1 precursor
  misc_feature (142)..(217): Homolog of NCBI NO: 15230214 NR Description: proline-rich protein family [Arabidopsis
  misc_feature (3)..(160): Homolog of NCBI NO: 15230214 NR Description: proline-rich protein family [Arabidopsis
  misc_feature (154)..(216): Homolog of NCBI NO: 26451533 NR Description: unknown protein [Arabidopsis thaliana]
  misc_feature (18)..(91): Homolog of NCBI NO: 26451533 NR Description: unknown protein [Arabidopsis thaliana]
  misc_feature (12)..(217): Homolog of NCBI NO: 21741318 NR Description: OSJNBb0103I08.19 [Oryza sativa (japonica
RFTIPARPTTTMASPSPARASGRRVPPPCCTTDETLALARAYTARRLAVGREHLTSADWAAVAAAAPSKTARQCRHKVEKLRRRLRSNRRRPCPLLDAIDLLDVPSPPFFSKSQSRSTSRSSSPPPPAAAISSPSPPSPPASPPRKRRRDDAGDEDGVSDVVGALRAIGEGFLRAEERRMEAARETQRMRMEMALRHLDAQRRLMDALVGRIVDALD

SEQ ID NO: 1369 - protein, 206 aa, Zea mays subsp. mays
  peptide (1)..(206): Ceres Seq. ID no. 15178956
  misc_feature (94)..(133): Homolog of NCBI NO: 100210 NR Description: extensin precursor - tomato
  misc_feature (1)..(157): Homolog of NCBI NO: 37536908 NR Description: hypothetical protein [Oryza sativa (japonica
  misc_feature (138)..(203): Homolog of NCBI NO: 15224948 NR Description: expressed protein [Arabidopsis thaliana]
  misc_feature (1)..(84): Homolog of NCBI NO: 15224948 NR Description: expressed protein [Arabidopsis thaliana]
  misc_feature (94)..(159): Homolog of NCBI NO: 20138131 NR Description: Vegetative cell wall protein gp1 precursor
  misc_feature (131)..(206): Homolog of NCBI NO: 15230214 NR Description: proline-rich protein family [Arabidopsis
  misc_feature (1)..(149): Homolog of NCBI NO: 15230214 NR Description: proline-rich protein family [Arabidopsis
  misc_feature (143)..(205): Homolog of NCBI NO: 26451533 NR Description: unknown protein [Arabidopsis thaliana]
  misc_feature (7)..(80): Homolog of NCBI NO: 26451533 NR Description: unknown protein [Arabidopsis thaliana]
  misc_feature (1)..(206): Homolog of NCBI NO: 21741318 NR Description: OSJNBb0103I08.19 [Oryza sativa (japonica
MASPSPARASGRRVPPPCCTTDETLALARAYTARRLAVGREHLTSADWAAVAAAAPSKTARQCRHKVEKLRRRLRSNRRRPCPLLDAIDLLDVPSPPFFSKSQSRSTSRSSSPPPPAAAISSPSPPSPPASPPRKRRRDDAGDEDGVSDVVGALRAIGEGFLRAEERRMEAARETQRMRMEMALRHLDAQRRLMDALVGRIVDALD

SEQ ID NO: 1370 - DNA, 623 bp, Zea mays subsp. mays
  misc_feature (1)..(623): Ceres Seq. ID no. 14306148
acacgcaaacaaaaaaatggctcacctcttcagagagctgtctctgggtcactccaagcgagagacgacgccgccgccaccgtcgatggcatccacgattccctccgatctaccaccgtctccactcggacaactcgccgtccagttctccgaatccgacctccgcctcatttcctacgagatcttcgtcgccgcatgccgtagcgccaccgggaagcctctctcatccgccgtctcgtcactctccgttgctaatccggactctccgagcaacggcgcctctcccgcttctccagctgcccagcgttctctgaccgcagccgccgcgagcaagatgaagaaggccttggggatgaagtcgttgtcatccttatcgcctggatctaccaagagccctggctcgggctctggttcgggctctggctcgggtggtaagtcgaagcgccccactactgtcggtgagctgatgcggatccaaatgcgagtatcggagtccgtcgattcgcgcgttcgtagagctttccttaggatcgctgctagtcaggttagctcagttttttttttttttttttttttttgaattaaaatgttaaatttaaactcaaaaaaaaaaagacctttac

SEQ ID NO: 1371 - protein, 192 aa, Zea mays subsp. mays
  peptide (1)..(192): Ceres Seq. ID no. 14306149
  misc_feature (48)..(182): Pfam Name: Protein of unknown function (DUF810) Pfam Description: Protein of unknown function (DUF810)
  misc_feature (41)..(182): Homolog of NCBI NO: 37535276 NR Description: hypothetical protein [Oryza sativa (japonica
  misc_feature (6)..(182): Homolog of NCBI NO: 40253418 NR Description: hypothetical protein [Oryza sativa (japonica
  misc_feature (39)..(182): Homolog of NCBI NO: 25411952 NR Description: hypothetical protein At2g20010 [imported] -
  misc_feature (6)..(182): Homolog of NCBI NO: 15225193 NR Description: expressed protein [Arabidopsis thaliana]
HANKKMAHLFRELSLGHSKRETTPPPPSMASTIPSDLPPSPLGQLAVQFSESDLRLISYEIFVAACRSATGKPLSSAVSSLSVANPDSPSNGASPASPAAQRSLTAAAASKMKKALGMKSLSSLSPGSTKSPGSGSGSGSGSGGKSKRPTTVGELMRIQMRVSESVDSRVRRAFLRIAASQVSSVFFFFFFF

SEQ ID NO: 1372 - protein, 187 aa, Zea mays subsp. mays
  peptide (1)..(187): Ceres Seq. ID no. 14306150
  misc_feature (43)..(177): Pfam Name: Protein of unknown function (DUF810) Pfam Description: Protein of unknown function (DUF810)
  misc_feature (36)..(177): Homolog of NCBI NO: 37535276 NR Description: hypothetical protein [Oryza sativa (japonica
  misc_feature (1)..(177): Homolog of NCBI NO: 40253418 NR Description: hypothetical protein [Oryza sativa (japonica
  misc_feature (34)..(177): Homolog of NCBI NO: 25411952 NR Description: hypothetical protein At2g20010 [imported] -
  misc_feature (1)..(177): Homolog of NCBI NO: 15225193 NR Description: expressed protein [Arabidopsis thaliana]
MAHLFRELSLGHSKRETTPPPPSMASTIPSDLPPSPLGQLAVQFSESDLRLISYEIFVAACRSATGKPLSSAVSSLSVANPDSPSNGASPASPAAQRSLTAAAASKMKKALGMKSLSSLSPGSTKSPGSGSGSGSGSGGKSKRPTTVGELMRIQMRVSESVDSRVRRAFLRIAASQVSSVFFFFFFF

SEQ ID NO: 1373 - protein, 164 aa, Zea mays subsp. mays
  peptide (1)..(164): Ceres Seq. ID no. 14306151
  misc_feature (20)..(154): Pfam Name: Protein of unknown function (DUF810) Pfam Description: Protein of unknown function (DUF810)
  misc_feature (13)..(154): Homolog of NCBI NO: 37535276 NR Description: hypothetical protein [Oryza sativa (japonica
  misc_feature (1)..(154): Homolog of NCBI NO: 40253418 NR Description: hypothetical protein [Oryza sativa (japonica
  misc_feature (11)..(154): Homolog of NCBI NO: 25411952 NR Description: hypothetical protein At2g20010 [imported] -
  misc_feature (1)..(154): Homolog of NCBI NO: 15225193 NR Description: expressed protein [Arabidopsis thaliana]
MASTIPSDLPPSPLGQLAVQFSESDLRLISYEIFVAACRSATGKPLSSAVSSLSVANPDSPSNGASPASPAAQRSLTAAAASKMKKALGMKSLSSLSPGSTKSPGSGSGSGSGSGGKSKRPTTVGELMRIQMRVSESVDSRVRRAFLRIAASQVSSVFFFFFFF

SEQ ID NO: 1374 - DNA, 1018 bp, Zea mays subsp. mays
  misc_feature (1)..(1018): Ceres Seq. ID no. 15227057
acacagacaacaacgagttaacgaaagccttttatccaagctcagggaagggaagctcacagtttcgttggatccaatcttttatccaagctcagcgatggcttctcgtcagcagcatcctactagctaccacgccggcgagaccaaggcccgtgccgaggagaagacgggtcaagtgatgggggcgacgcaggagaaagggagggaggccaagcacaaggcgtccgacgcctccgaccgcgccatgggaatgggccacgacgccatggaggcgaccagggagaaggcgcgcgccgccgcggaccgaaccatggggatgggccacgacgccggggaggcggccaaggacagggcgtaccgggccaaggacgcggcctccggtgccgctggccgcgccagggacactgcgtccgacgcggccggcgctgccggggaccgcgcccgcgacggcgcgcagcagaccgggagctacgtcgcgcagacggccgaggccgccaggcagaaggcggccggcgccgcgctgtacgccaaggacaccgtggtggccggcaaggacaagaccggcgccctcctgcagcaggcaggggagaaggtgatgagcacggccgtgggggccaaggacacggttgtcagcacggccgtgggggccaaggacacggttgtcagcaccgccgtgggagccaaggacgcgatgatgaactcgctcggcatggccggcgaggacaaggacggcaccaccaccaccgacgccggcaaggacaccagcacccgcaagcctggcagggactattagaggacacggcagccaaacttctcagtgtttctgttccagaagtttctgatcccatcatttaggttcaaaagtttctcatttcatttcaaactttcagtgtttggtgcatgctgtaaactctcttcaggacgggtcgtttgacatttgtgtcgactgaagcctccgcgctttcgactcaacgatgtatatgtaataataaagtcgcaaagctgttgttttattttc

SEQ ID NO: 1375 - protein, 263 aa, Zea mays subsp. mays
  peptide (1)..(263): Ceres Seq. ID no. 15227058
  misc_feature (134)..(207): Pfam Name: Late embryogenesis abundant protein Pfam Description: Late embryogenesis abundant protein
  misc_feature (33)..(248): Homolog of NCBI NO: 7387828 NR Description: Late embryogenesis abundant protein, group 3
  misc_feature (33)..(227): Homolog of NCBI NO: 25989707 NR Description: LEA3 protein [Triticum aestivum]
  misc_feature (33)..(248): Homolog of NCBI NO: 126081 NR Description: ABA-inducible protein PHV A1
  misc_feature (33)..(212): Homolog of NCBI NO: 7387829 NR Description: Late embryogenesis abundant protein, group 3
  misc_feature (33)..(229): Homolog of NCBI NO: 4105441 NR Description: group 3 LEA protein [Oryza sativa]
  misc_feature (33)..(229): Homolog of NCBI NO: 7489569 NR Description: protein LEA type 1 - rice
  misc_feature (33)..(229): Homolog of NCBI NO: 7489493 NR Description: LEA protein - rice
  misc_feature (37)..(263): Homolog of NCBI NO: 1076757 NR Description: WSI18 protein - rice
  misc_feature (33)..(241): Homolog of NCBI NO: 1076757 NR Description: WSI18 protein - rice
  misc_feature (33)..(241): Homolog of NCBI NO: 34910364 NR Description: WSI18 protein [Oryza sativa (japonica
HRQQRVNESLLSKLREGKLTVSLDPIFYPSSAMASRQQHPTSYHAGETKARAEEKTGQVMGATQEKGREAKHKASDASDRAMGMGHDAMEATREKARAAADRTMGMGHDAGEAAKDRAYRAKDAASGAAGRARDTASDAAGAAGDRARDGAQQTGSYVAQTAEAARQKAAGAALYAKDTVVAGKDKTGALLQQAGEKVMSTAVGAKDTVVSTAVGAKDTVVSTAVGAKDAMMNSLGMAGEDKDGTTTTDAGKDTSTRKPGRDY

SEQ ID NO: 1376 - protein, 231 aa, Zea mays subsp. mays
  peptide (1)..(231): Ceres Seq. ID no. 15227059
  misc_feature (102)..(175): Pfam Name: Late embryogenesis abundant protein Pfam Description: Late embryogenesis abundant protein
  misc_feature (1)..(216): Homolog of NCBI NO: 7387828 NR Description: Late embryogenesis abundant protein, group 3
  misc_feature (1)..(195): Homolog of NCBI NO: 25989707 NR Description: LEA3 protein [Triticum aestivum]
  misc_feature (1)..(216): Homolog of NCBI NO: 126081 NR Description: ABA-inducible protein PHV A1
  misc_feature (1)..(180): Homolog of NCBI NO: 7387829 NR Description: Late embryogenesis abundant protein, group 3
  misc_feature (1)..(197): Homolog of NCBI NO: 4105441 NR Description: group 3 LEA protein [Oryza sativa]
  misc_feature (1)..(197): Homolog of NCBI NO: 7489569 NR Description: protein LEA type 1 - rice
  misc_feature (1)..(197): Homolog of NCBI NO: 7489493 NR Description: LEA protein - rice
  misc_feature (5)..(231): Homolog of NCBI NO: 1076757 NR Description: WSI18 protein - rice
  misc_feature (1)..(209): Homolog of NCBI NO: 1076757 NR Description: WSI18 protein - rice
  misc_feature (1)..(209): Homolog of NCBI NO: 34910364 NR Description: WSI18 protein [Oryza sativa (japonica
MASRQQHPTSYHAGETKARAEEKTGQVMGATQEKGREAKHKASDASDRAMGMGHDAMEATREKARAAADRTMGMGHDAGEAAKDRAYRAKDAASGAAGRARDTASDAAGAAGDRARDGAQQTGSYVAQTAEAARQKAAGAALYAKDTVVAGKDKTGALLQQAGEKVMSTAVGAKDTVVSTAVGAKDTVVSTAVGAKDAMMNSLGMAGEDKDGTTTTDAGKDTSTRKPGRDY

SEQ ID NO: 1377 - protein, 204 aa, Zea mays subsp. mays
  peptide (1)..(204): Ceres Seq. ID no. 15227060
  misc_feature (75)..(148): Pfam Name: Late embryogenesis abundant protein Pfam Description: Late embryogenesis abundant protein
  misc_feature (1)..(189): Homolog of NCBI NO: 7387828 NR Description: Late embryogenesis abundant protein, group 3
  misc_feature (1)..(168): Homolog of NCBI NO: 25989707 NR Description: LEA3 protein [Triticum aestivum]
  misc_feature (1)..(189): Homolog of NCBI NO: 126081 NR Description: ABA-inducible protein PHV A1
  misc_feature (1)..(153): Homolog of NCBI NO: 7387829 NR Description: Late embryogenesis abundant protein, group 3
  misc_feature (1)..(170): Homolog of NCBI NO: 4105441 NR Description: group 3 LEA protein [Oryza sativa]
  misc_feature (1)..(170): Homolog of NCBI NO: 7489569 NR Description: protein LEA type 1 - rice
  misc_feature (1)..(170): Homolog of NCBI NO: 7489493 NR Description: LEA protein - rice
  misc_feature (1)..(204): Homolog of NCBI NO: 1076757 NR Description: WSI18 protein - rice
  misc_feature (1)..(182): Homolog of NCBI NO: 1076757 NR Description: WSI18 protein - rice
  misc_feature (1)..(182): Homolog of NCBI NO: 34910364 NR Description: WSI18 protein [Oryza sativa (japonica
MGATQEKGREAKHKASDASDRAMGMGHDAMEATREKARAAADRTMGMGHDAGEAAKDRAYRAKDAASGAAGRARDTASDAAGAAGDRARDGAQQTGSYVAQTAEAARQKAAGAALYAKDTVVAGKDKTGALLQQAGEKVMSTAVGAKDTVVSTAVGAKDTVVSTAVGAKDAMMNSLGMAGEDKDGTTTTDAGKDTSTRKPGRDY

SEQ ID NO: 1378 - DNA, 1558 bp, Zea mays subsp. mays
  misc_feature (1)..(1558): Ceres Seq. ID no. 13599205
  misc_feature: MA Experiment ID: 108543 Result: Down-regulated in Transcription
  misc_feature: MA Experiment ID: 108688 Result: Down-regulated in Transcription
  misc_feature: MA Experiment 108688 PARAMETER Experiment Name: Zm_Embryos-Flowers__P Parameter: Tissue Value: Immature Flowers vs. Aerial+
  misc_feature: MA Experiment ID: 108689 Result: Up-regulated in Transcription
  misc_feature: MA Experiment 108689 PARAMETER Experiment Name: Zm_Drought_Roots_P Parameter: Age (day) Value: 9
  misc_feature: MA Experiment 108689 PARAMETER Experiment Name: Zm_Drought_Roots_P Parameter: Organism Value: Zea mays
  misc_feature: MA Experiment 108689 PARAMETER Experiment Name: Zm_Drought_Roots_P Parameter: Plant Line Value: 35A19
  misc_feature: MA Experiment 108689 PARAMETER Experiment Name: Zm_Drought_Roots_P Parameter: Timepoint (hr) Value: 24
  misc_feature: MA Experiment 108689 PARAMETER Experiment Name: Zm_Drought_Roots_P Parameter: Tissue Value: Roots
  misc_feature: MA Experiment 108689 PARAMETER Experiment Name: Zm_Drought_Roots_P Parameter: Treatment Value: Drought vs. No Drought
  misc_feature: MA Experiment ID: 20000535 Result: Up-regulated in Transcription
  misc_feature: MA Experiment 20000535 PARAMETER Experiment Name: Zm_Hybrid_Seed_Dev_P Parameter: DAP Value: 30 vs. 12
  misc_feature: MA Experiment 20000535 PARAMETER Experiment Name: Zm_Hybrid_Seed_Dev_P Parameter: Organism Value: Zea mays
  misc_feature: MA Experiment 20000535 PARAMETER Experiment Name: Zm_Hybrid_Seed_Dev_P Parameter: Plant Line Value: 35A19
  misc_feature: MA Experiment 20000535 PARAMETER Experiment Name: Zm_Hybrid_Seed_Dev_P Parameter: Tissue Value: Embryo vs. Unfert Floret
atcgacccagccatctcctcaccctcgttcaccacacagtccgccactcctttagtagcttgtgatttgtacgtcgacgagatcactggtcgggtggcggacgacgacacatggggaagggtagtgtgggtgcatcatggtgggcgttcctcctgctcgccggcgtgctgctggtcgtagcagccacggccggggcggaggacggagtggtcgaacgggaccgcaaggaggacctgcggtggtgcaagcaggcgtgcgagtggcagtacggaaaggacaccccgcggaagagggaatgcgagagcgagtgccgcgagcggcaccagcaagctgacgcgggcgaggacggcgacagcggcgtggacgcctacgtctcccgctccgggaggggcgagtgccggcgccagtgcctgcgccgccacgagggccagccgtgggagacccaggagtgcatgaggcggtgccgccgccgcggactggccgtcgacatggagcaagagtacggtcgcggcagcgagagcgcgggcaagtgccgggagaggtgcgagcgccaccaccgcggggactggtgggagaggcagcgctgcctgatggactgcaagagccgggagcgggaggaggagggcggcagcggcggccggcgcggcgaggaggaggaggacagcggcgaccgctgcccttgcgagaagcagtgcgagggccaccacgaccgggaaagcaggcagcagtgcgtccaggcttgcgagcgccggcgacagcagcgcggcggcagccgtgactccaacgtcgacgaggacgacagcgaccggcggtgccagatgaaatgccggcgccacagcgatcggcaggcgaggcagtggtgcgtgcagcgctgcgagcgtaagcaacaggaggaggacgccgccgccgacgacgacaacagcggccggtgccagaagagatgccagcaccacagcgatcggcaggcgaggcagtggtgcgtgcagcgctgcgagcgtaagcaacaggaggacgccgccgccgacgacgacgagaacagcgaccggtgccagaaaagatgccagcagcacagcgactggatgaaaaggctgcggtgcatgcaacggtgcgggcgacaggaggagggcggcgcacgcgacgacgctgacgacgacgccagccacggcgaccggtgcgagaagaagtgccagcagcaccaccgcgactacgacaagcagcagcagtgcgtgcgcgactgccgccgcggccgtggctgggaaacggtggccggcgccatccttgaggtggtgtgacgatcgacgacgtgcatggcgtggcgcagagctaataataaaagggtagtgtacgcttaccgcgtacgtacgtgtcaccgggcgtggcactctccagtctccagggacccatccaccaagtgctactgctccttcgtagggagacgtgggaataaagagtggtagctgcatgcgcgtacggcggccatggctctccgatgagagagctagctgtgtacgtgtgttcgtgatgttgttccatgcatgacatgtatacgtcttgcctg

SEQ ID NO: 1379 - protein, 393 aa, Zea mays subsp. mays
  peptide (1)..(393): Ceres Seq. ID no. 13599206
  misc_feature (121)..(262): Pfam Name: Vicilin N terminal region Pfam Description: Vicilin N terminal region
  misc_feature (221)..(336): Homolog of NCBI NO: 4096175 NR Description: early embryogenesis protein [Oryza sativa]
  misc_feature (260)..(380): Homolog of NCBI NO: 4096175 NR Description: early embryogenesis protein [Oryza sativa]
  misc_feature (92)..(218): Homolog of NCBI NO: 4096175 NR Description: early embryogenesis protein [Oryza sativa]
  misc_feature (38)..(218): Homolog of NCBI NO: 4105681 NR Description: unknown [Oryza sativa]
  misc_feature (123)..(380): Homolog of NCBI NO: 4105681 NR Description: unknown [Oryza sativa]
  misc_feature (181)..(296): Homolog of NCBI NO: 4096175 NR Description: early embryogenesis protein [Oryza sativa]
  misc_feature (6)..(296): Homolog of NCBI NO: 4105681 NR Description: unknown [Oryza sativa]
MGKGSVGASWWAFLLLAGVLLVVAATAGAEDGVVERDRKEDLRWCKQACEWQYGKDTPRKRECESECRERHQQADAGEDGDSGVDAYVSRSGRGECRRQCLRRHEGQPWETQECMRRCRRRGLAVDMEQEYGRGSESAGKCRERCERHHRGDWWERQRCLMDCKSREREEEGGSGGRRGEEEEDSGDRCPCEKQCEGHHDRESRQQCVQACERRRQQRGGSRDSNVDEDDSDRRCQMKCRRHSDRQARQWCVQRCERKQQEEDAAADDDNSGRCQKRCQHHSDRQARQWCVQRCERKQQEDAAADDDENSDRCQKRCQQHSDWMKRLRCMQRCGRQEEGGARDDADDDASHGDRCEKKCQQHHRDYDKQQQCVRDCRRGRGWETVAGAILEVV

SEQ ID NO: 1380 - protein, 279 aa, Zea mays subsp. mays
  peptide (1)..(279): Ceres Seq. ID no. 13599207
  misc_feature (7)..(148): Pfam Name: Vicilin N terminal region Pfam Description: Vicilin N terminal region
  misc_feature (107)..(222): Homolog of NCBI NO: 4096175 NR Description: early embryogenesis protein [Oryza sativa]
  misc_feature (146)..(266): Homolog of NCBI NO: 4096175 NR Description: early embryogenesis protein [Oryza sativa]
  misc_feature (1)..(104): Homolog of NCBI NO: 4096175 NR Description: early embryogenesis protein [Oryza sativa]
  misc_feature (1)..(104): Homolog of NCBI NO: 4105681 NR Description: unknown [Oryza sativa]
  misc_feature (9)..(266): Homolog of NCBI NO: 4105681 NR Description: unknown [Oryza sativa]
  misc_feature (67)..(182): Homolog of NCBI NO: 4096175 NR Description: early embryogenesis protein [Oryza sativa]
  misc_feature (1)..(182): Homolog of NCBI NO: 4105681 NR Description: unknown [Oryza sativa]
MRRCRRRGLAVDMEQEYGRGSESAGKCRERCERHHRGDWWERQRCLMDCKSREREEEGGSGGRRGEEEEDSGDRCPCEKQCEGHHDRESRQQCVQACERRRQQRGGSRDSNVDEDDSDRRCQMKCRRHSDRQARQWCVQRCERKQQEEDAAADDDNSGRCQKRCQHHSDRQARQWCVQRCERKQQEDAAADDDENSDRCQKRCQQHSDWMKRLRCMQRCGRQEEGGARDDADDDASHGDRCEKKCQQHHRDYDKQQQCVRDCRRGRGWETVAGAILEVV

SEQ ID NO: 1381 - protein, 267 aa, Zea mays subsp. mays
  peptide (1)..(267): Ceres Seq. ID no. 13599208
  misc_feature (1)..(136): Pfam Name: Vicilin N terminal region Pfam Description: Vicilin N terminal region
  misc_feature (95)..(210): Homolog of NCBI NO: 4096175 NR Description: early embryogenesis protein [Oryza sativa]
  misc_feature (134)..(254): Homolog of NCBI NO: 4096175 NR Description: early embryogenesis protein [Oryza sativa]
  misc_feature (1)..(92): Homolog of NCBI NO: 4096175 NR Description: early embryogenesis protein [Oryza sativa]
  misc_feature (1)..(92): Homolog of NCBI NO: 4105681 NR Description: unknown [Oryza sativa]
  misc_feature (1)..(254): Homolog of NCBI NO: 4105681 NR Description: unknown [Oryza sativa]
  misc_feature (55)..(170): Homolog of NCBI NO: 4096175 NR Description: early embryogenesis protein [Oryza sativa]
  misc_feature (1)..(170): Homolog of NCBI NO: 4105681 NR Description: unknown [Oryza sativa]
MEQEYGRGSESAGKCRERCERHHRGDWWERQRCLMDCKSREREEEGGSGGRRGEEEEDSGDRCPCEKQCEGHHDRESRQQCVQACERRRQQRGGSRDSNVDEDDSDRRCQMKCRRHSDRQARQWCVQRCERKQQEEDAAADDDNSGRCQKRCQHHSDRQARQWCVQRCERKQQEDAAADDDENSDRCQKRCQQHSDWMKRLRCMQRCGRQEEGGARDDADDDASHGDRCEKKCQQHHRDYDKQQQCVRDCRRGRGWETVAGAILEVV

SEQ ID NO: 1382 - DNA, 1278 bp, Zea mays subsp. mays
  misc_feature (1)..(1278): Ceres Seq. ID no. 13600580
atgcgcgcgctactgcatctgcggctcatcaatccgtgcagtcccagagcaccccgtcttcccgctactcccgcaagggcgctcgtcgcttccttctccggggcgtggcaggcaccttctggtagagcgagagcgagagcagcgccgccggcagttcgcgctatggcgtcccagcaggtgttccgggctcagcagcagcagcagcagcagttcccggctcagcagcaggagtcccagccggggaaggagcacgcgatggacccccggcccgaggccatcgtccaggactacaaggccgccaacaagctcaaggacaaggtggcgctcgtgaccggcggcgactccggcatcgggcgcgccgtgtgcctgtgcttcgcgaaggagggcgcgacggtggccttcaccttcsgtgagggggcaggaggagaaggacgcggaggagacgctgcgtgcgctgcgcgacatcgggtccgagacgggcgcgcgcgagccgatggccctgcccgccgacctcgggtacgaggccaactgccgggaggtggtggagcgggtggcgtcggcgtacggcgggcgcatcgacgtggtggtgaacaacgcggcggagcagtacgagcgggagagcatcggggacgtgacggaggcggacctggagcgcgtgttccgcaccaacatcttctcctacttcctggtgtccaagcacgcggtgccgcgcatggagcccggcgcctgcatcatcaacacctcctccgtcaacgcgtacaagggcaacaagacgctgctggactacacggccaccaagggcgccatcgtggccttcacgcgcgcgctctcgctgcagctggccgacaggggcatccgcgtcaacggcgtcgcgccgggccccgtctggacgccgctcatcccggcgtccttcggcaaggagaaggtggagcagttcgggtcccaggtgcccatgaagcgcgccgcgcagccggccgagatcgcgcccagcttcgtcttcctcgccagcaaccaggattcgtcctacatgtctggccagatcctccacgtcaacggaggcgtcatcgtcaatagctagatacggaagctgttttgctgtcgtgtgatcgtgtccaagtccaagggaacaaagcgagtgtccgtgtgtaccagtcagtaccaggtagcagtgtcagtacgcgcacgcaggaaggcaaggcagggttcagttgtagcggtgtgtaatgctgtcagcacagcacttgtaaagaaggaacgtgtctgaataaatatgcgtcc

SEQ ID NO: 1383 - protein, 357 aa, Zea mays subsp. mays
  peptide (1)..(357): Ceres Seq. ID no. 15218975
  misc_feature (74)..(139): Homolog of NCBI NO: 18405090 NR Description: short-chain dehydrogenase/reductase family
  misc_feature (69)..(139): Homolog of NCBI NO: 7431022 NR Description: glucose and ribitol dehydrogenase homolog - barley
  misc_feature (137)..(137): Xaa is any aa, unknown or other
MRALLHLRLINPCSPRAPRLPATPARALVASFSGAWQAPSGRARARAAPPAVRAMASQQVFRAQQQQQQQFPAQQQESQPGKEHAMDPRPEAIVQDYKAANKLKDKVALVTGGDSGIGRAVCLCFAKEGATVAFTFXEGAGGEGRGGDAACAARHRVRDGRARADGPARRPRVRGQLPGGGGAGGVGVRRAHRRGGEQRGGAVRAGEHRGRDGGGPGARVPHQHLLLLPGVQARGAAHGARRLHHQHLLRQRVQGQQDAAGLHGHQGRHRGLHARALAAAGRQGHPRQRRRAGPRLDAAHPGVLRQGEGGAVRVPGAHEARRAAGRDRAQLRLPRQQPGFVLHVWPDPPRQRRRHRQ

SEQ ID NO: 1384 - protein, 303 aa, Zea mays subsp. mays
  peptide (1)..(303): Ceres Seq. ID no. 15218976
  misc_feature (20)..(85): Homolog of NCBI NO: 18405090 NR Description: short-chain dehydrogenase/reductase family
  misc_feature (15)..(85): Homolog of NCBI NO: 7431022 NR Description: glucose and ribitol dehydrogenase homolog - barley
  misc_feature (83)..(83): Xaa is any aa, unknown or other
MASQQVFRAQQQQQQQFPAQQQESQPGKEHAMDPRPEAIVQDYKAANKLKDKVALVTGGDSGIGRAVCLCFAKEGATVAFTFXEGAGGEGRGGDAACAARHRVRDGRARADGPARRPRVRGQLPGGGGAGGVGVRRAHRRGGEQRGGAVRAGEHRGRDGGGPGARVPHQHLLLLPGVQARGAAHGARRLHHQHLLRQRVQGQQDAAGLHGHQGRHRGLHARALAAAGRQGHPRQRRRAGPRLDAAHPGVLRQGEGGAVRVPGAHEARRAAGRDRAQLRLPRQQPGFVLHVWPDPPRQRRRHRQ

SEQ ID NO: 1385 - protein, 272 aa, Zea mays subsp. mays
  peptide (1)..(272): Ceres Seq. ID no. 15218977
  misc_feature (1)..(54): Homolog of NCBI NO: 18405090 NR Description: short-chain dehydrogenase/reductase family
  misc_feature (1)..(54): Homolog of NCBI NO: 7431022 NR Description: glucose and ribitol dehydrogenase homolog - barley
  misc_feature (52)..(52): Xaa is any aa, unknown or other
MDPRPEAIVQDYKAANKLKDKVALVTGGDSGIGRAVCLCFAKEGATVAFTFXEGAGGEGRGGDAACAARHRVRDGRARADGPARRPRVRGQLPGGGGAGGVGVRRAHRRGGEQRGGAVRAGEHRGRDGGGPGARVPHQHLLLLPGVQARGAAHGARRLHHQHLLRQRVQGQQDAAGLHGHQGRHRGLHARALAAAGRQGHPRQRRRAGPRLDAAHPGVLRQGEGGAVRVPGAHEARRAAGRDRAQLRLPRQQPGFVLHVWPDPPRQRRRHRQ

SEQ ID NO: 1386 - DNA, 897 bp, Zea mays subsp. mays
  misc_feature (1)..(897): Ceres Seq. ID no. 14306264
acgcagtttctcgcgccatctgaagtcagctggggcgacgaagaaatgtcctctagcgatcaaaacccagctgccacacccgcgtcgtcgggccccgccgagccctcgccgccgggcaggccaacggcggtgtcctcgcgtgtcctcgacatgggcgcgcagctggcgcaggcgctgaagccggtgcggcagatgaagcagcacgcgtgcagcttcgcgctgtacgcccacgacttgcaccgccaggtggaggtccaccacttcgtcgcccggctcaaccaggacgtcctccagtgcgccgtctacgactccgacaagccctcggcccgcctcatcggcgtggagtacatcgtctccgacaccatcttcgagggcctggccccggacgagcagaggctgtggcactcgcacgcgtacgaggtgaaggccgggctgtggaccgacgtcggcgtgccggaggcgctgcagagctcggagatggcgagcctcgcaaggacgtacggcaagttctggtgcacctggcaggcggaccgcggcgacgcgctgcccctcggcgcgccggcgctcatggtgtcgccgcaggccgccgagcccggccgcgtgcgcggcgagctggtgcgcggccgtgacgagaggtacgggatcgacagctcggcaggggggctcaaggcggcgagggtggagatggacgagccggagtggatcaacccgaacgccgactactggcggctgcacggcaaggggttcgcggtagacgtcgtcccggccgagatgaagcgacacgcgcccttcccgtgagctgccggtcttcttgttgtgacacgtccgtaaggagcataaagatcgttcttgtatccagaggcgtattttgaagaagaagaaaaagagcttgtgttg

SEQ ID NO: 1387 - protein, 265 aa, Zea mays subsp. mays
  peptide (1)..(265): Ceres Seq. ID no. 14306265
  misc_feature (29)..(259): Homolog of NCBI NO: 30685146 NR Description: expressed protein [Arabidopsis thaliana]
  misc_feature (35)..(259): Homolog of NCBI NO: 15220526 NR Description: expressed protein [Arabidopsis thaliana]
  misc_feature (16)..(265): Homolog of NCBI NO: 7452426 NR Description: hypothetical protein F13C5.90 - Arabidopsis
  misc_feature (16)..(265): Homolog of NCBI NO: 21617913 NR Description: unknown [Arabidopsis thaliana]
  misc_feature (16)..(265): Homolog of NCBI NO: 18415199 NR Description: expressed protein [Arabidopsis thaliana]
  misc_feature (16)..(265): Homolog of NCBI NO: 9758672 NR Description: gene_id:MRA19.8~pir||T05029~strong similarity to
  misc_feature (28)..(265): Homolog of NCBI NO: 15220516 NR Description: expressed protein [Arabidopsis thaliana]
  misc_feature (16)..(265): Homolog of NCBI NO: 15242474 NR Description: expressed protein [Arabidopsis thaliana]
  misc_feature (16)..(265): Homolog of NCBI NO: 34909516 NR Description: P0481E12.28 [Oryza sativa (japonica
  misc_feature (16)..(265): Homolog of NCBI NO: 34910820 NR Description: P0456A01.15 [Oryza sativa (japonica
TQFLAPSEVSWGDEEMSSSDQNPAATPASSGPAEPSPPGRPTAVSSRVLDMGAQLAQALKPVRQMKQHACSFALYAHDLHRQVEVHHFVARLNQDVLQCAVYDSDKPSARLIGVEYIVSDTIFEGLAPDEQRLWHSHAYEVKAGLWTDVGVPEALQSSEMASLARTYGKFWCTWQADRGDALPLGAPALMVSPQAAEPGRVRGELVRGRDERYGIDSSAGGLKAARVEMDEPEWINPNADYWRLHGKGFAVDVVPAEMKRHAPFP

SEQ ID NO: 1388 - protein, 250 aa, Zea mays subsp. mays
  peptide (1)..(250): Ceres Seq. ID no. 14306266
  misc_feature (14)..(244): Homolog of NCBI NO: 30685146 NR Description: expressed protein [Arabidopsis thaliana]
  misc_feature (20)..(244): Homolog of NCBI NO: 15220526 NR Description: expressed protein [Arabidopsis thaliana]
  misc_feature (1)..(250): Homolog of NCBI NO: 7452426 NR Description: hypothetical protein F13C5.90 - Arabidopsis
  misc_feature (1)..(250): Homolog of NCBI NO: 21617913 NR Description: unknown [Arabidopsis thaliana]
  misc_feature (1)..(250): Homolog of NCBI NO: 18415199 NR Description: expressed protein [Arabidopsis thaliana]
  misc_feature (1)..(250): Homolog of NCBI NO: 9758672 NR Description: gene_id:MRA19.8~pir||T05029~strong similarity to
  misc_feature (13)..(250): Homolog of NCBI NO: 15220516 NR Description: expressed protein [Arabidopsis thaliana]
  misc_feature (1)..(250): Homolog of NCBI NO: 15242474 NR Description: expressed protein [Arabidopsis thaliana]
  misc_feature (1)..(250): Homolog of NCBI NO: 34909516 NR Description: P0481E12.28 [Oryza sativa (japonica
  misc_feature (1)..(250): Homolog of NCBI NO: 34910820 NR Description: P0456A01.15 [Oryza sativa (japonica
MSSSDQNPAATPASSGPAEPSPPGRPTAVSSRVLDMGAQLAQALKPVRQMKQHACSFALYAHDLHRQVEVHHFVARLNQDVLQCAVYDSDKPSARLIGVEYIVSDTIFEGLAPDEQRLWHSHAYEVKAGLWTDVGVPEALQSSEMASLARTYGKFWCTWQADRGDALPLGAPALMVSPQAAEPGRVRGELVRGRDERYGIDSSAGGLKAARVEMDEPEWINPNADYWRLHGKGFAVDVVPAEMKRHAPFP

SEQ ID NO: 1389 - protein, 215 aa, Zea mays subsp. mays
  peptide (1)..(215): Ceres Seq. ID no. 14306267
  misc_feature (1)..(209): Homolog of NCBI NO: 30685146 NR Description: expressed protein [Arabidopsis thaliana]
  misc_feature (1)..(209): Homolog of NCBI NO: 15220526 NR Description: expressed protein [Arabidopsis thaliana]
  misc_feature (1)..(215): Homolog of NCBI NO: 7452426 NR Description: hypothetical protein F13C5.90 - Arabidopsis
  misc_feature (1)..(215): Homolog of NCBI NO: 21617913 NR Description: unknown [Arabidopsis thaliana]
  misc_feature (1)..(215): Homolog of NCBI NO: 18415199 NR Description: expressed protein [Arabidopsis thaliana]
  misc_feature (1)..(215): Homolog of NCBI NO: 9758672 NR Description: gene_id:MRA19.8~pir||T05029~strong similarity to
  misc_feature (1)..(215): Homolog of NCBI NO: 15220516 NR Description: expressed protein [Arabidopsis thaliana]
  misc_feature (1)..(215): Homolog of NCBI NO: 15242474 NR Description: expressed protein [Arabidopsis thaliana]
  misc_feature (1)..(215): Homolog of NCBI NO: 34909516 NR Description: P0481E12.28 [Oryza sativa (japonica
  misc_feature (1)..(215): Homolog of NCBI NO: 34910820 NR Description: P0456A01.15 [Oryza sativa (japonica
MGAQLAQALKPVRQMKQHACSFALYAHDLHRQVEVHHFVARLNQDVLQCAVYDSDKPSARLIGVEYIVSDTIFEGLAPDEQRLWHSHAYEVKAGLWTDVGVPEALQSSEMASLARTYGKFWCTWQADRGDALPLGAPALMVSPQAAEPGRVRGELVRGRDERYGIDSSAGGLKAARVEMDEPEWINPNADYWRLHGKGFAVDVVPAEMKRHAPFP

SEQ ID NO: 1390 - DNA, 1040 bp, Zea mays subsp. mays
  misc_feature (1)..(1040): Ceres Seq. ID no. 15224625
aagttccatcccatcccgccacgaaattctccacgctccgatccaatcgcaacaatgaagttcggcaagagcctcaacaaccagatcgtggagacgctcccggactggcgcgacaagttcctgtcctacaaggacctcaagaagcggctgaagcagatcggcgccggctctggcgagcggcggagcaagcgccagcgggtgagggacgggcgcggcggatcctcgccgcctgcgatgaccccggaggaggccggattcgtcgcgctcctcgacgccgagctcgacaagttcaacgccttcttcctcgagaaggaggaggactacgtcatccggctgaaggagttgcaggacagggtggtgagcgccgcggaggtggggtcggcggaggagctgctgcgggtgcgcaaggagatcgtcgacttccacggcgagatggtcttgctggagaactacagcgcgctcaactacaccgggctggtcaagatcctcaagaagtacgacaagaggaccggcgcgctgatccgcctgcccttcatccggaacgtgatgcaggagccgttctgcgccaccgacgtgctgtacaagctcgtcaaggggtgcgaggagatgctggaccagctcctcctgccccggaaccagcagcggcccgtgccgagcgacaacggcggggaaggagacagcgacggcgacgacgacaagcaacgaccggcggagccaggcgcctcatcgctgcccagcggcggcggcggtggcgctggcgacatggagctggaggagatcgaggacatggagagcatgtacatgaagagtacggtggccgcgctcagggcgctcagggagatcaggagcgggagctccacggtgagcgcgttctccctgccgccactacggtgattgacacgttgtgttcggttcagtagcgaagcgagacagaacggggccgactgcgctgttgctgtaggtagtgtttggttcaaagaagacacgaacaaaatgaaagaaaatctgtaaaatgatagtaatattcatctagtattccc

SEQ ID NO: 1391 - protein, 305 aa, Zea mays subsp. mays
  peptide (1)..(305): Ceres Seq. ID no. 15224626
  misc_feature (20)..(279): Homolog of NCBI NO: 23018055 NR Description: COG1205: Distinct helicase family with a unique
VPSHPATKFSTLRSNRNNEVRQEPQQPDRGDAPGLARQVPVLQGPQEAAEADRRRLWRAAEQAPAGEGRARRILAACDDPGGGRIRRAPRRRARQVQRLLPREGGGLRHPAEGVAGQGGERRGGGVGGGAAAGAQGDRRLPRRDGLAGELQRAQLHRAGQDPQEVRQEDRRADPPALHPERDAGAVLRHRRAVQARQGVRGDAGPAPPAPEPAAARAERQRRGRRQRRRRRQATTGGARRLIAAQRRRRWRWRHGAGGDRGHGEHVHEEYGGRAQGAQGDQERELHGERVLPAATTVIDTLCSVQ

SEQ ID NO: 1392 - protein, 297 aa, Zea mays subsp. mays
  peptide (1)..(297): Ceres Seq. ID no. 15224627
  misc_feature (19)..(183): Pfam Name: SPX domain Pfam Description: SPX domain
  misc_feature (250)..(296): Homolog of NCBI NO: 37533962 NR Description: hypothetical protein [Oryza sativa (japonica
  misc_feature (19)..(207): Homolog of NCBI NO: 37533962 NR Description: hypothetical protein [Oryza sativa (japonica
  misc_feature (264)..(296): Homolog of NCBI NO: 31415907 NR Description: putative SPX domain containing protein
  misc_feature (19)..(55): Homolog of NCBI NO: 31415907 NR Description: putative SPX domain containing protein
  misc_feature (74)..(205): Homolog of NCBI NO: 31415907 NR Description: putative SPX domain containing protein
  misc_feature (19)..(296): Homolog of NCBI NO: 15225770 NR Description: expressed protein [Arabidopsis thaliana]
  misc_feature (256)..(297): Homolog of NCBI NO: 21592813 NR Description: ids4-like protein [Arabidopsis thaliana]
  misc_feature (19)..(213): Homolog of NCBI NO: 21592813 NR Description: ids4-like protein [Arabidopsis thaliana]
  misc_feature (256)..(297): Homolog of NCBI NO: 15241275 NR Description: ids4-related protein [Arabidopsis thaliana]
  misc_feature (19)..(213): Homolog of NCBI NO: 15241275 NR Description: ids4-related protein [Arabidopsis thaliana]
KFHPIPPRNSPRSDPIATMKFGKSLNNQIVETLPDWRDKFLSYKDLKKRLKQIGAGSGERRSKRQRVRDGRGGSSPPAMTPEEAGFVALLDAELDKFNAFFLEKEEDYVIRLKELQDRVVSAAEVGSAEELLRVRKEIVDFHGEMVLLENYSALNYTGLVKILKKYDKRTGALIRLPFIRNVMQEPFCATDVLYKLVKGCEEMLDQLLLPRNQQRPVPSDNGGEGDSDGDDDKQRPAEPGASSLPSGGGGGAGDMELEEIEDMESMYMKSTVAALRALREIRSGSSTVSAFSLPPLR

SEQ ID NO: 1393 - protein, 279 aa, Zea mays subsp. mays
  peptide (1)..(279): Ceres Seq. ID no. 15224628
  misc_feature (1)..(165): Pfam Name: SPX domain Pfam Description: SPX domain
  misc_feature (232)..(278): Homolog of NCBI NO: 37533962 NR Description: hypothetical protein [Oryza sativa (japonica
  misc_feature (1)..(189): Homolog of NCBI NO: 37533962 NR Description: hypothetical protein [Oryza sativa (japonica
  misc_feature (246)..(278): Homolog of NCBI NO: 31415907 NR Description: putative SPX domain containing protein
  misc_feature (1)..(37): Homolog of NCBI NO: 31415907 NR Description: putative SPX domain containing protein
  misc_feature (56)..(187): Homolog of NCBI NO: 31415907 NR Description: putative SPX domain containing protein
  misc_feature (1)..(278): Homolog of NCBI NO: 15225770 NR Description: expressed protein [Arabidopsis thaliana]
  misc_feature (238)..(279): Homolog of NCBI NO: 21592813 NR Description: ids4-like protein [Arabidopsis thaliana]
  misc_feature (1)..(195): Homolog of NCBI NO: 21592813 NR Description: ids4-like protein [Arabidopsis thaliana]
  misc_feature (238)..(279): Homolog of NCBI NO: 15241275 NR Description: ids4-related protein [Arabidopsis thaliana]
  misc_feature (1)..(195): Homolog of NCBI NO: 15241275 NR Description: ids4-related protein [Arabidopsis thaliana]
MKFGKSLNNQIVETLPDWRDKFLSYKDLKKRLKQIGAGSGERRSKRQRVRDGRGGSSPPAMTPEEAGFVALLDAELDKFNAFFLEKEEDYVIRLKELQDRVVSAAEVGSAEELLRVRKEIVDFHGEMVLLENYSALNYTGLVKILKKYDKRTGALIRLPFIRNVMQEPFCATDVLYKLVKGCEEMLDQLLLPRNQQRPVPSDNGGEGDSDGDDDKQRPAEPGASSLPSGGGGGAGDMELEEIEDMESMYMKSTVAALRALREIRSGSSTVSAFSLPPLR

SEQ ID NO: 1394 - DNA, 893 bp, Zea mays subsp. mays
  misc_feature (1)..(893): Ceres Seq. ID no. 14306309
aaccatcaggacgcggacgcggacgcggacgcggctcacatcaaacacccccttcagctgtgctcagtgctcactgccgcaaaaccacagccacacagggaagcgcccagcgccctttcacatcaccacatccacgctcctccgttccatggccatgtcgagcagcgccagcaagaagcaagcccaggcccaggcccaggcccagaaggccgggcggaggcccccggcggtgtcgtcggccgcggccgcggacgcggagatgcagagggtgttctcgcgcatcgacgcggacggcgacgggcggatctcgccgtcggagctggcggcggtgtcgcgcgccatctccccgccggcgagctcctcgcacgggcggcgcgaggtggcggccatgatggaggagctggacacggaccgcgacggcttcgtggacctgggcgagttcagggcgttccacgcgcgcggcggcggcgttggcggcgacgacgacgacgacgcggagctccgcgccgccttcgccgtgtacgacgccgacggcgacgggcgcatcacggcggccgagctgggcagcgtgctcgcccgcattggcgaggggtgcagcgccgaggagtgccgccggatgatcgccggcgtcgacgccgacggcgacggctgcgtcgggttcgaggagttcaagatgatgatgcgcagcccccagccccagccccaggccggcgccggagtgactgccgtgccggacaaggccaaggaggagtgacgggtgtaggtgtaggtgtactcaccagggcatcagtctgggggaagggatcgagttcctctgcctcttctgttgctttcacctcctctggagaggcatgaaaatactcaacttgctgcataagactacttattactgt

SEQ ID NO: 1395 - protein, 284 aa, Zea mays subsp. mays
  peptide (1)..(284): Ceres Seq. ID no. 14306310
  misc_feature (152)..(226): Pfam Name: TT viral orf 1 Pfam Description: TT viral orf 1
  misc_feature (123)..(275): Homolog of NCBI NO: 37531392 NR Description: hypothetical protein [Oryza sativa (japonica
  misc_feature (76)..(252): Homolog of NCBI NO: 37533274 NR Description: hypothetical protein [Oryza sativa (japonica
NHQDADADADAAHIKHPLQLCSVLTAAKPQPHREAPSALSHHHIHAPPFHGHVEQRQQEASPGPGPGPEGRAEAPGGVVGRGRGRGDAEGVLAHRRGRRRADLAVGAGGGVARHLPAGELLARAARGGGHDGGAGHGPRRLRGPGRVQGVPRARRRRWRRRRRRRGAPRRLRRVRRRRRRAHHGGRAGQRARPHWRGVQRRGVPPDDRRRRRRRRRLRRVRGVQDDDAQPPAPAPGRRRSDCRAGQGQGGVTGVGVGVLTRASVWGKGSSSSASSVAFTSSGEA

SEQ ID NO: 1396 - protein, 250 aa, Zea mays subsp. mays
  peptide (1)..(250): Ceres Seq. ID no. 14306311
  misc_feature (126)..(154): Pfam Name: EF hand Pfam Description: EF hand
  misc_feature (89)..(227): Homolog of NCBI NO: 13397927 NR Description: putative calmodulin-related protein [Medicago
  misc_feature (65)..(229): Homolog of NCBI NO: 15221030 NR Description: calcium-binding protein, putative [Arabidopsis
  misc_feature (86)..(227): Homolog of NCBI NO: 14423648 NR Description: Calcium-binding allergen Ole e 8 (PCA18/PCA23)
  misc_feature (86)..(227): Homolog of NCBI NO: 18408502 NR Description: calmodulin-related protein, putative [Arabidopsis
  misc_feature (86)..(227): Homolog of NCBI NO: 6901654 NR Description: calcium-binding protein [Olea europaea]
  misc_feature (86)..(227): Homolog of NCBI NO: 21618074 NR Description: calmodulin-related protein [Arabidopsis thaliana]
  misc_feature (86)..(227): Homolog of NCBI NO: 14589311 NR Description: calcium binding protein [Sesbania rostrata]
  misc_feature (55)..(227): Homolog of NCBI NO: 19386815 NR Description: B1147A04.10 [Oryza sativa (japonica
  misc_feature (77)..(227): Homolog of NCBI NO: 15240340 NR Description: calmodulin-related protein 2, touch-induced
  misc_feature (26)..(250): Homolog of NCBI NO: 34895640 NR Description: OSJNBa0083M16.33 [Oryza sativa (japonica
TIRTRTRTRTRLTSNTPFSCAQCSLPQNHSHTGKRPAPFHITTSTLLRSMAMSSSASKKQAQAQAQAQKAGRRPPAVSSAAAADAEMQRVFSRIDADGDGRISPSELAAVSRAISPPASSSHGRREVAAMMEELDTDRDGFVDLGEFRAFHARGGGVGGDDDDDAELRAAFAVYDADGDGRITAAELGSVLARIGEGCSAEECRRMIAGVDADGDGCVGFEEFKMMMRSPQPQPQAGAGVTAVPDKAKEE

SEQ ID NO: 1397 - protein, 201 aa, Zea mays subsp. mays
  peptide (1)..(201): Ceres Seq. ID no. 14306312
  misc_feature (77)..(105): Pfam Name: EF hand Pfam Description: EF hand
  misc_feature (40)..(178): Homolog of NCBI NO: 13397927 NR Description: putative calmodulin-related protein [Medicago
  misc_feature (16)..(180): Homolog of NCBI NO: 15221030 NR Description: calcium-binding protein, putative [Arabidopsis
  misc_feature (37)..(178): Homolog of NCBI NO: 14423648 NR Description: Calcium-binding allergen Ole e 8 (PCA18/PCA23)
  misc_feature (37)..(178): Homolog of NCBI NO: 18408502 NR Description: calmodulin-related protein, putative [Arabidopsis
  misc_feature (37)..(178): Homolog of NCBI NO: 6901654 NR Description: calcium-binding protein [Olea europaea]
  misc_feature (37)..(178): Homolog of NCBI NO: 21618074 NR Description: calmodulin-related protein [Arabidopsis thaliana]
  misc_feature (37)..(178): Homolog of NCBI NO: 14589311 NR Description: calcium binding protein [Sesbania rostrata]
  misc_feature (6)..(178): Homolog of NCBI NO: 19386815 NR Description: B1147A04.10 [Oryza sativa (japonica
  misc_feature (28)..(178): Homolog of NCBI NO: 15240340 NR Description: calmodulin-related protein 2, touch-induced
  misc_feature (1)..(201): Homolog of NCBI NO: 34895640 NR Description: OSJNBa0083M16.33 [Oryza sativa (japonica
MAMSSSASKKQAQAQAQAQKAGRRPPAVSSAAAADAEMQRVFSRIDADGDGRISPSELAAVSRAISPPASSSHGRREVAAMMEELDTDRDGFVDLGEFRAFHARGGGVGGDDDDDAELRAAFAVYDADGDGRITAAELGSVLARIGEGCSAEECRRMIAGVDADGDGCVGFEEFKMMMRSPQPQPQAGAGVTAVPDKAKEE

SEQ ID NO: 1398 - DNA, 452 bp, Zea mays subsp. mays
  misc_feature (1)..(452): Ceres Seq. ID no. 13600592
  misc_feature: MA Experiment ID: 108687 Result: Up-regulated in Transcription
  misc_feature: MA Experiment 108687 PARAMETER Experiment Name: Zm_Embryos-Flowers__P Parameter: Tissue Value: Embryo vs. Aerial+
  misc_feature: MA Experiment ID: 108689 Result: Up-regulated in Transcription
  misc_feature: MA Experiment 108689 PARAMETER Experiment Name: Zm_Drought_Roots_P Parameter: Age (day) Value: 9
  misc_feature: MA Experiment 108689 PARAMETER Experiment Name: Zm_Drought_Roots_P Parameter: Organism Value: Zea mays
  misc_feature: MA Experiment 108689 PARAMETER Experiment Name: Zm_Drought_Roots_P Parameter: Plant Line Value: 35A19
  misc_feature: MA Experiment 108689 PARAMETER Experiment Name: Zm_Drought_Roots_P Parameter: Timepoint (hr) Value: 24
  misc_feature: MA Experiment 108689 PARAMETER Experiment Name: Zm_Drought_Roots_P Parameter: Tissue Value: Roots
  misc_feature: MA Experiment 108689 PARAMETER Experiment Name: Zm_Drought_Roots_P Parameter: Treatment Value: Drought vs. No Drought
  misc_feature: MA Experiment ID: 20000535 Result: Up-regulated in Transcription
  misc_feature: MA Experiment 20000535 PARAMETER Experiment Name: Zm_Hybrid_Seed_Dev_P Parameter: DAP Value: 30 vs. 12
  misc_feature: MA Experiment 20000535 PARAMETER Experiment Name: Zm_Hybrid_Seed_Dev_P Parameter: Organism Value: Zea mays
  misc_feature: MA Experiment 20000535 PARAMETER Experiment Name: Zm_Hybrid_Seed_Dev_P Parameter: Plant Line Value: 35A19
  misc_feature: MA Experiment 20000535 PARAMETER Experiment Name: Zm_Hybrid_Seed_Dev_P Parameter: Tissue Value: Embryo vs. Unfert Floret
ctagctcgtgcatgccgccctgagcgccactgcacagacgcgcagagacagacattgcgactttgcgagagacaaaacctcccagataacgcccgcgcgctccccgatggcgtcgtcgtgccagaacgtggagattcccggcaagccgacggagacggggacggcgctgctggagacggcgacgggcaccatccaggggttcgcgccgctgagccagatccaccagcacctgtgcgcgttccacttctacgcggacgacatggggcggcaggtggaggcgcaccacttctgcgcgcacctgaacgaggacgtgcggcagtgcctcatcttcgacgggcccggcgccggcgcgcgcctcatcggcgtggagtacatcgtctccgagacggtgttcctgacgctgcccgacgccgagaagccgctgtggcacacgcacgagttcgaggtgaagg

SEQ ID NO: 1399 - protein, 150 aa, Zea mays subsp. mays
  peptide (1)..(150): Ceres Seq. ID no. 13600593
LARACRPERHCTDAQRQTLRLCERQNLPDNARALPDGVVVPERGDSRQADGDGDGAAGDGDGHHPGVRAAEPDPPAPVRVPLLRGRHGAAGGGAPLLRAPERGRAAVPHLRRARRRRAPHRRGVHRLRDGVPDAARRREAAVAHARVRGE

SEQ ID NO: 1400 - protein, 115 aa, Zea mays subsp. mays
  peptide (1)..(115): Ceres Seq. ID no. 13600594
  misc_feature (10)..(114): Homolog of NCBI NO: 16764905 NR Description: putative outer membrane or secreted lipoprotein
  misc_feature (10)..(114): Homolog of NCBI NO: 16760314 NR Description: putative secreted protein
  misc_feature (1)..(114): Homolog of NCBI NO: 34909516 NR Description: P0481E12.28 [Oryza sativa (japonica
  misc_feature (1)..(114): Homolog of NCBI NO: 34910820 NR Description: P0456A01.15 [Oryza sativa (japonica
  misc_feature (1)..(114): Homolog of NCBI NO: 32413853 NR Description: hypothetical protein [Neurospora crassa]
  misc_feature (11)..(114): Homolog of NCBI NO: 40740423 NR Description: hypothetical protein AN7959.2 [Aspergillus
  misc_feature (2)..(114): Homolog of NCBI NO: 26451037 NR Description: unknown protein [Arabidopsis thaliana]
  misc_feature (9)..(114): Homolog of NCBI NO: 15220526 NR Description: expressed protein [Arabidopsis thaliana]
  misc_feature (2)..(114): Homolog of NCBI NO: 30685146 NR Description: expressed protein [Arabidopsis thaliana]
  misc_feature (1)..(114): Homolog of NCBI NO: 4105683 NR Description: unknown [Oryza sativa]
MASSCQNVEIPGKPTETGTALLETATGTIQGFAPLSQIHQHLCAFHFYADDMGRQVEAHHFCAHLNEDVRQCLIFDGPGAGARLIGVEYIVSETVFLTLPDAEKPLWHTHEFEVK

SEQ ID NO: 1401 - DNA, 1085 bp, Zea mays subsp. mays
  misc_feature (1)..(1085): Ceres Seq. ID no. 14312711
aaacaggcgacccgcgtgtcagagatgcagcatagcatggacgcgggcgaggtgcggcactggaacgcggacgtgaacggcgtctccatccacgtcgccgagcggggccccgaggatgggccggcggtgctcctcctccacggcttcccggagctctggctctcgtggcgccaccagatggccgcgctcgccgcccgcgggttccgtgcgctagcccccgacctccgcggctacggcgactcctccgcgccgtccgaccccgccgcctactccatcttccacatcgtcggcgacgtcgtcgcgctcctcgaccacctccaactcacaaaggtgttcgtggcggggcacgactggggcgcgcatgcggcgtggctcctctgcctgttccggccggaccgggtgcgcgccgccgtcgttctgggggtaccgtactccgctcgacacgcacacgctcgccccatcacggaggccttcgcggcgtttggcgagggcttttacataaatcagttgcaggaggctggaagagctgagagcgcattcgcccgttacgatgtcgcaactgtcctaaaaaagttctactccatcgaaatagatgatgtcaccgctcctcctggggtggagatcatagacttcctggaggcgtctccctcgccacttccttggatcagcgaggaagaactgggccagtatgctgagaagtttcacaagtccgggttcactggacccctcaactactaccgcatgtcggagacgaactcgagactccttgcaccctggaacggagcgaagattacagtgcctgtgaagttcatagctggcgataaggacatcggtgcccagtcctttggaactggggagtacatcaagagcgcggagttcgagtccaccgttccagatcttgaagtcaccgtcatcgagggccaccattttctccagcaggaacaggccgagagggtgaactcggagatggtttcctacctcgtcaggtttactagctagccagtaaagaaatctttctgaactgaagtcttgaagagctgaataaagtgtgagctaggcatttgctcttgcttctttctcacctc

SEQ ID NO: 1402 - protein, 332 aa, Zea mays subsp. mays
  peptide (1)..(332): Ceres Seq. ID no. 14312712
  misc_feature (68)..(323): Pfam Name: alpha/beta hydrolase fold Pfam Description: alpha/beta hydrolase fold
  misc_feature (17)..(330): Homolog of NCBI NO: 7489256 NR Description: probable epoxide hydrolase (EC 3.3.2.3) (clone
  misc_feature (15)..(332): Homolog of NCBI NO: 34897302 NR Description: putative hydrolase [Oryza sativa (japonica
  misc_feature (20)..(330): Homolog of NCBI NO: 25044843 NR Description: epoxide hydrolase [Ananas comosus]
  misc_feature (13)..(330): Homolog of NCBI NO: 34902880 NR Description: unnamed protein product [Oryza sativa (japonica
  misc_feature (18)..(327): Homolog of NCBI NO: 15230367 NR Description: epoxide hydrolase, putative [Arabidopsis
KQATRVSEMQHSMDAGEVRHWNADVNGVSIHVAERGPEDGPAVLLLHGFPELWLSWRHQMAALAARGFRALAPDLRGYGDSSAPSDPAAYSIFHIVGDVVALLDHLQLTKVFVAGHDWGAHAAWLLCLFRPDRVRAAVVLGVPYSARHAHARPITEAFAAFGEGFYINQLQEAGRAESAFARYDVATVLKKFYSIEIDDVTAPPGVEIIDFLEASPSPLPWISEEELGQYAEKFHKSGFTGPLNYYRMSETNSRLLAPWNGAKITVPVKFIAGDKDIGAQSFGTGEYIKSAEFESTVPDLEVTVIEGHHFLQQEQAERVNSEMVSYLVRFTS

SEQ ID NO: 1403 - protein, 324 aa, Zea mays subsp. mays
  peptide (1)..(324): Ceres Seq. ID no. 14312713
  misc_feature (60)..(315): Pfam Name: alpha/beta hydrolase fold Pfam Description: alpha/beta hydrolase fold
  misc_feature (9)..(322): Homolog of NCBI NO: 7489256 NR Description: probable epoxide hydrolase (EC 3.3.2.3) (clone
  misc_feature (7)..(324): Homolog of NCBI NO: 34897302 NR Description: putative hydrolase [Oryza sativa (japonica
  misc_feature (12)..(322): Homolog of NCBI NO: 25044843 NR Description: epoxide hydrolase [Ananas comosus]
  misc_feature (5)..(322): Homolog of NCBI NO: 34902880 NR Description: unnamed protein product [Oryza sativa (japonica
  misc_feature (10)..(319): Homolog of NCBI NO: 15230367 NR Description: epoxide hydrolase, putative [Arabidopsis
MQHSMDAGEVRHWNADVNGVSIHVAERGPEDGPAVLLLHGFPELWLSWRHQMAALAARGFRALAPDLRGYGDSSAPSDPAAYSIFHIVGDVVALLDHLQLTKVFVAGHDWGAHAAWLLCLFRPDRVRAAVVLGVPYSARHAHARPITEAFAAFGEGFYINQLQEAGRAESAFARYDVATVLKKFYSIEIDDVTAPPGVEIIDFLEASPSPLPWISEEELGQYAEKFHKSGFTGPLNYYRMSETNSRLLAPWNGAKITVPVKFIAGDKDIGAQSFGTGEYIKSAEFESTVPDLEVTVIEGHHFLQQEQAERVNSEMVSYLVRFTS

SEQ ID NO: 1404 - protein, 320 aa, Zea mays subsp. mays
  peptide (1)..(320): Ceres Seq. ID no. 14312714
  misc_feature (56)..(311): Pfam Name: alpha/beta hydrolase fold Pfam Description: alpha/beta hydrolase fold
  misc_feature (5)..(318): Homolog of NCBI NO: 7489256 NR Description: probable epoxide hydrolase (EC 3.3.2.3) (clone
  misc_feature (3)..(320): Homolog of NCBI NO: 34897302 NR Description: putative hydrolase [Oryza sativa (japonica
  misc_feature (8)..(318): Homolog of NCBI NO: 25044843 NR Description: epoxide hydrolase [Ananas comosus]
  misc_feature (1)..(318): Homolog of NCBI NO: 34902880 NR Description: unnamed protein product [Oryza sativa (japonica
  misc_feature (6)..(315): Homolog of NCBI NO: 15230367 NR Description: epoxide hydrolase, putative [Arabidopsis
MDAGEVRHWNADVNGVSIHVAERGPEDGPAVLLLHGFPELWLSWRHQMAALAARGFRALAPDLRGYGDSSAPSDPAAYSIFHIVGDVVALLDHLQLTKVFVAGHDWGAHAAWLLCLFRPDRVRAAVVLGVPYSARHAHARPITEAFAAFGEGFYINQLQEAGRAESAFARYDVATVLKKFYSIEIDDVTAPPGVEIIDFLEASPSPLPWISEEELGQYAEKFHKSGFTGPLNYYRMSETNSRLLAPWNGAKITVPVKFIAGDKDIGAQSFGTGEYIKSAEFESTVPDLEVTVIEGHHFLQQEQAERVNSEMVSYLVRFTS

SEQ ID NO: 1405 - DNA, 750 bp, Zea mays subsp. mays
  misc_feature (1)..(750): Ceres Seq. ID no. 12634896
  misc_feature: MA Experiment ID: 20000629 Result: Up-regulated in Transcription
  misc_feature: MA Experiment 20000629 PARAMETER Experiment Name: Zm_Herbicide-Treatments_P Parameter: Timepoint (hr) Value: 12
  misc_feature: MA Experiment 20000629 PARAMETER Experiment Name: Zm_Herbicide-Treatments_P Parameter: Tissue Value: Aerial
  misc_feature: MA Experiment 20000629 PARAMETER Experiment Name: Zm_Herbicide-Treatments_P Parameter: Treatment Value: Trimec vs. No Treatment
aattgggccagtttgtagtacccttgtttatatcggatacccaagagagccgtggagactggagagggaggaacgagggagctcgctctgctcttccttgttggcaatagcccaaggccccaagacggcagcacgcacaatgaagccatcctgtgcagcacttgttccaggccttcttcttctagccactcttgcagttgcagctggcgcaggtgccgcctcttcatcatctcctccgtcgtcttccctcggcaagcatccagcagagctggtccttcttggtcgcaaaggccgagaacttggccagctgtcatcatcatcatcaggataccgttattaccagcaccagagcaagcagatgcagcaacctgaggaagctgcggctacggaggtgaagcagcccgaggagaaggaggaggaggaggaggaggaggcaaaggtgcggtggacagcgggccagggcgcggacgccgagcctgggctgatctacagcgcggactacagcggcgtggccatgcatgctggctctccgccgacgacgaagccgaagcacaggcaccccagaccgtaggacgtttttttcctcctttcctggttgtgttcgtcagtctatgccttgtccttacgttgtcgacttgctgtgtagtttttaccgttggattgtacaagcaccgctgccggccgtctctgtaaataaactaggccttgcttctgttgctctaaaaaaaaaaaaaaagaaacaaaccgggg

SEQ ID NO: 1406 - protein, 189 aa, Zea mays subsp. mays
  peptide (1)..(189): Ceres Seq. ID no. 12634897
  misc_feature (58)..(188): Homolog of NCBI NO: 19387271 NR Description: hypothetical protein [Oryza sativa (japonica
IGPVCSTLVYIGYPREPWRLEREERGSSLCSSLLAIAQGPKTAARTMKPSCAALVPGLLLLATLAVAAGAGAASSSSPPSSSLGKHPAELVLLGRKGRELGQLSSSSSGYRYYQHQSKQMQQPEEAAATEVKQPEEKEEEEEEEAKVRWTAGQGADAEPGLIYSADYSGVAMHAGSPPTTKPKHRHPRP

SEQ ID NO: 1407 - protein, 143 aa, Zea mays subsp. mays
  peptide (1)..(143): Ceres Seq. ID no. 12634898
  misc_feature (12)..(142): Homolog of NCBI NO: 19387271 NR Description: hypothetical protein [Oryza sativa (japonica
MKPSCAALVPGLLLLATLAVAAGAGAASSSSPPSSSLGKHPAELVLLGRKGRELGQLSSSSSGYRYYQHQSKQMQQPEEAAATEVKQPEEKEEEEEEEAKVRWTAGQGADAEPGLIYSADYSGVAMHAGSPPTTKPKHRHPRP

SEQ ID NO: 1408 - DNA, 915 bp, Zea mays subsp. mays
  misc_feature (1)..(915): Ceres Seq. ID no. 12634899
gatttatcaacatgcaaattctattgtgaaagtaattctcacggttaatctagaagcttgtaaatctcattatgatgtcacattagtatataaattctctgtgtgcatgtctttctgtgacacacaggagctattacaagtgcacgagctcccggtgcggcgcgaagaagcacgtggagaaatctatggacgactcagagatgctgatcgtcacgtacgagggttcgcacctgcacggcccacagccgctcttcccgcgtcgacagtggctgtcggttgacctgtccggcgcgggggtagcggcctcgaagacgaagcagcagcagaccaggtcctcctccccggccgcgtcagccacgctcgcaagcgacgacgggggcggcggctggccaccgagcctgcaaataatgacgcgcaacgccgagacgcgaggaggagggctcacggctgatgcaggcgagagcgagacgacgccggggcttcagagcggacgcacgggtgtgaccgcggactcgtgcgacgatggctccaccgcctccgtgccgccgccgccgcagactgctccctcgtttcactgtgactcgccgcctacgacctggtcctggtcgtgccttgactacaccctcgcctggtcccctgaagctcctctgcttcagtagaagccggtaaactagcttgtttaggaacaggatatgcatacatagatctcaaagagatcgaaagataagagaccccagctgtttattatattccatgcaaaaaaaaaactcaagtgactaaagccagaacgctgacgtgaagctacctaagttggtgcagcgacagtgataaaaaggctaagcacttttctagttaaccagctatactattattgtacagtgatatatatagatgccaatgtgtgcccttagcact

SEQ ID NO: 1409 - protein, 157 aa, Zea mays subsp. mays
  peptide (1)..(157): Ceres Seq. ID no. 12634900
  misc_feature (1)..(21): Homolog of NCBI NO: 25140464 NR Description: WRKY transcription factor IId-3 [Lycopersicon
  misc_feature (1)..(55): Homolog of NCBI NO: 15239836 NR Description: WRKY family transcription factor; protein id:
  misc_feature (1)..(21): Homolog of NCBI NO: 25140468 NR Description: WRKY transcription factor IId-5 [Lycopersicon
  misc_feature (1)..(17): Homolog of NCBI NO: 25140466 NR Description: WRKY transcription factor IId-4 [Lycopersicon
  misc_feature (1)..(19): Homolog of NCBI NO: 25140460 NR Description: WRKY transcription factor IId-2 [Lycopersicon
  misc_feature (1)..(156): Homolog of NCBI NO: 34908200 NR Description: P0406G08.14 [Oryza sativa (japonica
MDDSEMLIVTYEGSHLHGPQPLFPRRQWLSVDLSGAGVAASKTKQQQTRSSSPAASATLASDDGGGGWPPSLQIMTRNAETRGGGLTADAGESETTPGLQSGRTGVTADSCDDGSTASVPPPPQTAPSFHCDSPPTTWSWSCLDYTLAWSPEAPLLQ

SEQ ID NO: 1410 - protein, 152 aa, Zea mays subsp. mays
  peptide (1)..(152): Ceres Seq. ID no. 12634901
  misc_feature (1)..(16): Homolog of NCBI NO: 25140464 NR Description: WRKY transcription factor IId-3 [Lycopersicon
  misc_feature (1)..(50): Homolog of NCBI NO: 15239836 NR Description: WRKY family transcription factor; protein id:
  misc_feature (1)..(16): Homolog of NCBI NO: 25140468 NR Description: WRKY transcription factor IId-5 [Lycopersicon
  misc_feature (1)..(12): Homolog of NCBI NO: 25140466 NR Description: WRKY transcription factor IId-4 [Lycopersicon
  misc_feature (1)..(14): Homolog of NCBI NO: 25140460 NR Description: WRKY transcription factor IId-2 [Lycopersicon
  misc_feature (1)..(151): Homolog of NCBI NO: 34908200 NR Description: P0406G08.14 [Oryza sativa (japonica
MLIVTYEGSHLHGPQPLFPRRQWLSVDLSGAGVAASKTKQQQTRSSSPAASATLASDDGGGGWPPSLQIMTRNAETRGGGLTADAGESETTPGLQSGRTGVTADSCDDGSTASVPPPPQTAPSFHCDSPPTTWSWSCLDYTLAWSPEAPLLQ

SEQ ID NO: 1411 - protein, 92 aa, Zea mays subsp. mays
  peptide (1)..(92): Ceres Seq. ID no. 12634902
IYQHANSIVKVILTVNLEACKSHYDVTLVYKFSVCMSFCDTQELLQVHELPVRREEARGEIYGRLRDADRHVRGFAPARPTAALPASTVAVG

SEQ ID NO: 1412 - DNA, 960 bp, Zea mays subsp. mays
  misc_feature (1)..(960): Ceres Seq. ID no. 14306406
  misc_feature: MA Experiment ID: 108504 Result: Up-regulated in Transcription
  misc_feature: MA Experiment 108504 PARAMETER Experiment Name: Zm_Drought_P Parameter: Age (day) Value: 8
  misc_feature: MA Experiment 108504 PARAMETER Experiment Name: Zm_Drought_P Parameter: Organism Value: Zea mays
  misc_feature: MA Experiment 108504 PARAMETER Experiment Name: Zm_Drought_P Parameter: Plant Line Value: 35A19
  misc_feature: MA Experiment 108504 PARAMETER Experiment Name: Zm_Drought_P Parameter: Timepoint (hr) Value: 12
  misc_feature: MA Experiment 108504 PARAMETER Experiment Name: Zm_Drought_P Parameter: Tissue Value: Aerial
  misc_feature: MA Experiment 108504 PARAMETER Experiment Name: Zm_Drought_P Parameter: Treatment Value: Drought vs. No Drought
  misc_feature: MA Experiment ID: 108522 Result: Up-regulated in Transcription
  misc_feature: MA Experiment 108522 PARAMETER Experiment Name: Zm_42deg_Heat_P Parameter: Age (day) Value: 8
  misc_feature: MA Experiment 108522 PARAMETER Experiment Name: Zm_42deg_Heat_P Parameter: Organism Value: Zea mays
  misc_feature: MA Experiment 108522 PARAMETER Experiment Name: Zm_42deg_Heat_P Parameter: Plant Line Value: 35A19
  misc_feature: MA Experiment 108522 PARAMETER Experiment Name: Zm_42deg_Heat_P Parameter: Temperature (deg C) Value: 42 vs. 22
  misc_feature: MA Experiment 108522 PARAMETER Experiment Name: Zm_42deg_Heat_P Parameter: Timepoint (hr) Value: 1
  misc_feature: MA Experiment 108522 PARAMETER Experiment Name: Zm_42deg_Heat_P Parameter: Tissue Value: Aerial
  misc_feature: MA Experiment ID: 108523 Result: Up-regulated in Transcription
  misc_feature: MA Experiment 108523 PARAMETER Experiment Name: Zm_42deg_Heat_P Parameter: Age (day) Value: 8
  misc_feature: MA Experiment 108523 PARAMETER Experiment Name: Zm_42deg_Heat_P Parameter: Organism Value: Zea mays
  misc_feature: MA Experiment 108523 PARAMETER Experiment Name: Zm_42deg_Heat_P Parameter: Plant Line Value: 35A19
  misc_feature: MA Experiment 108523 PARAMETER Experiment Name: Zm_42deg_Heat_P Parameter: Temperature (deg C) Value: 42 vs. 22
  misc_feature: MA Experiment 108523 PARAMETER Experiment Name: Zm_42deg_Heat_P Parameter: Timepoint (hr) Value: 6
  misc_feature: MA Experiment 108523 PARAMETER Experiment Name: Zm_42deg_Heat_P Parameter: Tissue Value: Aerial
  misc_feature: MA Experiment ID: 108526 Result: Up-regulated in Transcription
  misc_feature: MA Experiment 108526 PARAMETER Experiment Name: Zm_5mM_NO_P Parameter: Age (day) Value: 8
  misc_feature: MA Experiment 108526 PARAMETER Experiment Name: Zm_5mM_NO_P Parameter: Organism Value: Zea mays
  misc_feature: MA Experiment 108526 PARAMETER Experiment Name: Zm_5mM_NO_P Parameter: Plant Line Value: 35A19
  misc_feature: MA Experiment 108526 PARAMETER Experiment Name: Zm_5mM_NO_P Parameter: Timepoint (hr) Value: 1
  misc_feature: MA Experiment 108526 PARAMETER Experiment Name: Zm_5mM_NO_P Parameter: Tissue Value: Aerial
  misc_feature: MA Experiment 108526 PARAMETER Experiment Name: Zm_5mM_NO_P Parameter: Treatment Value: 5mM NO vs. No Treatment
  misc_feature: MA Experiment ID: 108534 Result: Up-regulated in Transcription
  misc_feature: MA Experiment 108534 PARAMETER Experiment Name: Zm_4deg_Cold_P Parameter: Age (hr) Value: 8
  misc_feature: MA Experiment 108534 PARAMETER Experiment Name: Zm_4deg_Cold_P Parameter: Organism Value: Zea mays
  misc_feature: MA Experiment 108534 PARAMETER Experiment Name: Zm_4deg_Cold_P Parameter: Plant Line Value: 35A19
  misc_feature: MA Experiment 108534 PARAMETER Experiment Name: Zm_4deg_Cold_P Parameter: Temperature (deg C) Value: 4 vs. 22
  misc_feature: MA Experiment 108534 PARAMETER Experiment Name: Zm_4deg_Cold_P Parameter: Timepoint (hr) Value: 6
  misc_feature: MA Experiment 108534 PARAMETER Experiment Name: Zm_4deg_Cold_P Parameter: Tissue Value: Aerial
  misc_feature: MA Experiment ID: 108547 Result: Up-regulated in Transcription
  misc_feature: MA Experiment 108547 PARAMETER Experiment Name: Zm_Imbibed_Seeds_P Parameter: Age (day) Value: 4 vs. 2
  misc_feature: MA Experiment 108547 PARAMETER Experiment Name: Zm_Imbibed_Seeds_P Parameter: Organism Value: Zea mays
  misc_feature: MA Experiment 108547 PARAMETER Experiment Name: Zm_Imbibed_Seeds_P Parameter: Plant Line Value: 35A19
  misc_feature: MA Experiment 108547 PARAMETER Experiment Name: Zm_Imbibed_Seeds_P Parameter: Tissue Value: Aerial vs. Embryo
  misc_feature: MA Experiment ID: 108556 Result: Up-regulated in Transcription
  misc_feature: MA Experiment 108556 PARAMETER Experiment Name: Zm_Drought_P Parameter: Age (day) Value: 9
  misc_feature: MA Experiment 108556 PARAMETER Experiment Name: Zm_Drought_P Parameter: Organism Value: Zea mays
  misc_feature: MA Experiment 108556 PARAMETER Experiment Name: Zm_Drought_P Parameter: Plant Line Value: 35A19
  misc_feature: MA Experiment 108556 PARAMETER Experiment Name: Zm_Drought_P Parameter: Timepoint (hr) Value: 24
  misc_feature: MA Experiment 108556 PARAMETER Experiment Name: Zm_Drought_P Parameter: Tissue Value: Aerial
  misc_feature: MA Experiment 108556 PARAMETER Experiment Name: Zm_Drought_P Parameter: Treatment Value: Drought vs. No Drought
  misc_feature: MA Experiment ID: 108597 Result: Up-regulated in Transcription
  misc_feature: MA Experiment 108597 PARAMETER Experiment Name: Zm_100uM_ABA_P Parameter: Age (day) Value: 9
  misc_feature: MA Experiment 108597 PARAMETER Experiment Name: Zm_100uM_ABA_P Parameter: Organism Value: Zea mays
  misc_feature: MA Experiment 108597 PARAMETER Experiment Name: Zm_100uM_ABA_P Parameter: Plant Line Value: 35A19
  misc_feature: MA Experiment 108597 PARAMETER Experiment Name: Zm_100uM_ABA_P Parameter: Timepoint (hr) Value: 24
  misc_feature: MA Experiment 108597 PARAMETER Experiment Name: Zm_100uM_ABA_P Parameter: Tissue Value: Aerial
  misc_feature: MA Experiment 108597 PARAMETER Experiment Name: Zm_100uM_ABA_P Parameter: Treatment Value: 100uM ABA vs. No Treatment
  misc_feature: MA Experiment ID: 108688 Result: Down-regulated in Transcription
  misc_feature: MA Experiment 108688 PARAMETER Experiment Name: Zm_Embryos-Flowers__P Parameter: Tissue Value: Immature Flowers vs. Aerial+
  misc_feature: MA Experiment ID: 108689 Result: Up-regulated in Transcription
  misc_feature: MA Experiment 108689 PARAMETER Experiment Name: Zm_Drought_Roots_P Parameter: Age (day) Value: 9
  misc_feature: MA Experiment 108689 PARAMETER Experiment Name: Zm_Drought_Roots_P Parameter: Organism Value: Zea mays
  misc_feature: MA Experiment 108689 PARAMETER Experiment Name: Zm_Drought_Roots_P Parameter: Plant Line Value: 35A19
  misc_feature: MA Experiment 108689 PARAMETER Experiment Name: Zm_Drought_Roots_P Parameter: Timepoint (hr) Value: 24
  misc_feature: MA Experiment 108689 PARAMETER Experiment Name: Zm_Drought_Roots_P Parameter: Tissue Value: Roots
  misc_feature: MA Experiment 108689 PARAMETER Experiment Name: Zm_Drought_Roots_P Parameter: Treatment Value: Drought vs. No Drought
  misc_feature: MA Experiment ID: 20000626 Result: Down-regulated in Transcription
  misc_feature: MA Experiment 20000626 PARAMETER Experiment Name: Zm_Herbicide-Treatments_P Parameter: Timepoint (hr) Value: 12
  misc_feature: MA Experiment 20000626 PARAMETER Experiment Name: Zm_Herbicide-Treatments_P Parameter: Tissue Value: Aerial
  misc_feature: MA Experiment 20000626 PARAMETER Experiment Name: Zm_Herbicide-Treatments_P Parameter: Treatment Value: Roundup vs. No Treatment
  misc_feature: MA Experiment ID: 20001610 Result: Up-regulated in Transcription
  misc_feature: MA Experiment 20001610 PARAMETER Experiment Name: Zm_50ppm_KNO3_L-to-H_P Parameter: Age (day) Value: 19
  misc_feature: MA Experiment 20001610 PARAMETER Experiment Name: Zm_50ppm_KNO3_L-to-H_P Parameter: Organism Value: Zea mays
  misc_feature: MA Experiment 20001610 PARAMETER Experiment Name: Zm_50ppm_KNO3_L-to-H_P Parameter: Plant Line Value: 35A19
  misc_feature: MA Experiment 20001610 PARAMETER Experiment Name: Zm_50ppm_KNO3_L-to-H_P Parameter: Timepoint (hr) Value: 2
  misc_feature: MA Experiment 20001610 PARAMETER Experiment Name: Zm_50ppm_KNO3_L-to-H_P Parameter: Tissue Value: Roots
  misc_feature: MA Experiment 20001610 PARAMETER Experiment Name: Zm_50ppm_KNO3_L-to-H_P Parameter: Treatment Value: 50ppm KNO3 vs. 50ppm KCl
actacgcgcgaggcacggcacggcacggcacgaccgagctccagtctgcccccgcccccgcccccatccgcacgtccgccttgatccggcaaatggcgtcgccggcgcggcggctcctgcagaccaactccgtgcagtacccgacgctccccgcggccgacccgccgagcgcgctggccgtcgactccgacgtggtggtcatcctcgccgcgctcctctgcgcgctcatctgcgtcgtggggctggcctccgtggcccggtgcgcgcgctcccgcgccgcgcccgccgccgccgccaggagggggctcaggaagaaggcgctcagggcgctgccgagcctcgcgtacgaggacgccgtggcggcccgggccggggccggggacggggccggggacggggcggcggaggtcctggcggagtgcgccatctgcctgtcggagttcgcgccacgggaggaggtccgcgtgctgccgcagtgcggccacgccttccacgtcgcctgcatcgacacctggctcgccgcccactcctcctgtccctcgtgccgccgcgtcctcgtcgtcggcgacgacgccagtaagcgcccgccccaccagcctaagcgctgccgcaagtgcgacgcggccatggacgagccctcctcgtcgtccggttccgccggcgccacgcctgccggttcctgacccttctcaccagtgccacagccacgccaccaccgccgccagtttctagcaactgggccggcaatcttagctccactggaattccctcatcatcaggcgccgccggtttctagcaactgggttggcaatctttagctccactccacttcattccaaggattcgaacgttgatgctgtaaattgcaggttggtcgattatgtacatatttattttcagattagaaacatgctaaagtatcgtgtgaatgtgaatctcagaaacagaatctttcttcgc

SEQ ID NO: 1413 - protein, 226 aa, Zea mays subsp. mays
  peptide (1)..(226): Ceres Seq. ID no. 14306407
  misc_feature (140)..(181): Pfam Name: Zinc finger, C3HC4 type (RING finger) Pfam Description: Zinc finger, C3HC4 type (RING finger)
  misc_feature (22)..(216): Homolog of NCBI NO: 34907826 NR Description: P0485B12.26 [Oryza sativa (japonica
  misc_feature (61)..(186): Homolog of NCBI NO: 15241087 NR Description: expressed protein [Arabidopsis thaliana]
  misc_feature (31)..(185): Homolog of NCBI NO: 15227839 NR Description: RING zinc finger protein -related [Arabidopsis
  misc_feature (36)..(223): Homolog of NCBI NO: 15218042 NR Description: RING zinc finger protein -related [Arabidopsis
  misc_feature (31)..(217): Homolog of NCBI NO: 21555237 NR Description: putative RING zinc finger protein [Arabidopsis
  misc_feature (31)..(217): Homolog of NCBI NO: 15223041 NR Description: RING zinc finger protein -related [Arabidopsis
  misc_feature (41)..(186): Homolog of NCBI NO: 15237013 NR Description: RING-H2 finger protein RHA3b [Arabidopsis
  misc_feature (35)..(216): Homolog of NCBI NO: 32487554 NR Description: OSJNBa0013K16.6 [Oryza sativa (japonica
  misc_feature (95)..(226): Homolog of NCBI NO: 37536508 NR Description: putative ring finger protein
  misc_feature (17)..(221): Homolog of NCBI NO: 7489432 NR Description: probable ring finger protein - barley
YARGTARHGTTELQSAPAPAPIRTSALIRQMASPARRLLQTNSVQYPTLPAADPPSALAVDSDVVVILAALLCALICVVGLASVARCARSRAAPAAAARRGLRKKALRALPSLAYEDAVAARAGAGDGAGDGAAEVLAECAICLSEFAPREEVRVLPQCGHAFHVACIDTWLAAHSSCPSCRRVLVVGDDASKRPPHQPKRCRKCDAAMDEPSSSSGSAGATPAGS

SEQ ID NO: 1414 - protein, 196 aa, Zea mays subsp. mays
  peptide (1)..(196): Ceres Seq. ID no. 14306408
  misc_feature (110)..(151): Pfam Name: Zinc finger, C3HC4 type (RING finger) Pfam Description: Zinc finger, C3HC4 type (RING finger)
  misc_feature (1)..(186): Homolog of NCBI NO: 34907826 NR Description: P0485B12.26 [Oryza sativa (japonica
  misc_feature (31)..(156): Homolog of NCBI NO: 15241087 NR Description: expressed protein [Arabidopsis thaliana]
  misc_feature (1)..(155): Homolog of NCBI NO: 15227839 NR Description: RING zinc finger protein -related [Arabidopsis
  misc_feature (6)..(193): Homolog of NCBI NO: 15218042 NR Description: RING zinc finger protein -related [Arabidopsis
  misc_feature (1)..(187): Homolog of NCBI NO: 21555237 NR Description: putative RING zinc finger protein [Arabidopsis
  misc_feature (1)..(187): Homolog of NCBI NO: 15223041 NR Description: RING zinc finger protein -related [Arabidopsis
  misc_feature (11)..(156): Homolog of NCBI NO: 15237013 NR Description: RING-H2 finger protein RHA3b [Arabidopsis
  misc_feature (5)..(186): Homolog of NCBI NO: 32487554 NR Description: OSJNBa0013K16.6 [Oryza sativa (japonica
  misc_feature (65)..(196): Homolog of NCBI NO: 37536508 NR Description: putative ring finger protein
  misc_feature (1)..(191): Homolog of NCBI NO: 7489432 NR Description: probable ring finger protein - barley
MASPARRLLQTNSVQYPTLPAADPPSALAVDSDVVVILAALLCALICVVGLASVARCARSRAAPAAAARRGLRKKALRALPSLAYEDAVAARAGAGDGAGDGAAEVLAECAICLSEFAPREEVRVLPQCGHAFHVACIDTWLAAHSSCPSCRRVLVVGDDASKRPPHQPKRCRKCDAAMDEPSSSSGSAGATPAGS

SEQ ID NO: 1415 - protein, 192 aa, Zea mays subsp. mays
  peptide (1)..(192): Ceres Seq. ID no. 14306409
  misc_feature (8)..(114): Pfam Name: Atrophin-1 family Pfam Description: Atrophin-1 family
LRARHGTARHDRAPVCPRPRPHPHVRLDPANGVAGAAAPADQLRAVPDAPRGRPAERAGRRLRRGGHPRRAPLRAHLRRGAGLRGPVRALPRRARRRRQEGAQEEGAQGAAEPRVRGRRGGPGRGRGRGRGRGGGGPGGVRHLPVGVRATGGGPRAAAVRPRLPRRLHRHLARRPLLLSLVPPRPRRRRRRQ

SEQ ID NO: 1416 - DNA, 1248 bp, Zea mays subsp. mays
  misc_feature (1)..(1248): Ceres Seq. ID no. 12365169
  misc_feature: MA Experiment ID: 108689 Result: Up-regulated in Transcription
  misc_feature: MA Experiment 108689 PARAMETER Experiment Name: Zm_Drought_Roots_P Parameter: Age (day) Value: 9
  misc_feature: MA Experiment 108689 PARAMETER Experiment Name: Zm_Drought_Roots_P Parameter: Organism Value: Zea mays
  misc_feature: MA Experiment 108689 PARAMETER Experiment Name: Zm_Drought_Roots_P Parameter: Plant Line Value: 35A19
  misc_feature: MA Experiment 108689 PARAMETER Experiment Name: Zm_Drought_Roots_P Parameter: Timepoint (hr) Value: 24
  misc_feature: MA Experiment 108689 PARAMETER Experiment Name: Zm_Drought_Roots_P Parameter: Tissue Value: Roots
  misc_feature: MA Experiment 108689 PARAMETER Experiment Name: Zm_Drought_Roots_P Parameter: Treatment Value: Drought vs. No Drought
atcggtgatcggtctcctatgttcacacctgtttgctctcttttcttcccccgttcacctcgcgtgcgccacccacctagggtgaccgccgccgcccttcgcccagccgcccgggttgcgctttgccggcgacgagcgcccaccgcacccccaccatattggtcactggaggattgctgcggttggtaaggatgagcaaaggcccagttccgtttgccaacatcgggaagagagcaaaagatctcctgtacaaggactacaactttgaccaaaagttttctttgtcgacgtctagcggctctggtttgaatctcacagccactggtgtaaagatcaacgaagacttcattggtgatatacggacacagcataaaagcagtagaactactattgatgtcaccgttgatagtgattctaaagtgtcgaccacagtcactgttgatgaagcactaactggtttgaagacttcattcgccttcaaggtccccgatcacaagtctgggaagcttgatctgcaatatgcgcacaatcgtttttcattgaactcgaccattggtttgacatcagcacctttggttgaactggctgcaactgtcggcacaagtgaacttagcattggtgctgaggttgggtttgacagtacttcagctgctgttactaagtacaactcaggaattggatacaacaagtccgatttctcagcttccttactactggctgataaaggggagactttgaaggcatcttacgttcatttgttcaatccgaccaatggagctacagttgcagctgaggtaacacacaagctgaagaccagagagaactatttcacagttgggagctcccatgcccttgatccttcaacattgctaaagacgagattcagcaactccgggaaggtcggtcttctctgtcagcatgagtggaggccgaaatctcttgtgactctttcagctgagtatgatccaaaggtggtaagtgcgccttcaagaatcggcatggccatatcgctcaagccttgagctgggttaagtcaccttctataaaacagtacaagcataccgtctccaagaacacaagctttggagcgatacctagaacaaccctccattttagcctttttttattttgtaagagtctcttgcaaaggagtattgtcgcttgtcagggagttagacttgttttgtggaacgtttccattagagccaactccacacgaaggattgaaaatacagaggtttgcgttag

SEQ ID NO: 1417 - protein, 276 aa, Zea mays subsp. mays
  peptide (1)..(276): Ceres Seq. ID no. 12365170
  misc_feature (5)..(269): Pfam Name: Eukaryotic porin Pfam Description: Eukaryotic porin
  misc_feature (1)..(276): Homolog of NCBI NO: 1172555 NR Description: 34 kDa outer mitochondrial membrane protein porin
  misc_feature (4)..(276): Homolog of NCBI NO: 7339529 NR Description: voltage-dependent anion channel [Oryza sativa]
  misc_feature (1)..(276): Homolog of NCBI NO: 1172558 NR Description: Outer plastidial membrane protein porin
  misc_feature (1)..(276): Homolog of NCBI NO: 1172556 NR Description: 36 kDa outer mitochondrial membrane protein porin
  misc_feature (1)..(276): Homolog of NCBI NO: 629728 NR Description: porin I, 36K - potato
  misc_feature (1)..(276): Homolog of NCBI NO: 7442953 NR Description: porin - common ice plant
  misc_feature (1)..(276): Homolog of NCBI NO: 36957170 NR Description: VDAC1.1 [Lotus corniculatus var. japonicus]
  misc_feature (1)..(276): Homolog of NCBI NO: 36957183 NR Description: VDAC1.2 [Lotus corniculatus var. japonicus]
  misc_feature (1)..(276): Homolog of NCBI NO: 15242146 NR Description: porin-like protein
  misc_feature (1)..(276): Homolog of NCBI NO: 36957233 NR Description: VDAC3.1 [Lotus corniculatus var. japonicus]
MSKGPVPFANIGKRAKDLLYKDYNFDQKFSLSTSSGSGLNLTATGVKINEDFIGDIRTQHKSSRTTIDVTVDSDSKVSTTVTVDEALTGLKTSFAFKVPDHKSGKLDLQYAHNRFSLNSTIGLTSAPLVELAATVGTSELSIGAEVGFDSTSAAVTKYNSGIGYNKSDFSASLLLADKGETLKASYVHLFNPTNGATVAAEVTHKLKTRENYFTVGSSHALDPSTLLKTRFSNSGKVGLLCQHEWRPKSLVTLSAEYDPKVVSAPSRIGMAISLKP

SEQ ID NO: 1418 - DNA, 1431 bp, Zea mays subsp. mays
  misc_feature (1)..(1431): Ceres Seq. ID no. 13494461
  misc_feature: MA Experiment ID: 108522 Result: Up-regulated in Transcription
  misc_feature: MA Experiment 108522 PARAMETER Experiment Name: Zm_42deg_Heat_P Parameter: Age (day) Value: 8
  misc_feature: MA Experiment 108522 PARAMETER Experiment Name: Zm_42deg_Heat_P Parameter: Organism Value: Zea mays
  misc_feature: MA Experiment 108522 PARAMETER Experiment Name: Zm_42deg_Heat_P Parameter: Plant Line Value: 35A19
  misc_feature: MA Experiment 108522 PARAMETER Experiment Name: Zm_42deg_Heat_P Parameter: Temperature (deg C) Value: 42 vs. 22
  misc_feature: MA Experiment 108522 PARAMETER Experiment Name: Zm_42deg_Heat_P Parameter: Timepoint (hr) Value: 1
  misc_feature: MA Experiment 108522 PARAMETER Experiment Name: Zm_42deg_Heat_P Parameter: Tissue Value: Aerial
aaccttctttccgctcacgacctgagtcccctctcccaggcccaggcagccgccgcccgtctctctctctcctccgagtcccttctcccaccgccgcaagcgctcgcccgagccacctccctctctccctgtggcctgaccgtgatttgggcgtggcatcctaaggcggtcaagattcgagaggctggaggaaccaagcgtagggcctccgccaccacgtcgtcgtccgcgcgcgccgcccgccggcgcaaggaggcgccacagcctccgacgcctagggagatgggggccgattactacaaggtcctcggcgtcgaccgcggcgccggcgacgacgacctcaagaaggcctaccggaagctcgccatgcgatggcaccccgacaagaacaccaccaacaagaaggaggcagaaaccaagttcaaggatatctctgttgcatatgaggtccttagtgatcccaagaaacgtgcaatctatgatcagctaggagaagaaggcttcaaggggcagccgcccccaggagcaggaggttctggcgcatttcccttcttccctggcggggctcattccaccgctccccattttaatcacaggagtgcggatgatatatttaaggagttctttggatcccctggcatgggtggcatgagagcggaaccaggattccagaggtcaatgtttggcaacgatatcttctcttcacgctttggcgctgagggttccaccagtatgcagcagccaccacgcaaggcagctgcaattgagaacccacttccagtcagccttgcagatctgtacaagggcgtcacgaaaaagatgaaaatctcaagagaggctatagatgccagcgggagaatctcaaacgcagaggatattctgacaatagaagtaaggcctggttggaagaagggaacaaagattacatttcccgacaaggggaatgaagctccaaacatgaaagctgctgatattgttttcatcctcgatgagaagccccatgatgttttcactcgggatgggaatgatcttgtggtgactgagaaaatctcgctggtggaagcgctgactggatatactgcacgtgtcactacgctcgatgggcggagcctatcattgcccatcaactcgataatccatccgagctatgaagaggtagttcctagagagggcatgccaatacccaaggacccctctaagaagggaaatctgcggattaagttcaacataatgttcccttctaggctgacgtctgatcagaaggctggtctcaaaaggatattgggttcttaggccgcctcaaatgacattttatagtgaaaggtattgtgaatatcgccagtaattggctaggtagattatttatttatttatgtaacatatctgtaacggatggttataatgtgtcagatttttatctcattattattt

SEQ ID NO: 1419 - protein, 430 aa, Zea mays subsp. mays
  peptide (1)..(430): Ceres Seq. ID no. 13494462
  misc_feature (306)..(428): Pfam Name: DnaJ C terminal region Pfam Description: DnaJ C terminal region
  misc_feature (95)..(428): Homolog of NCBI NO: 15239455 NR Description: heat shock protein, putative [Arabidopsis
  misc_feature (95)..(429): Homolog of NCBI NO: 15228294 NR Description: heat shock protein, putative [Arabidopsis
  misc_feature (95)..(430): Homolog of NCBI NO: 11863723 NR Description: DnaJ like protein [Lycopersicon esculentum]
  misc_feature (95)..(428): Homolog of NCBI NO: 15240968 NR Description: DnaJ protein family [Arabidopsis thaliana]
  misc_feature (95)..(430): Homolog of NCBI NO: 21618097 NR Description: putative heat shock protein [Arabidopsis thaliana]
  misc_feature (95)..(430): Homolog of NCBI NO: 15231987 NR Description: DnaJ protein family [Arabidopsis thaliana]
  misc_feature (95)..(429): Homolog of NCBI NO: 15235310 NR Description: heat shock protein, putative [Arabidopsis
  misc_feature (95)..(430): Homolog of NCBI NO: 6179940 NR Description: DnaJ-like protein [Nicotiana tabacum]
  misc_feature (95)..(429): Homolog of NCBI NO: 15225377 NR Description: heat shock protein, putative [Arabidopsis
  misc_feature (95)..(430): Homolog of NCBI NO: 34904486 NR Description: putative heat shock protein 40
NLLSAHDLSPLSQAQAAAARLSLSSESLLPPPQALARATSLSPCGLTVIWAWHPKAVKIREAGGTKRRASATTSSSARAARRRKEAPQPPTPREMGADYYKVLGVDRGAGDDDLKKAYRKLAMRWHPDKNTTNKKEAETKFKDISVAYEVLSDPKKRAIYDQLGEEGFKGQPPPGAGGSGAFPFFPGGAHSTAPHFNHRSADDIFKEFFGSPGMGGMRAEPGFQRSMFGNDIFSSRFGAEGSTSMQQPPRKAAAIENPLPVSLADLYKGVTKKMKISREAIDASGRISNAEDILTIEVRPGWKKGTKITFPDKGNEAPNMKAADIVFILDEKPHDVFTRDGNDLVVTEKISLVEALTGYTARVTTLDGRSLSLPINSIIHPSYEEVVPREGMPIPKDPSKKGNLRIKFNIMFPSRLTSDQKAGLKRILGS

SEQ ID NO: 1420 - protein, 336 aa, Zea mays subsp. mays
  peptide (1)..(336): Ceres Seq. ID no. 13494463
  misc_feature (212)..(334): Pfam Name: DnaJ C terminal region Pfam Description: DnaJ C terminal region
  misc_feature (1)..(334): Homolog of NCBI NO: 15239455 NR Description: heat shock protein, putative [Arabidopsis
  misc_feature (1)..(335): Homolog of NCBI NO: 15228294 NR Description: heat shock protein, putative [Arabidopsis
  misc_feature (1)..(336): Homolog of NCBI NO: 11863723 NR Description: DnaJ like protein [Lycopersicon esculentum]
  misc_feature (1)..(334): Homolog of NCBI NO: 15240968 NR Description: DnaJ protein family [Arabidopsis thaliana]
  misc_feature (1)..(336): Homolog of NCBI NO: 21618097 NR Description: putative heat shock protein [Arabidopsis thaliana]
  misc_feature (1)..(336): Homolog of NCBI NO: 15231987 NR Description: DnaJ protein family [Arabidopsis thaliana]
  misc_feature (1)..(335): Homolog of NCBI NO: 15235310 NR Description: heat shock protein, putative [Arabidopsis
  misc_feature (1)..(336): Homolog of NCBI NO: 6179940 NR Description: DnaJ-like protein [Nicotiana tabacum]
  misc_feature (1)..(335): Homolog of NCBI NO: 15225377 NR Description: heat shock protein, putative [Arabidopsis
  misc_feature (1)..(336): Homolog of NCBI NO: 34904486 NR Description: putative heat shock protein 40
MGADYYKVLGVDRGAGDDDLKKAYRKLAMRWHPDKNTTNKKEAETKFKDISVAYEVLSDPKKRAIYDQLGEEGFKGQPPPGAGGSGAFPFFPGGAHSTAPHFNHRSADDIFKEFFGSPGMGGMRAEPGFQRSMFGNDIFSSRFGAEGSTSMQQPPRKAAAIENPLPVSLADLYKGVTKKMKISREAIDASGRISNAEDILTIEVRPGWKKGTKITFPDKGNEAPNMKAADIVFILDEKPHDVFTRDGNDLVVTEKISLVEALTGYTARVTTLDGRSLSLPINSIIHPSYEEVVPREGMPIPKDPSKKGNLRIKFNIMFPSRLTSDQKAGLKRILGS

SEQ ID NO: 1421 - protein, 308 aa, Zea mays subsp. mays
  peptide (1)..(308): Ceres Seq. ID no. 13494464
  misc_feature (184)..(306): Pfam Name: DnaJ C terminal region Pfam Description: DnaJ C terminal region
  misc_feature (1)..(306): Homolog of NCBI NO: 15239455 NR Description: heat shock protein, putative [Arabidopsis
  misc_feature (1)..(307): Homolog of NCBI NO: 15228294 NR Description: heat shock protein, putative [Arabidopsis
  misc_feature (1)..(308): Homolog of NCBI NO: 11863723 NR Description: DnaJ like protein [Lycopersicon esculentum]
  misc_feature (1)..(306): Homolog of NCBI NO: 15240968 NR Description: DnaJ protein family [Arabidopsis thaliana]
  misc_feature (1)..(308): Homolog of NCBI NO: 21618097 NR Description: putative heat shock protein [Arabidopsis thaliana]
  misc_feature (1)..(308): Homolog of NCBI NO: 15231987 NR Description: DnaJ protein family [Arabidopsis thaliana]
  misc_feature (1)..(307): Homolog of NCBI NO: 15235310 NR Description: heat shock protein, putative [Arabidopsis
  misc_feature (1)..(308): Homolog of NCBI NO: 6179940 NR Description: DnaJ-like protein [Nicotiana tabacum]
  misc_feature (1)..(307): Homolog of NCBI NO: 15225377 NR Description: heat shock protein, putative [Arabidopsis
  misc_feature (1)..(308): Homolog of NCBI NO: 34904486 NR Description: putative heat shock protein 40
MRWHPDKNTTNKKEAETKFKDISVAYEVLSDPKKRAIYDQLGEEGFKGQPPPGAGGSGAFPFFPGGAHSTAPHFNHRSADDIFKEFFGSPGMGGMRAEPGFQRSMFGNDIFSSRFGAEGSTSMQQPPRKAAAIENPLPVSLADLYKGVTKKMKISREAIDASGRISNAEDILTIEVRPGWKKGTKITFPDKGNEAPNMKAADIVFILDEKPHDVFTRDGNDLVVTEKISLVEALTGYTARVTTLDGRSLSLPINSIIHPSYEEVVPREGMPIPKDPSKKGNLRIKFNIMFPSRLTSDQKAGLKRILGS

SEQ ID NO: 1422 - DNA, 1394 bp, Zea mays subsp. mays
  misc_feature (1)..(1394): Ceres Seq. ID no. 12353583
  misc_feature: MA Experiment ID: 108504 Result: Up-regulated in Transcription
  misc_feature: MA Experiment 108504 PARAMETER Experiment Name: Zm_Drought_P Parameter: Age (day) Value: 8
  misc_feature: MA Experiment 108504 PARAMETER Experiment Name: Zm_Drought_P Parameter: Organism Value: Zea mays
  misc_feature: MA Experiment 108504 PARAMETER Experiment Name: Zm_Drought_P Parameter: Plant Line Value: 35A19
  misc_feature: MA Experiment 108504 PARAMETER Experiment Name: Zm_Drought_P Parameter: Timepoint (hr) Value: 12
  misc_feature: MA Experiment 108504 PARAMETER Experiment Name: Zm_Drought_P Parameter: Tissue Value: Aerial
  misc_feature: MA Experiment 108504 PARAMETER Experiment Name: Zm_Drought_P Parameter: Treatment Value: Drought vs. No Drought
  misc_feature: MA Experiment ID: 108515 Result: Up-regulated in Transcription
  misc_feature: MA Experiment 108515 PARAMETER Experiment Name: Zm_2mM_SA_P Parameter: Age (day) Value: 8
  misc_feature: MA Experiment 108515 PARAMETER Experiment Name: Zm_2mM_SA_P Parameter: Organism Value: Zea mays
  misc_feature: MA Experiment 108515 PARAMETER Experiment Name: Zm_2mM_SA_P Parameter: Plant Line Value: 35A19
  misc_feature: MA Experiment 108515 PARAMETER Experiment Name: Zm_2mM_SA_P Parameter: Timepoint (hr) Value: 12
  misc_feature: MA Experiment 108515 PARAMETER Experiment Name: Zm_2mM_SA_P Parameter: Tissue Value: Aerial
  misc_feature: MA Experiment 108515 PARAMETER Experiment Name: Zm_2mM_SA_P Parameter: Treatment Value: 2mM SA vs. No Treatment
  misc_feature: MA Experiment ID: 108526 Result: Up-regulated in Transcription
  misc_feature: MA Experiment 108526 PARAMETER Experiment Name: Zm_5mM_NO_P Parameter: Age (day) Value: 8
  misc_feature: MA Experiment 108526 PARAMETER Experiment Name: Zm_5mM_NO_P Parameter: Organism Value: Zea mays
  misc_feature: MA Experiment 108526 PARAMETER Experiment Name: Zm_5mM_NO_P Parameter: Plant Line Value: 35A19
  misc_feature: MA Experiment 108526 PARAMETER Experiment Name: Zm_5mM_NO_P Parameter: Timepoint (hr) Value: 1
  misc_feature: MA Experiment 108526 PARAMETER Experiment Name: Zm_5mM_NO_P Parameter: Tissue Value: Aerial
  misc_feature: MA Experiment 108526 PARAMETER Experiment Name: Zm_5mM_NO_P Parameter: Treatment Value: 5mM NO vs. No Treatment
  misc_feature: MA Experiment ID: 108527 Result: Up-regulated in Transcription
  misc_feature: MA Experiment 108527 PARAMETER Experiment Name: Zm_5mM_NO_P Parameter: Age (day) Value: 8
  misc_feature: MA Experiment 108527 PARAMETER Experiment Name: Zm_5mM_NO_P Parameter: Organism Value: Zea mays
  misc_feature: MA Experiment 108527 PARAMETER Experiment Name: Zm_5mM_NO_P Parameter: Plant Line Value: 35A19
  misc_feature: MA Experiment 108527 PARAMETER Experiment Name: Zm_5mM_NO_P Parameter: Timepoint (hr) Value: 6
  misc_feature: MA Experiment 108527 PARAMETER Experiment Name: Zm_5mM_NO_P Parameter: Tissue Value: Aerial
  misc_feature: MA Experiment 108527 PARAMETER Experiment Name: Zm_5mM_NO_P Parameter: Treatment Value: 5mM NO vs. No Treatment
  misc_feature: MA Experiment ID: 108536 Result: Up-regulated in Transcription
  misc_feature: MA Experiment 108536 PARAMETER Experiment Name: Zm_Meristem_P Parameter: Age (day) Value: 8
  misc_feature: MA Experiment 108536 PARAMETER Experiment Name: Zm_Meristem_P Parameter: Organism Value: Zea mays
  misc_feature: MA Experiment 108536 PARAMETER Experiment Name: Zm_Meristem_P Parameter: Plant Line Value: 35A19
  misc_feature: MA Experiment 108536 PARAMETER Experiment Name: Zm_Meristem_P Parameter: Tissue Value: Shoot Meristem vs. Above Shoot Meristem
  misc_feature: MA Experiment ID: 108540 Result: Up-regulated in Transcription
  misc_feature: MA Experiment 108540 PARAMETER Experiment Name: Zm_20percent_PEG_P Parameter: Age (day) Value: 8
  misc_feature: MA Experiment 108540 PARAMETER Experiment Name: Zm_20percent_PEG_P Parameter: Organism Value: Zea mays
  misc_feature: MA Experiment 108540 PARAMETER Experiment Name: Zm_20percent_PEG_P Parameter: Plant Line Value: 35A19
  misc_feature: MA Experiment 108540 PARAMETER Experiment Name: Zm_20percent_PEG_P Parameter: Timepoint (hr) Value: 6
  misc_feature: MA Experiment 108540 PARAMETER Experiment Name: Zm_20percent_PEG_P Parameter: Tissue Value: Aerial
  misc_feature: MA Experiment 108540 PARAMETER Experiment Name: Zm_20percent_PEG_P Parameter: Treatment Value: 20percent PEG vs. No Treatment
  misc_feature: MA Experiment ID: 108542 Result: Up-regulated in Transcription
  misc_feature: MA Experiment 108542 PARAMETER Experiment Name: Zm_150mM_NaCl_P Parameter: Age (day) Value: 8
  misc_feature: MA Experiment 108542 PARAMETER Experiment Name: Zm_150mM_NaCl_P Parameter: Organism Value: Zea mays
  misc_feature: MA Experiment 108542 PARAMETER Experiment Name: Zm_150mM_NaCl_P Parameter: Plant Line Value: 35A19
  misc_feature: MA Experiment 108542 PARAMETER Experiment Name: Zm_150mM_NaCl_P Parameter: Timepoint (hr) Value: 6
  misc_feature: MA Experiment 108542 PARAMETER Experiment Name: Zm_150mM_NaCl_P Parameter: Tissue Value: Aerial
  misc_feature: MA Experiment 108542 PARAMETER Experiment Name: Zm_150mM_NaCl_P Parameter: Treatment Value: 150mM NaCl vs. No Treatment
  misc_feature: MA Experiment ID: 108556 Result: Up-regulated in Transcription
  misc_feature: MA Experiment 108556 PARAMETER Experiment Name: Zm_Drought_P Parameter: Age (day) Value: 9
  misc_feature: MA Experiment 108556 PARAMETER Experiment Name: Zm_Drought_P Parameter: Organism Value: Zea mays
  misc_feature: MA Experiment 108556 PARAMETER Experiment Name: Zm_Drought_P Parameter: Plant Line Value: 35A19
  misc_feature: MA Experiment 108556 PARAMETER Experiment Name: Zm_Drought_P Parameter: Timepoint (hr) Value: 24
  misc_feature: MA Experiment 108556 PARAMETER Experiment Name: Zm_Drought_P Parameter: Tissue Value: Aerial
  misc_feature: MA Experiment 108556 PARAMETER Experiment Name: Zm_Drought_P Parameter: Treatment Value: Drought vs. No Drought
  misc_feature: MA Experiment ID: 108559 Result: Up-regulated in Transcription
  misc_feature: MA Experiment 108559 PARAMETER Experiment Name: Zm_5mM_NO_P Parameter: Age (day) Value: 8
  misc_feature: MA Experiment 108559 PARAMETER Experiment Name: Zm_5mM_NO_P Parameter: Organism Value: Zea mays
  misc_feature: MA Experiment 108559 PARAMETER Experiment Name: Zm_5mM_NO_P Parameter: Plant Line Value: 35A19
  misc_feature: MA Experiment 108559 PARAMETER Experiment Name: Zm_5mM_NO_P Parameter: Timepoint (hr) Value: 12
  misc_feature: MA Experiment 108559 PARAMETER Experiment Name: Zm_5mM_NO_P Parameter: Tissue Value: Aerial
  misc_feature: MA Experiment 108559 PARAMETER Experiment Name: Zm_5mM_NO_P Parameter: Treatment Value: 5mM NO vs. No Treatment
  misc_feature: MA Experiment ID: 20000477 Result: Up-regulated in Transcription
  misc_feature: MA Experiment 20000477 PARAMETER Experiment Name: Zm_5mM_SA_P Parameter: Age (day) Value: 10
  misc_feature: MA Experiment 20000477 PARAMETER Experiment Name: Zm_5mM_SA_P Parameter: Organism Value: Zea mays
  misc_feature: MA Experiment 20000477 PARAMETER Experiment Name: Zm_5mM_SA_P Parameter: Plant Line Value: 35A19
  misc_feature: MA Experiment 20000477 PARAMETER Experiment Name: Zm_5mM_SA_P Parameter: Timepoint (hr) Value: 48
  misc_feature: MA Experiment 20000477 PARAMETER Experiment Name: Zm_5mM_SA_P Parameter: Tissue Value: Aerial
  misc_feature: MA Experiment 20000477 PARAMETER Experiment Name: Zm_5mM_SA_P Parameter: Treatment Value: 5mM SA vs. No Treatment
  misc_feature: MA Experiment ID: 20000478 Result: Up-regulated in Transcription
  misc_feature: MA Experiment 20000478 PARAMETER Experiment Name: Zm_5mM_SA_P Parameter: Age (day) Value: 11
  misc_feature: MA Experiment 20000478 PARAMETER Experiment Name: Zm_5mM_SA_P Parameter: Organism Value: Zea mays
  misc_feature: MA Experiment 20000478 PARAMETER Experiment Name: Zm_5mM_SA_P Parameter: Plant Line Value: 35A19
  misc_feature: MA Experiment 20000478 PARAMETER Experiment Name: Zm_5mM_SA_P Parameter: Timepoint (hr) Value: 72
  misc_feature: MA Experiment 20000478 PARAMETER Experiment Name: Zm_5mM_SA_P Parameter: Tissue Value: Aerial
  misc_feature: MA Experiment 20000478 PARAMETER Experiment Name: Zm_5mM_SA_P Parameter: Treatment Value: 5mM SA vs. No Treatment
  misc_feature: MA Experiment ID: 20000479 Result: Up-regulated in Transcription
  misc_feature: MA Experiment 20000479 PARAMETER Experiment Name: Zm_Drought_P Parameter: Age (day) Value: 10
  misc_feature: MA Experiment 20000479 PARAMETER Experiment Name: Zm_Drought_P Parameter: Organism Value: Zea mays
  misc_feature: MA Experiment 20000479 PARAMETER Experiment Name: Zm_Drought_P Parameter: Plant Line Value: 35A19
  misc_feature: MA Experiment 20000479 PARAMETER Experiment Name: Zm_Drought_P Parameter: Timepoint (hr) Value: 48
  misc_feature: MA Experiment 20000479 PARAMETER Experiment Name: Zm_Drought_P Parameter: Tissue Value: Aerial
  misc_feature: MA Experiment 20000479 PARAMETER Experiment Name: Zm_Drought_P Parameter: Treatment Value: Drought vs. No Drought
  misc_feature: MA Experiment ID: 20000480 Result: Up-regulated in Transcription
  misc_feature: MA Experiment 20000480 PARAMETER Experiment Name: Zm_Drought_P Parameter: Age (day) Value: 11
  misc_feature: MA Experiment 20000480 PARAMETER Experiment Name: Zm_Drought_P Parameter: Organism Value: Zea mays
  misc_feature: MA Experiment 20000480 PARAMETER Experiment Name: Zm_Drought_P Parameter: Plant Line Value: 35A19
  misc_feature: MA Experiment 20000480 PARAMETER Experiment Name: Zm_Drought_P Parameter: Timepoint (hr) Value: 72
  misc_feature: MA Experiment 20000480 PARAMETER Experiment Name: Zm_Drought_P Parameter: Tissue Value: Aerial
  misc_feature: MA Experiment 20000480 PARAMETER Experiment Name: Zm_Drought_P Parameter: Treatment Value: Drought vs. No Drought
  misc_feature: MA Experiment ID: 20000488 Result: Up-regulated in Transcription
  misc_feature: MA Experiment 20000488 PARAMETER Experiment Name: Zm_50mM_NH4NO3_L_to_H_P Parameter: Organism Value: Zea mays
  misc_feature: MA Experiment 20000488 PARAMETER Experiment Name: Zm_50mM_NH4NO3_L_to_H_P Parameter: Timepoint (hr) Value: 8
  misc_feature: MA Experiment 20000488 PARAMETER Experiment Name: Zm_50mM_NH4NO3_L_to_H_P Parameter: Tissue Value: Leaves
  misc_feature: MA Experiment 20000488 PARAMETER Experiment Name: Zm_50mM_NH4NO3_L_to_H_P Parameter: Treatment Value: 50mM NH4NO3 vs. 100mM Mannitol
  misc_feature: MA Experiment ID: 20000533 Result: Up-regulated in Transcription
  misc_feature: MA Experiment 20000533 PARAMETER Experiment Name: Zm_0.001percent_MeJA_P Parameter: Age (day) Value: 11
  misc_feature: MA Experiment 20000533 PARAMETER Experiment Name: Zm_0.001percent_MeJA_P Parameter: Organism Value: Zea mays
  misc_feature: MA Experiment 20000533 PARAMETER Experiment Name: Zm_0.001percent_MeJA_P Parameter: Plant Line Value: 35A19
  misc_feature: MA Experiment 20000533 PARAMETER Experiment Name: Zm_0.001percent_MeJA_P Parameter: Timepoint (hr) Value: 72
  misc_feature: MA Experiment 20000533 PARAMETER Experiment Name: Zm_0.001percent_MeJA_P Parameter: Tissue Value: Aerial
  misc_feature: MA Experiment 20000533 PARAMETER Experiment Name: Zm_0.001percent_MeJA_P Parameter: Treatment Value: 0.001percent MeJA vs. No Treatment
  misc_feature: MA Experiment ID: 20000626 Result: Up-regulated in Transcription
  misc_feature: MA Experiment 20000626 PARAMETER Experiment Name: Zm_Herbicide-Treatments_P Parameter: Timepoint (hr) Value: 12
  misc_feature: MA Experiment 20000626 PARAMETER Experiment Name: Zm_Herbicide-Treatments_P Parameter: Tissue Value: Aerial
  misc_feature: MA Experiment 20000626 PARAMETER Experiment Name: Zm_Herbicide-Treatments_P Parameter: Treatment Value: Roundup vs. No Treatment
  misc_feature: MA Experiment ID: 20001614 Result: Up-regulated in Transcription
  misc_feature: MA Experiment 20001614 PARAMETER Experiment Name: Zm_50ppm_KNO3_L-to-H_P Parameter: Age (day) Value: 21
  misc_feature: MA Experiment 20001614 PARAMETER Experiment Name: Zm_50ppm_KNO3_L-to-H_P Parameter: Organism Value: Zea mays
  misc_feature: MA Experiment 20001614 PARAMETER Experiment Name: Zm_50ppm_KNO3_L-to-H_P Parameter: Plant Line Value: 35A19
  misc_feature: MA Experiment 20001614 PARAMETER Experiment Name: Zm_50ppm_KNO3_L-to-H_P Parameter: Timepoint (hr) Value: 48
  misc_feature: MA Experiment 20001614 PARAMETER Experiment Name: Zm_50ppm_KNO3_L-to-H_P Parameter: Tissue Value: Roots
  misc_feature: MA Experiment 20001614 PARAMETER Experiment Name: Zm_50ppm_KNO3_L-to-H_P Parameter: Treatment Value: 50ppm KNO3 vs. 50ppm KCl
agatcccctcacagtcatcctccacccaccccacccaccgcctccgcctctctctctctctcgtttgttcgtctcggcttccggtcgccgattcttctctgcgcaaaagattcctggtggtggtgcccgtaccttgctccacgcctcgctcgcgtcgcgtgcatggggctggacgtcggcggcatcgggatgggcctggatctgggtctggacctcgggctgttcgccgcgcggagcgccggagggatggcggccgcggccaagggtgcgccggcggagatcgagtcctgcatcaggagcctcgaggaggagcgccggaagatcgaggtgttcaggcgcgagctcccgctctgcgtgcgtctcctcgccgatgtaatcgacgaattgaaggatgaggccgccaagagaggcggagacgcggaggccaaggccgacgacggcgataagcggaaatggatgagcaccgctcagctgtggctcgacagcgacgccaaatccgacgagtctgacaaagagcaactgagtgaaatcacttcgccggagcccaagttgctcggtggcgcacccatgcccataagggccgttgcggcggtgccacccctgccgcctccattcttcaggagagaagacagctctgccggcagtggtctgtcgctggtaccacccgcagctaagccgccgattcctcccatgtctgccagcgacaacgcgagcggcagattctgtgccactatgccaccgtctggctctggggccaacttgcactctcaggctcagcagcaagccaggaaggcgaggcggtgctggtcgccggagcttcaccggctgtttgttgccgccttgcatcaactcggcggccctcaagttgctactccgaagcagatcagggaggtgatgaaggtggacgggcttacaaacgatgaagtgaaaagccatctccagaagtaccggctgcacaacagaagatcccccggcgtcgtggctccggtgagccagtcggtcatgctggcgggcggcctctgggctcctcctcatcaggagcaaagcagctcgcagtccgggtctccccagggcccgcttcagttctctggatccggtgtagcggccaccgtcggcggcgatagcagcagcagcgacgaggacgacaagtccgaaggctacagccggaaatacgtgtaaaggccgcgttcgacggatgagagtgtagagatagcgtcgcggcttctgcttgcccgtctgtggcaataacagattcatcagtcttgagagaggttgtagtgcgtgcgcccaagagctcaactgatcatgggttggattgtttgtttgtcatgtacgtacatggaaagctgatggcttcctgacttttaatttctgggcaggtcccaaaattttcg

SEQ ID NO: 1423 - protein, 392 aa, Zea mays subsp. mays
  peptide (1)..(392): Ceres Seq. ID no. 12353584
  misc_feature (152)..(356): Homolog of NCBI NO: 18395562 NR Description: expressed protein
  misc_feature (92)..(385): Homolog of NCBI NO: 18419989 NR Description: putative cytoskeletal protein; protein id:
  misc_feature (57)..(390): Homolog of NCBI NO: 33146555 NR Description: putative cytoskeletal protein-like protein
  misc_feature (55)..(390): Homolog of NCBI NO: 34915398 NR Description: contains ESTs
  misc_feature (55)..(390): Homolog of NCBI NO: 31415946 NR Description: putative Myb-like DNA-binding protein
  misc_feature (59)..(132): Homolog of NCBI NO: 18402692 NR Description: expressed protein
  misc_feature (246)..(387): Homolog of NCBI NO: 18402692 NR Description: expressed protein
  misc_feature (92)..(385): Homolog of NCBI NO: 30690890 NR Description: cytoskeletal protein -related [Arabidopsis
  misc_feature (92)..(385): Homolog of NCBI NO: 14532434 NR Description: AT4g37180/C7A10_180 [Arabidopsis thaliana]
  misc_feature (93)..(132): Homolog of NCBI NO: 18395562 NR Description: expressed protein
RSPHSHPPPTPPTASASLSLSFVRLGFRSPILLCAKDSWWWCPYLAPRLARVACMGLDVGGIGMGLDLGLDLGLFAARSAGGMAAAAKGAPAEIESCIRSLEEERRKIEVFRRELPLCVRLLADVIDELKDEAAKRGGDAEAKADDGDKRKWMSTAQLWLDSDAKSDESDKEQLSEITSPEPKLLGGAPMPIRAVAAVPPLPPPFFRREDSSAGSGLSLVPPAAKPPIPPMSASDNASGRFCATMPPSGSGANLHSQAQQQARKARRCWSPELHRLFVAALHQLGGPQVATPKQIREVMKVDGLTNDEVKSHLQKYRLHNRRSPGVVAPVSQSVMLAGGLWAPPHQEQSSSQSGSPQGPLQFSGSGVAATVGGDSSSSDEDDKSEGYSRKYV

SEQ ID NO: 1424 - protein, 338 aa, Zea mays subsp. mays
  peptide (1)..(338): Ceres Seq. ID no. 12353585
  misc_feature (5)..(78): Homolog of NCBI NO: 18402692 NR Description: expressed protein
  misc_feature (192)..(333): Homolog of NCBI NO: 18402692 NR Description: expressed protein
  misc_feature (38)..(331): Homolog of NCBI NO: 30690890 NR Description: cytoskeletal protein -related [Arabidopsis
  misc_feature (38)..(331): Homolog of NCBI NO: 14532434 NR Description: AT4g37180/C7A10_180 [Arabidopsis thaliana]
  misc_feature (39)..(78): Homolog of NCBI NO: 18395562 NR Description: expressed protein
  misc_feature (98)..(302): Homolog of NCBI NO: 18395562 NR Description: expressed protein
  misc_feature (38)..(331): Homolog of NCBI NO: 18419989 NR Description: putative cytoskeletal protein; protein id:
  misc_feature (3)..(336): Homolog of NCBI NO: 33146555 NR Description: putative cytoskeletal protein-like protein
  misc_feature (1)..(336): Homolog of NCBI NO: 34915398 NR Description: contains ESTs
  misc_feature (1)..(336): Homolog of NCBI NO: 31415946 NR Description: putative Myb-like DNA-binding protein
MGLDVGGIGMGLDLGLDLGLFAARSAGGMAAAAKGAPAEIESCIRSLEEERRKIEVFRRELPLCVRLLADVIDELKDEAAKRGGDAEAKADDGDKRKWMSTAQLWLDSDAKSDESDKEQLSEITSPEPKLLGGAPMPIRAVAAVPPLPPPFFRREDSSAGSGLSLVPPAAKPPIPPMSASDNASGRFCATMPPSGSGANLHSQAQQQARKARRCWSPELHRLFVAALHQLGGPQVATPKQIREVMKVDGLTNDEVKSHLQKYRLHNRRSPGVVAPVSQSVMLAGGLWAPPHQEQSSSQSGSPQGPLQFSGSGVAATVGGDSSSSDEDDKSEGYSRKYV

SEQ ID NO: 1425 - protein, 329 aa, Zea mays subsp. mays
  peptide (1)..(329): Ceres Seq. ID no. 12353586
  misc_feature (1)..(69): Homolog of NCBI NO: 18402692 NR Description: expressed protein
  misc_feature (183)..(324): Homolog of NCBI NO: 18402692 NR Description: expressed protein
  misc_feature (29)..(322): Homolog of NCBI NO: 30690890 NR Description: cytoskeletal protein -related [Arabidopsis
  misc_feature (29)..(322): Homolog of NCBI NO: 14532434 NR Description: AT4g37180/C7A10_180 [Arabidopsis thaliana]
  misc_feature (30)..(69): Homolog of NCBI NO: 18395562 NR Description: expressed protein
  misc_feature (89)..(293): Homolog of NCBI NO: 18395562 NR Description: expressed protein
  misc_feature (29)..(322): Homolog of NCBI NO: 18419989 NR Description: putative cytoskeletal protein; protein id:
  misc_feature (1)..(327): Homolog of NCBI NO: 33146555 NR Description: putative cytoskeletal protein-like protein
  misc_feature (1)..(327): Homolog of NCBI NO: 34915398 NR Description: contains ESTs
  misc_feature (1)..(327): Homolog of NCBI NO: 31415946 NR Description: putative Myb-like DNA-binding protein
MGLDLGLDLGLFAARSAGGMAAAAKGAPAEIESCIRSLEEERRKIEVFRRELPLCVRLLADVIDELKDEAAKRGGDAEAKADDGDKRKWMSTAQLWLDSDAKSDESDKEQLSEITSPEPKLLGGAPMPIRAVAAVPPLPPPFFRREDSSAGSGLSLVPPAAKPPIPPMSASDNASGRFCATMPPSGSGANLHSQAQQQARKARRCWSPELHRLFVAALHQLGGPQVATPKQIREVMKVDGLTNDEVKSHLQKYRLHNRRSPGVVAPVSQSVMLAGGLWAPPHQEQSSSQSGSPQGPLQFSGSGVAATVGGDSSSSDEDDKSEGYSRKYV

SEQ ID NO: 1426 - DNA, 1325 bp, Zea mays subsp. mays
  misc_feature (1)..(1325): Ceres Seq. ID no. 12411183
  misc_feature: MA Experiment ID: 108543 Result: Up-regulated in Transcription
  misc_feature: MA Experiment ID: 20000492 Result: Down-regulated in Transcription
  misc_feature: MA Experiment 20000492 PARAMETER Experiment Name: Zm_Hybrid_Seed_Dev_P Parameter: DAP Value: 12
  misc_feature: MA Experiment 20000492 PARAMETER Experiment Name: Zm_Hybrid_Seed_Dev_P Parameter: Organism Value: Zea mays
  misc_feature: MA Experiment 20000492 PARAMETER Experiment Name: Zm_Hybrid_Seed_Dev_P Parameter: Plant Line Value: 35A19
  misc_feature: MA Experiment 20000492 PARAMETER Experiment Name: Zm_Hybrid_Seed_Dev_P Parameter: Tissue Value: Fert Kernel vs. Unfert Floret
gcaaaaagtcgccctcttcctccactcgccgacacacacggcgcaaatccccacaaccccaagcgggcgggcggacttccacccaccttctcgcgcggcgacgtgctcggctcgcttccagccacctcgctcgccgcccgcctcggaatccccgccgcgagatcttgttccccggaggatggaggtgaaaacagtaaaagttagcaatctttcattaaatgctttgaaaagagagatcacagagttcttcagtttctcaggagatatagaatatgttgaaatgcaaagtgaatctgaatggtcacagcttgcttatgtcacatttaaagactcacagggagcagacactgctgttcttctctcgggggcaacaatcgtggatcgtgctgtcattataactcctgctgagaactatcagctgcctctggaagcacacaaacaattatcgggagcaaacgtctctactgaatcagcagtaaggaaggcagaagatgttgtgagcagcatgctggccaagggcttcgtcctcagcaaagacgcactcaacttggcaagatcatttgacgagcgtcacaacatcctatccaacgccactgccactgttgcatccctagaccgccagtatggcctgagcgaaaagatcagtctcggaagggccattgtcggcagcaaggtcaaggaggtggacgagcggtaccaggtctcagaactcaccaagtccgccttggctgccgccgagcagaaagccagcgtcgcgggctccgctatactgagcaaccagtatgtctcggctggtgcctcgtggctaacaagcgcgttcgatatggtaacgaaggcagcgggcgacatgacctcgatggccaaagataaggtggagagggccgaggaggagaggaaagccatcatgtgggaggagaggagtgggctggtcagcgagtacgcgaagatccatcttgacgagccctcttcgtgggagcccgcggttctgcctctggaatcagtggacgagcagaagctccaagctgtctgacacgcagagaccgagtctctcgcacgaaattcttttttgcagctcgtcctatatatagattgttctttttcgtcggtgcactggatcaaaacaattgcgcttgtcggccagtgccgtgtaaatttctgagagttggtcttgtgttattaccaggttttgttcgtttctttcgttttggagagagtggtgctaccagcactactacactagactactctgtgtgaatggaatactactgtactttgtctcttcttctactactactacagaaacataatataacttccttcgttag

SEQ ID NO: 1427 - protein, 342 aa, Zea mays subsp. mays
  peptide (1)..(342): Ceres Seq. ID no. 12411184
  misc_feature (65)..(132): Pfam Name: RNA recognition motif. (a.k.a. RRM, RBD, or RNP domain) Pfam Description: RNA recognition motif. (a.k.a. RRM, RBD, or RNP
  misc_feature (62)..(302): Homolog of NCBI NO: 30697598 NR Description: RNA recognition motif (RRM)-containing protein
  misc_feature (62)..(302): Homolog of NCBI NO: 30697595 NR Description: RNA recognition motif (RRM)-containing protein
  misc_feature (62)..(302): Homolog of NCBI NO: 18408904 NR Description: RRM-containing protein
  misc_feature (64)..(320): Homolog of NCBI NO: 8809670 NR Description: gene_id:MSD23.5~pir||C71447~similar to unknown
  misc_feature (60)..(299): Homolog of NCBI NO: 34897896 NR Description: ESTs D15336(C0474),C98053(C0474) correspond to a of the predicted gene.~Similar to Arabidopsis thaliana DNA
  misc_feature (64)..(342): Homolog of NCBI NO: 7485085 NR Description: hypothetical protein - Arabidopsis thaliana
  misc_feature (60)..(320): Homolog of NCBI NO: 30695063 NR Description: RNA recognition motif (RRM)-containing protein
  misc_feature (64)..(312): Homolog of NCBI NO: 38347069 NR Description: OSJNBa0006A01.10 [Oryza sativa (japonica
  misc_feature (60)..(342): Homolog of NCBI NO: 18414951 NR Description: RRM-containing protein
  misc_feature (60)..(342): Homolog of NCBI NO: 18071362 NR Description: putative splicing regulatory protein
QKVALFLHSPTHTAQIPTTPSGRADFHPPSRAATCSARFQPPRSPPASESPPRDLVPRRMEVKTVKVSNLSLNALKREITEFFSFSGDIEYVEMQSESEWSQLAYVTFKDSQGADTAVLLSGATIVDRAVIITPAENYQLPLEAHKQLSGANVSTESAVRKAEDVVSSMLAKGFVLSKDALNLARSFDERHNILSNATATVASLDRQYGLSEKISLGRAIVGSKVKEVDERYQVSELTKSALAAAEQKASVAGSAILSNQYVSAGASWLTSAFDMVTKAAGDMTSMAKDKVERAEEERKAIMWEERSGLVSEYAKIHLDEPSSWEPAVLPLESVDEQKLQAV

SEQ ID NO: 1428 - protein, 283 aa, Zea mays subsp. mays
  peptide (1)..(283): Ceres Seq. ID no. 12411185
  misc_feature (6)..(73): Pfam Name: RNA recognition motif. (a.k.a. RRM, RBD, or RNP domain) Pfam Description: RNA recognition motif. (a.k.a. RRM, RBD, or RNP
  misc_feature (3)..(243): Homolog of NCBI NO: 30697598 NR Description: RNA recognition motif (RRM)-containing protein
  misc_feature (3)..(243): Homolog of NCBI NO: 30697595 NR Description: RNA recognition motif (RRM)-containing protein
  misc_feature (3)..(243): Homolog of NCBI NO: 18408904 NR Description: RRM-containing protein
  misc_feature (5)..(261): Homolog of NCBI NO: 8809670 NR Description: gene_id:MSD23.5~pir||C71447~similar to unknown
  misc_feature (1)..(240): Homolog of NCBI NO: 34897896 NR Description: ESTs D15336(C0474),C98053(C0474) correspond to a of the predicted gene.~Similar to Arabidopsis thaliana DNA
  misc_feature (5)..(283): Homolog of NCBI NO: 7485085 NR Description: hypothetical protein - Arabidopsis thaliana
  misc_feature (1)..(261): Homolog of NCBI NO: 30695063 NR Description: RNA recognition motif (RRM)-containing protein
  misc_feature (5)..(253): Homolog of NCBI NO: 38347069 NR Description: OSJNBa0006A01.10 [Oryza sativa (japonica
  misc_feature (1)..(283): Homolog of NCBI NO: 18414951 NR Description: RRM-containing protein
  misc_feature (1)..(283): Homolog of NCBI NO: 18071362 NR Description: putative splicing regulatory protein
MEVKTVKVSNLSLNALKREITEFFSFSGDIEYVEMQSESEWSQLAYVTFKDSQGADTAVLLSGATIVDRAVIITPAENYQLPLEAHKQLSGANVSTESAVRKAEDVVSSMLAKGFVLSKDALNLARSFDERHNILSNATATVASLDRQYGLSEKISLGRAIVGSKVKEVDERYQVSELTKSALAAAEQKASVAGSAILSNQYVSAGASWLTSAFDMVTKAAGDMTSMAKDKVERAEEERKAIMWEERSGLVSEYAKIHLDEPSSWEPAVLPLESVDEQKLQAV

SEQ ID NO: 1429 - protein, 249 aa, Zea mays subsp. mays
  peptide (1)..(249): Ceres Seq. ID no. 12411186
  misc_feature (1)..(209): Homolog of NCBI NO: 30697598 NR Description: RNA recognition motif (RRM)-containing protein
  misc_feature (1)..(209): Homolog of NCBI NO: 30697595 NR Description: RNA recognition motif (RRM)-containing protein
  misc_feature (1)..(209): Homolog of NCBI NO: 18408904 NR Description: RRM-containing protein
  misc_feature (1)..(227): Homolog of NCBI NO: 8809670 NR Description: gene_id:MSD23.5~pir||C71447~similar to unknown
  misc_feature (1)..(206): Homolog of NCBI NO: 34897896 NR Description: ESTs D15336(C0474),C98053(C0474) correspond to a of the predicted gene.~Similar to Arabidopsis thaliana DNA
  misc_feature (1)..(249): Homolog of NCBI NO: 7485085 NR Description: hypothetical protein - Arabidopsis thaliana
  misc_feature (1)..(227): Homolog of NCBI NO: 30695063 NR Description: RNA recognition motif (RRM)-containing protein
  misc_feature (1)..(219): Homolog of NCBI NO: 38347069 NR Description: OSJNBa0006A01.10 [Oryza sativa (japonica
  misc_feature (1)..(249): Homolog of NCBI NO: 18414951 NR Description: RRM-containing protein
  misc_feature (1)..(249): Homolog of NCBI NO: 18071362 NR Description: putative splicing regulatory protein
MQSESEWSQLAYVTFKDSQGADTAVLLSGATIVDRAVIITPAENYQLPLEAHKQLSGANVSTESAVRKAEDVVSSMLAKGFVLSKDALNLARSFDERHNILSNATATVASLDRQYGLSEKISLGRAIVGSKVKEVDERYQVSELTKSALAAAEQKASVAGSAILSNQYVSAGASWLTSAFDMVTKAAGDMTSMAKDKVERAEEERKAIMWEERSGLVSEYAKIHLDEPSSWEPAVLPLESVDEQKLQAV

SEQ ID NO: 1430 - DNA, 1997 bp, Zea mays subsp. mays
  misc_feature (1)..(1997): Ceres Seq. ID no. 12372765
  misc_feature: MA Experiment ID: 108535 Result: Up-regulated in Transcription
  misc_feature: MA Experiment 108535 PARAMETER Experiment Name: Zm_Meristem_P Parameter: Age (day) Value: 8
  misc_feature: MA Experiment 108535 PARAMETER Experiment Name: Zm_Meristem_P Parameter: Organism Value: Zea mays
  misc_feature: MA Experiment 108535 PARAMETER Experiment Name: Zm_Meristem_P Parameter: Plant Line Value: 35A19
  misc_feature: MA Experiment 108535 PARAMETER Experiment Name: Zm_Meristem_P Parameter: Tissue Value: Root Meristem vs. Above Root Meristem
attcagatttcatcctcggcgtcgtctcctgtcctctccacgccaagcaacctccccaccccgccccaccctccatgctcgcctcgagatcttagcgggcagctccggagagcgccgacgagccccctgatccctcctcgccgccgccgccaaccgaccgggggaggagaggaggggaggggagcgatggagaccgccgactactccgggaagctcttcgtcggcggcatctcatgggagacggacgaggaccgcctccgcgagtacttcggccgcttcggtgaggtcactgaggccgtcatcatgcgggaccgcagcacgggccgcgctcgagggttcggtttcgtggtctttgctgacgccacggtcgccgagcgcgtcaccatcgaaaaacacatgatcgacggccgaatggtggaggccaagaaggctgttcccagggatgaccacagtattgtgagcaagagcaacacaagcagcatagggtcacctgggccgggccgtaccagaaagatctttgttggaggtctgccctcaaatgttacagaggctgacttcagggggtattttgagcagttcggtgtcataactgatgtggttgtgatgtatgatcacaacacacagagaccgaggggctttggattcatcacctatgattcagaagatgctgtggacaaagccctgcacaagagctttcatgagctaaatggtaaaatggttgaggtcaagaaggctgttccaaaggagcagtctcctggacctgttgcacgctcacctgcaggagtggggcagaactatgctatgaacagggttcatagcttcttgaatgacttcaaccaaggttacaatccgaaccctataggaggttatggcatgagggtggatggaaggtttggccagctttcaggtgcacgaaatgggctctcttcttttggcccaggttatgggatgggtatgaacgttgaaggtaggatgagtggaacttttggtgcaaactctggtttcatcagtaactccaatgggaggcaaatgggttcatacttcaatggaagttcgaatagattgagtagttctattgggtatcttggttatgactcaggatcgatgttgagttccatgtctaggaattttaatgcaggtgtaaactacccgatcaatcctacaaacatgagtgcttttgctgcccttggaaatgggggtggcgtcaattatatgggtctcccttctattgcccctgagttggcccagttgggcaacatttcaagccttgggtcagggaactttagccgtggagctggagttaataacttaagcttaccttctggctcctatgggaggagcaattcaactggtacaattggtgaacctttttctgcatcaggcaatgcatatgaagtgaacaacccagatacatatgggaacaactctatttatggtggaacatcctggaggttcccttcatctgaagttgacgtgccttctttcagtcatgatcttggaaatgttgatccgaatatgaaatcagacatatcagcaaattacatgggaaattattctgttagcaacaatcagccaagcagaggtatcacttcatagtgggagtattactacacattcatatatgacttgggatagatgaagcacccattcagtcaggcagccaggtgcgtgcatggcactgtgaatgggtgatatgtcaggttagttttgtctagctgaccagcggtgtggtttacaacaccaacatgctagagggggaggaagcggatacagaaacattttctgaggggcttctttttctttgagtcatgtttttagttttgattcctgcgcgtggctagctccttttggtttttgaatgagatgtgtagtggtgattattgcggcgcatattttagagatcgtggttcttccaacataagctggaaaaagaagtctgtatacggatgaacatgtataccaaccaaagggatgctgtattatcttgcccatttgtt

SEQ ID NO: 1431 - protein, 531 aa, Zea mays subsp. mays
  peptide (1)..(531): Ceres Seq. ID no. 12372766
  misc_feature (172)..(242): Pfam Name: RNA recognition motif. (a.k.a. RRM, RBD, or RNP domain) Pfam Description: RNA recognition motif. (a.k.a. RRM, RBD, or RNP
  misc_feature (63)..(434): Homolog of NCBI NO: 18416794 NR Description: heterogeneous nuclear ribonucleoprotein (hnRNP),
  misc_feature (63)..(434): Homolog of NCBI NO: 7487039 NR Description: hypothetical protein T15N24.100 - Arabidopsis
  misc_feature (69)..(400): Homolog of NCBI NO: 21553963 NR Description: RNA-binding protein-like [Arabidopsis thaliana]
  misc_feature (69)..(400): Homolog of NCBI NO: 9758790 NR Description: RNA-binding protein-like [Arabidopsis thaliana]
  misc_feature (69)..(449): Homolog of NCBI NO: 18422817 NR Description: heterogeneous nuclear ribonucleoprotein (hnRNP),
  misc_feature (69)..(493): Homolog of NCBI NO: 18398061 NR Description: heterogeneous nuclear ribonucleoprotein (hnRNP),
  misc_feature (69)..(493): Homolog of NCBI NO: 30680456 NR Description: heterogeneous nuclear ribonucleoprotein (hnRNP),
  misc_feature (69)..(493): Homolog of NCBI NO: 15292697 NR Description: putative RNA-binding protein [Arabidopsis
  misc_feature (69)..(493): Homolog of NCBI NO: 6648193 NR Description: putative RNA-binding protein [Arabidopsis
  misc_feature (63)..(531): Homolog of NCBI NO: 38175737 NR Description: putative heterogeneous nuclear ribonucleoprotein
IQISSSASSPVLSTPSNLPTPPHPPCSPRDLSGQLRRAPTSPLIPPRRRRQPTGGGEEGRGAMETADYSGKLFVGGISWETDEDRLREYFGRFGEVTEAVIMRDRSTGRARGFGFVVFADATVAERVTIEKHMIDGRMVEAKKAVPRDDHSIVSKSNTSSIGSPGPGRTRKIFVGGLPSNVTEADFRGYFEQFGVITDVVVMYDHNTQRPRGFGFITYDSEDAVDKALHKSFHELNGKMVEVKKAVPKEQSPGPVARSPAGVGQNYAMNRVHSFLNDFNQGYNPNPIGGYGMRVDGRFGQLSGARNGLSSFGPGYGMGMNVEGRMSGTFGANSGFISNSNGRQMGSYFNGSSNRLSSSIGYLGYDSGSMLSSMSRNFNAGVNYPINPTNMSAFAALGNGGGVNYMGLPSIAPELAQLGNISSLGSGNFSRGAGVNNLSLPSGSYGRSNSTGTIGEPFSASGNAYEVNNPDTYGNNSIYGGTSWRFPSSEVDVPSFSHDLGNVDPNMKSDISANYMGNYSVSNNQPSRGITS

SEQ ID NO: 1432 - protein, 469 aa, Zea mays subsp. mays
  peptide (1)..(469): Ceres Seq. ID no. 12372767
  misc_feature (110)..(180): Pfam Name: RNA recognition motif. (a.k.a. RRM, RBD, or RNP domain) Pfam Description: RNA recognition motif. (a.k.a. RRM, RBD, or RNP
  misc_feature (1)..(372): Homolog of NCBI NO: 18416794 NR Description: heterogeneous nuclear ribonucleoprotein (hnRNP),
  misc_feature (1)..(372): Homolog of NCBI NO: 7487039 NR Description: hypothetical protein T15N24.100 - Arabidopsis
  misc_feature (7)..(338): Homolog of NCBI NO: 21553963 NR Description: RNA-binding protein-like [Arabidopsis thaliana]
  misc_feature (7)..(338): Homolog of NCBI NO: 9758790 NR Description: RNA-binding protein-like [Arabidopsis thaliana]
  misc_feature (7)..(387): Homolog of NCBI NO: 18422817 NR Description: heterogeneous nuclear ribonucleoprotein (hnRNP),
  misc_feature (7)..(431): Homolog of NCBI NO: 30680456 NR Description: heterogeneous nuclear ribonucleoprotein (hnRNP),
  misc_feature (7)..(431): Homolog of NCBI NO: 18398061 NR Description: heterogeneous nuclear ribonucleoprotein (hnRNP),
  misc_feature (7)..(431): Homolog of NCBI NO: 15292697 NR Description: putative RNA-binding protein [Arabidopsis
  misc_feature (7)..(431): Homolog of NCBI NO: 6648193 NR Description: putative RNA-binding protein [Arabidopsis
  misc_feature (1)..(469): Homolog of NCBI NO: 38175737 NR Description: putative heterogeneous nuclear ribonucleoprotein
METADYSGKLFVGGISWETDEDRLREYFGRFGEVTEAVIMRDRSTGRARGFGFVVFADATVAERVTIEKHMIDGRMVEAKKAVPRDDHSIVSKSNTSSIGSPGPGRTRKIFVGGLPSNVTEADFRGYFEQFGVITDVVVMYDHNTQRPRGFGFITYDSEDAVDKALHKSFHELNGKMVEVKKAVPKEQSPGPVARSPAGVGQNYAMNRVHSFLNDFNQGYNPNPIGGYGMRVDGRFGQLSGARNGLSSFGPGYGMGMNVEGRMSGTFGANSGFISNSNGRQMGSYFNGSSNRLSSSIGYLGYDSGSMLSSMSRNFNAGVNYPINPTNMSAFAALGNGGGVNYMGLPSIAPELAQLGNISSLGSGNFSRGAGVNNLSLPSGSYGRSNSTGTIGEPFSASGNAYEVNNPDTYGNNSIYGGTSWRFPSSEVDVPSFSHDLGNVDPNMKSDISANYMGNYSVSNNQPSRGITS

SEQ ID NO: 1433 - protein, 430 aa, Zea mays subsp. mays
  peptide (1)..(430): Ceres Seq. ID no. 12372768
  misc_feature (71)..(141): Pfam Name: RNA recognition motif. (a.k.a. RRM, RBD, or RNP domain) Pfam Description: RNA recognition motif. (a.k.a. RRM, RBD, or RNP
  misc_feature (1)..(299): Homolog of NCBI NO: 21553963 NR Description: RNA-binding protein-like [Arabidopsis thaliana]
  misc_feature (1)..(299): Homolog of NCBI NO: 9758790 NR Description: RNA-binding protein-like [Arabidopsis thaliana]
  misc_feature (1)..(348): Homolog of NCBI NO: 18422817 NR Description: heterogeneous nuclear ribonucleoprotein (hnRNP),
  misc_feature (1)..(392): Homolog of NCBI NO: 18398061 NR Description: heterogeneous nuclear ribonucleoprotein (hnRNP),
  misc_feature (1)..(333): Homolog of NCBI NO: 18416794 NR Description: heterogeneous nuclear ribonucleoprotein (hnRNP),
  misc_feature (1)..(333): Homolog of NCBI NO: 7487039 NR Description: hypothetical protein T15N24.100 - Arabidopsis
  misc_feature (1)..(392): Homolog of NCBI NO: 15292697 NR Description: putative RNA-binding protein [Arabidopsis
  misc_feature (1)..(392): Homolog of NCBI NO: 30680456 NR Description: heterogeneous nuclear ribonucleoprotein (hnRNP),
  misc_feature (1)..(392): Homolog of NCBI NO: 6648193 NR Description: putative RNA-binding protein [Arabidopsis
  misc_feature (1)..(430): Homolog of NCBI NO: 38175737 NR Description: putative heterogeneous nuclear ribonucleoprotein
MRDRSTGRARGFGFVVFADATVAERVTIEKHMIDGRMVEAKKAVPRDDHSIVSKSNTSSIGSPGPGRTRKIFVGGLPSNVTEADFRGYFEQFGVITDVVVMYDHNTQRPRGFGFITYDSEDAVDKALHKSFHELNGKMVEVKKAVPKEQSPGPVARSPAGVGQNYAMNRVHSFLNDFNQGYNPNPIGGYGMRVDGRFGQLSGARNGLSSFGPGYGMGMNVEGRMSGTFGANSGFISNSNGRQMGSYFNGSSNRLSSSIGYLGYDSGSMLSSMSRNFNAGVNYPINPTNMSAFAALGNGGGVNYMGLPSIAPELAQLGNISSLGSGNFSRGAGVNNLSLPSGSYGRSNSTGTIGEPFSASGNAYEVNNPDTYGNNSIYGGTSWRFPSSEVDVPSFSHDLGNVDPNMKSDISANYMGNYSVSNNQPSRGITS

SEQ ID NO: 1434 - DNA, 1746 bp, Zea mays subsp. mays
  misc_feature (1)..(1746): Ceres Seq. ID no. 12373429
  misc_feature: MA Experiment ID: 20000535 Result: Up-regulated in Transcription
  misc_feature: MA Experiment 20000535 PARAMETER Experiment Name: Zm_Hybrid_Seed_Dev_P Parameter: DAP Value: 30 vs. 12
  misc_feature: MA Experiment 20000535 PARAMETER Experiment Name: Zm_Hybrid_Seed_Dev_P Parameter: Organism Value: Zea mays
  misc_feature: MA Experiment 20000535 PARAMETER Experiment Name: Zm_Hybrid_Seed_Dev_P Parameter: Plant Line Value: 35A19
  misc_feature: MA Experiment 20000535 PARAMETER Experiment Name: Zm_Hybrid_Seed_Dev_P Parameter: Tissue Value: Embryo vs. Unfert Floret
gaggaaaaacttttttgaaaacaaaaaaccccccactcccacgtcccaccacctcgcctcggccgctgcgacagtgcatacgccccctcccctcctgactcctgttgcgtatacaccgtatgtgtctactgtgactccgggtcccgggggggtaagcgaccgagcaaggcttcgtctccggcggcggaggcggatctgggagggatggggaaccggataggcgggcggcgcaagtcgggggtggaggagcggttcacgcggccgcagggtctctacgaccacaaggacatcgaccagaagaagctgcgcaagctcatcctcgaggccaagctcgcgccctgctacccgggcgccgacgacgccgcgcccggcggaggggacctcgaggagtgccccatctgcttcctgtactacccaagcctcaaccgttcaaagtgttgctcaaaggggatatgtacagagtgttttcttcaaatgaaaccaactcatactgctcgacctacacagtgcccattctgcaaaacgcctaattatgctgtggagtatcgtggtgtgaaaacaaaggaggaaaggagcatagagcagtttgaagaacagaaagtcatagaagcacagttgaggatgcgccaaaaagaactccaagatgaagaagctaaaatgagaagaaaacagggcaggtgttcttctagcagaacggtaacaccaacaacagaagttgagtatcgagatatttgcagcacatccttttcagtgccatcatatcaatgtactgagcaaggaaatgaatgctgttcatctgaaccttcatgctctagccaggctaacaggcggcctttccattctagacacaaccgtgatgataatgttgacatgaatctggagaacatgatggttatggaagcaatttggcgttccattcagcaggaacaaggacatctagtaaatcctgtttgtggcagctactttcctgtaattgagccaccatcacgtgaaaggcaggcatttcttccggctgctcctctagaaatgcctcatccaggtggatactcttgtgttgcggctttggctgagcaccagccaccaagcatggatttctcttacatggctggcagtagcacatacccagtctttgacatgatccgccgaccgtgcaacatgtctagtggaagcttgtgcagcgtcgagaacagttcactagacacctggagcgggatggcaccaaattacagcagaggagtggtaagagaggagggagagtgctcaaccgaccactggtcggagggtgcggaggcgggaacaagctatgccggatcggacatcatggtggatgcaggggccatgcaaccgctgcctttcgctgagaatttcaccatggctccaagccacttccgcccggagagcatcgaggagcagatgatgttttccatggccgtgtcactagcagaaggtcatcatggtaggacgcaagcgcaaggtctggcatggttgtaagttgtataacactaattttgacgccttgatccctgcccctttctgttggttcgacctgcttcccctgcacctctgcttttttgccactttgtttagctttttgctccttttttttcttttctttcttttttgcatgtgtttcttcatggcttgatatagatcttgctatagtcctccattgtcattgcttatatgtatgtaaaatggaatatgtggaaataggaaagaaaatgggtcgaaagttcttttgccggt

SEQ ID NO: 1435 - protein, 428 aa, Zea mays subsp. mays
  peptide (1)..(428): Ceres Seq. ID no. 12373430
  misc_feature (1)..(355): Homolog of NCBI NO: 25373045 NR Description: F20D23.17 protein - Arabidopsis thaliana
  misc_feature (1)..(240): Homolog of NCBI NO: 18394446 NR Description: Expressed protein
  misc_feature (1)..(101): Homolog of NCBI NO: 8052547 NR Description: F3F9.7 [Arabidopsis thaliana]
  misc_feature (63)..(422): Homolog of NCBI NO: 8052547 NR Description: F3F9.7 [Arabidopsis thaliana]
  misc_feature (397)..(422): Homolog of NCBI NO: 18411948 NR Description: expressed protein
  misc_feature (1)..(291): Homolog of NCBI NO: 18411948 NR Description: expressed protein
MGNRIGGRRKSGVEERFTRPQGLYDHKDIDQKKLRKLILEAKLAPCYPGADDAAPGGGDLEECPICFLYYPSLNRSKCCSKGICTECFLQMKPTHTARPTQCPFCKTPNYAVEYRGVKTKEERSIEQFEEQKVIEAQLRMRQKELQDEEAKMRRKQGRCSSSRTVTPTTEVEYRDICSTSFSVPSYQCTEQGNECCSSEPSCSSQANRRPFHSRHNRDDNVDMNLENMMVMEAIWRSIQQEQGHLVNPVCGSYFPVIEPPSRERQAFLPAAPLEMPHPGGYSCVAALAEHQPPSMDFSYMAGSSTYPVFDMIRRPCNMSSGSLCSVENSSLDTWSGMAPNYSRGVVREEGECSTDHWSEGAEAGTSYAGSDIMVDAGAMQPLPFAENFTMAPSHFRPESIEEQMMFSMAVSLAEGHHGRTQAQGLAWL

SEQ ID NO: 1436 - protein, 338 aa, Zea mays subsp. mays
  peptide (1)..(338): Ceres Seq. ID no. 12373431
  misc_feature (1)..(265): Homolog of NCBI NO: 25373045 NR Description: F20D23.17 protein - Arabidopsis thaliana
  misc_feature (1)..(150): Homolog of NCBI NO: 18394446 NR Description: Expressed protein
  misc_feature (1)..(11): Homolog of NCBI NO: 8052547 NR Description: F3F9.7 [Arabidopsis thaliana]
  misc_feature (1)..(332): Homolog of NCBI NO: 8052547 NR Description: F3F9.7 [Arabidopsis thaliana]
  misc_feature (307)..(332): Homolog of NCBI NO: 18411948 NR Description: expressed protein
  misc_feature (1)..(201): Homolog of NCBI NO: 18411948 NR Description: expressed protein
MKPTHTARPTQCPFCKTPNYAVEYRGVKTKEERSIEQFEEQKVIEAQLRMRQKELQDEEAKMRRKQGRCSSSRTVTPTTEVEYRDICSTSFSVPSYQCTEQGNECCSSEPSCSSQANRRPFHSRHNRDDNVDMNLENMMVMEAIWRSIQQEQGHLVNPVCGSYFPVIEPPSRERQAFLPAAPLEMPHPGGYSCVAALAEHQPPSMDFSYMAGSSTYPVFDMIRRPCNMSSGSLCSVENSSLDTWSGMAPNYSRGVVREEGECSTDHWSEGAEAGTSYAGSDIMVDAGAMQPLPFAENFTMAPSHFRPESIEEQMMFSMAVSLAEGHHGRTQAQGLAWL

SEQ ID NO: 1437 - protein, 289 aa, Zea mays subsp. mays
  peptide (1)..(289): Ceres Seq. ID no. 12373432
  misc_feature (1)..(216): Homolog of NCBI NO: 25373045 NR Description: F20D23.17 protein - Arabidopsis thaliana
  misc_feature (1)..(101): Homolog of NCBI NO: 18394446 NR Description: Expressed protein
  misc_feature (1)..(283): Homolog of NCBI NO: 8052547 NR Description: F3F9.7 [Arabidopsis thaliana]
  misc_feature (258)..(283): Homolog of NCBI NO: 18411948 NR Description: expressed protein
  misc_feature (1)..(152): Homolog of NCBI NO: 18411948 NR Description: expressed protein
MRQKELQDEEAKMRRKQGRCSSSRTVTPTTEVEYRDICSTSFSVPSYQCTEQGNECCSSEPSCSSQANRRPFHSRHNRDDNVDMNLENMMVMEAIWRSIQQEQGHLVNPVCGSYFPVIEPPSRERQAFLPAAPLEMPHPGGYSCVAALAEHQPPSMDFSYMAGSSTYPVFDMIRRPCNMSSGSLCSVENSSLDTWSGMAPNYSRGVVREEGECSTDHWSEGAEAGTSYAGSDIMVDAGAMQPLPFAENFTMAPSHFRPESIEEQMMFSMAVSLAEGHHGRTQAQGLAWL

SEQ ID NO: 1438 - DNA, 1818 bp, Zea mays subsp. mays
  misc_feature (1)..(1818): Ceres Seq. ID no. 13492735
  misc_feature: MA Experiment ID: 108522 Result: Down-regulated in Transcription
  misc_feature: MA Experiment 108522 PARAMETER Experiment Name: Zm_42deg_Heat_P Parameter: Age (day) Value: 8
  misc_feature: MA Experiment 108522 PARAMETER Experiment Name: Zm_42deg_Heat_P Parameter: Organism Value: Zea mays
  misc_feature: MA Experiment 108522 PARAMETER Experiment Name: Zm_42deg_Heat_P Parameter: Plant Line Value: 35A19
  misc_feature: MA Experiment 108522 PARAMETER Experiment Name: Zm_42deg_Heat_P Parameter: Temperature (deg C) Value: 42 vs. 22
  misc_feature: MA Experiment 108522 PARAMETER Experiment Name: Zm_42deg_Heat_P Parameter: Timepoint (hr) Value: 1
  misc_feature: MA Experiment 108522 PARAMETER Experiment Name: Zm_42deg_Heat_P Parameter: Tissue Value: Aerial
  misc_feature: MA Experiment ID: 108543 Result: Up-regulated in Transcription
  misc_feature: MA Experiment ID: 108545 Result: Up-regulated in Transcription
  misc_feature: MA Experiment 108545 PARAMETER Experiment Name: Zm_Imbibed_Seeds_P Parameter: Age (day) Value: 3 vs. 2
  misc_feature: MA Experiment 108545 PARAMETER Experiment Name: Zm_Imbibed_Seeds_P Parameter: Organism Value: Zea mays
  misc_feature: MA Experiment 108545 PARAMETER Experiment Name: Zm_Imbibed_Seeds_P Parameter: Plant Line Value: 35A19
  misc_feature: MA Experiment 108545 PARAMETER Experiment Name: Zm_Imbibed_Seeds_P Parameter: Tissue Value: Aerial vs. Embryo
  misc_feature: MA Experiment ID: 108689 Result: Down-regulated in Transcription
  misc_feature: MA Experiment 108689 PARAMETER Experiment Name: Zm_Drought_Roots_P Parameter: Age (day) Value: 9
  misc_feature: MA Experiment 108689 PARAMETER Experiment Name: Zm_Drought_Roots_P Parameter: Organism Value: Zea mays
  misc_feature: MA Experiment 108689 PARAMETER Experiment Name: Zm_Drought_Roots_P Parameter: Plant Line Value: 35A19
  misc_feature: MA Experiment 108689 PARAMETER Experiment Name: Zm_Drought_Roots_P Parameter: Timepoint (hr) Value: 24
  misc_feature: MA Experiment 108689 PARAMETER Experiment Name: Zm_Drought_Roots_P Parameter: Tissue Value: Roots
  misc_feature: MA Experiment 108689 PARAMETER Experiment Name: Zm_Drought_Roots_P Parameter: Treatment Value: Drought vs. No Drought
  misc_feature: MA Experiment ID: 20000477 Result: Down-regulated in Transcription
  misc_feature: MA Experiment 20000477 PARAMETER Experiment Name: Zm_5mM_SA_P Parameter: Age (day) Value: 10
  misc_feature: MA Experiment 20000477 PARAMETER Experiment Name: Zm_5mM_SA_P Parameter: Organism Value: Zea mays
  misc_feature: MA Experiment 20000477 PARAMETER Experiment Name: Zm_5mM_SA_P Parameter: Plant Line Value: 35A19
  misc_feature: MA Experiment 20000477 PARAMETER Experiment Name: Zm_5mM_SA_P Parameter: Timepoint (hr) Value: 48
  misc_feature: MA Experiment 20000477 PARAMETER Experiment Name: Zm_5mM_SA_P Parameter: Tissue Value: Aerial
  misc_feature: MA Experiment 20000477 PARAMETER Experiment Name: Zm_5mM_SA_P Parameter: Treatment Value: 5mM SA vs. No Treatment
  misc_feature: MA Experiment ID: 20000535 Result: Up-regulated in Transcription
  misc_feature: MA Experiment 20000535 PARAMETER Experiment Name: Zm_Hybrid_Seed_Dev_P Parameter: DAP Value: 30 vs. 12
  misc_feature: MA Experiment 20000535 PARAMETER Experiment Name: Zm_Hybrid_Seed_Dev_P Parameter: Organism Value: Zea mays
  misc_feature: MA Experiment 20000535 PARAMETER Experiment Name: Zm_Hybrid_Seed_Dev_P Parameter: Plant Line Value: 35A19
  misc_feature: MA Experiment 20000535 PARAMETER Experiment Name: Zm_Hybrid_Seed_Dev_P Parameter: Tissue Value: Embryo vs. Unfert Floret
atcccgggatcctcgttttgtttcccttcccccacccttcctcttcctccctatctatcagcactgctcgccggcgccgcctctgcaaaaggctcacttttgcctccggaacccagcggaatccgccggcggaccggaaacactccctcgcccccctcaccccctgtctgcccggccgtcggagcgcgtcgcctccgggcgtgcagcagcagtccgtggaggtggagccgggaggaggaggaggaggacgaggacgaggcataatctgccgagagcgggacagcaggagtgggctgctccgctcgcgctggagccaaagctactgattgccttgtcctgaccagcgaaagagggatctttgggaggcaatcagaggtgttcggtttggtcaaacaaagctcagctctcttgggatgcttgctgcgagctgcttgtgttcatacttgagagaataaaacagtgcatcatcttgctgtcttgtccttcgtgattggaagagaaaacgtgctgctgttcttgctatgtctgtctcggagaaggtggcgccatcgaagtcatcagtttcttcgtcgtcagatttggatccgctgctgaaggatctcacggagaagaagttgacctttaggaggaacgtggtgtcattggcagctgagctcaaggatgcgaggaacaagcttgcctcccaggagcagctgtttgtaaaggaatctcaaactagaaaggttgttgagacaaaggcaaggagcatggaagaggaagtaagcaagctgcagaaatgcttgcaggacaaggatgagcaactgcgttcatccgcaagtagcacggaacagtacctccatgagttggatgatcttagaacacaactgtcaattactcaagctacagcagaagcgagtgctgcatcagccaagtcagctcaggtgcagtgcttgtcattgctgaaagagctgaatgagaaggacatctcgctcaaagagcatgagcttcgagtgaacaagctaggtgagcagctcgatcttctccagaaggatctacaagcaagggagctctcacaaatgcaacttaaggatgaagttctaagaattgagaccgacatcatggatgcaattgccaaagctgggtctaggtctgacaaagacaatgagcttttaaagatcttatctgacgtttcaccaaggaatgtccagaacctcaacagccttttgaatgctaagaatacagaaattgcgaggttgagagaggaaatcagaatattatctgctcactggacgaacaaaaccaaggaacttgaatcacagttagaaaagcagcgaagaactgatcaggagctgaagaagagggtcctgaagcttgaattttgccttcaagaatctcagtcccagatgcgaaaattaaagaggatgggggagaaaagagacaaggctctcaaggagctcatggaccaggtggccatgaagcagcccaacagcatgtgccatggaaacaaggataatttctgggagagccagggcttcaggttcattgcctctatgtcgatgctggcgctagtgatcctcgcaaagcgttgaagcggcatagtttaagcagatgtgaatgtagcgtttacattagcttgtaggcttgggcagttgtgcatactgcatgccaaaatttgccgacatccaatcctagtctgtaaactgtaaaaatagttgtggcctgtaatccgtagcgcagtttctgctagttcatgtaaacccatataagctgtcttgtagtcacagctagtgaatgtcagctcatgtagtcaagaatctacaaccttataatttcagttcc

SEQ ID NO: 1439 - protein, 348 aa, Zea mays subsp. mays
  peptide (1)..(348): Ceres Seq. ID no. 13492736
  misc_feature (3)..(347): Pfam Name: Myosin tail Pfam Description: Myosin tail
  misc_feature (1)..(287): Homolog of NCBI NO: 28374274 NR Description: Similar to synaptonemal complex protein 1 [Danio
  misc_feature (245)..(327): Homolog of NCBI NO: 22329441 NR Description: myosin heavy chain -related [Arabidopsis thaliana]
  misc_feature (96)..(348): Homolog of NCBI NO: 34894370 NR Description: unnamed protein product [Oryza sativa (japonica
  misc_feature (1)..(189): Homolog of NCBI NO: 34894370 NR Description: unnamed protein product [Oryza sativa (japonica
  misc_feature (12)..(348): Homolog of NCBI NO: 25402551 NR Description: hypothetical protein [imported] - Arabidopsis
  misc_feature (12)..(348): Homolog of NCBI NO: 22329439 NR Description: hypothetical protein [Arabidopsis thaliana]
  misc_feature (15)..(348): Homolog of NCBI NO: 4097950 NR Description: plant IF-like protein [Arabidopsis thaliana]
  misc_feature (13)..(348): Homolog of NCBI NO: 18397379 NR Description: expressed protein [Arabidopsis thaliana]
  misc_feature (13)..(339): Homolog of NCBI NO: 7485248 NR Description: hypothetical protein A_IG002P16.20 - Arabidopsis
  misc_feature (13)..(348): Homolog of NCBI NO: 18421042 NR Description: expressed protein [Arabidopsis thaliana]
MSVSEKVAPSKSSVSSSSDLDPLLKDLTEKKLTFRRNVVSLAAELKDARNKLASQEQLFVKESQTRKVVETKARSMEEEVSKLQKCLQDKDEQLRSSASSTEQYLHELDDLRTQLSITQATAEASAASAKSAQVQCLSLLKELNEKDISLKEHELRVNKLGEQLDLLQKDLQARELSQMQLKDEVLRIETDIMDAIAKAGSRSDKDNELLKILSDVSPRNVQNLNSLLNAKNTEIARLREEIRILSAHWTNKTKELESQLEKQRRTDQELKKRVLKLEFCLQESQSQMRKLKRMGEKRDKALKELMDQVAMKQPNSMCHGNKDNFWESQGFRFIASMSMLALVILAKR

SEQ ID NO: 1440 - protein, 273 aa, Zea mays subsp. mays
  peptide (1)..(273): Ceres Seq. ID no. 13492737
  misc_feature (1)..(272): Pfam Name: Myosin tail Pfam Description: Myosin tail
  misc_feature (1)..(212): Homolog of NCBI NO: 28374274 NR Description: Similar to synaptonemal complex protein 1 [Danio
  misc_feature (170)..(252): Homolog of NCBI NO: 22329441 NR Description: myosin heavy chain -related [Arabidopsis thaliana]
  misc_feature (21)..(273): Homolog of NCBI NO: 34894370 NR Description: unnamed protein product [Oryza sativa (japonica
  misc_feature (1)..(114): Homolog of NCBI NO: 34894370 NR Description: unnamed protein product [Oryza sativa (japonica
  misc_feature (1)..(273): Homolog of NCBI NO: 25402551 NR Description: hypothetical protein [imported] - Arabidopsis
  misc_feature (1)..(273): Homolog of NCBI NO: 22329439 NR Description: hypothetical protein [Arabidopsis thaliana]
  misc_feature (1)..(273): Homolog of NCBI NO: 4097950 NR Description: plant IF-like protein [Arabidopsis thaliana]
  misc_feature (1)..(273): Homolog of NCBI NO: 18397379 NR Description: expressed protein [Arabidopsis thaliana]
  misc_feature (1)..(264): Homolog of NCBI NO: 7485248 NR Description: hypothetical protein A_IG002P16.20 - Arabidopsis
  misc_feature (1)..(273): Homolog of NCBI NO: 18421042 NR Description: expressed protein [Arabidopsis thaliana]
MEEEVSKLQKCLQDKDEQLRSSASSTEQYLHELDDLRTQLSITQATAEASAASAKSAQVQCLSLLKELNEKDISLKEHELRVNKLGEQLDLLQKDLQARELSQMQLKDEVLRIETDIMDAIAKAGSRSDKDNELLKILSDVSPRNVQNLNSLLNAKNTEIARLREEIRILSAHWTNKTKELESQLEKQRRTDQELKKRVLKLEFCLQESQSQMRKLKRMGEKRDKALKELMDQVAMKQPNSMCHGNKDNFWESQGFRFIASMSMLALVILAKR

SEQ ID NO: 1441 - DNA, 1524 bp, Zea mays subsp. mays
  misc_feature (1)..(1524): Ceres Seq. ID no. 12374227
  misc_feature: MA Experiment ID: 108559 Result: Down-regulated in Transcription
  misc_feature: MA Experiment 108559 PARAMETER Experiment Name: Zm_5mM_NO_P Parameter: Age (day) Value: 8
  misc_feature: MA Experiment 108559 PARAMETER Experiment Name: Zm_5mM_NO_P Parameter: Organism Value: Zea mays
  misc_feature: MA Experiment 108559 PARAMETER Experiment Name: Zm_5mM_NO_P Parameter: Plant Line Value: 35A19
  misc_feature: MA Experiment 108559 PARAMETER Experiment Name: Zm_5mM_NO_P Parameter: Timepoint (hr) Value: 12
  misc_feature: MA Experiment 108559 PARAMETER Experiment Name: Zm_5mM_NO_P Parameter: Tissue Value: Aerial
  misc_feature: MA Experiment 108559 PARAMETER Experiment Name: Zm_5mM_NO_P Parameter: Treatment Value: 5mM NO vs. No Treatment
  misc_feature: MA Experiment ID: 108689 Result: Down-regulated in Transcription
  misc_feature: MA Experiment 108689 PARAMETER Experiment Name: Zm_Drought_Roots_P Parameter: Age (day) Value: 9
  misc_feature: MA Experiment 108689 PARAMETER Experiment Name: Zm_Drought_Roots_P Parameter: Organism Value: Zea mays
  misc_feature: MA Experiment 108689 PARAMETER Experiment Name: Zm_Drought_Roots_P Parameter: Plant Line Value: 35A19
  misc_feature: MA Experiment 108689 PARAMETER Experiment Name: Zm_Drought_Roots_P Parameter: Timepoint (hr) Value: 24
  misc_feature: MA Experiment 108689 PARAMETER Experiment Name: Zm_Drought_Roots_P Parameter: Tissue Value: Roots
  misc_feature: MA Experiment 108689 PARAMETER Experiment Name: Zm_Drought_Roots_P Parameter: Treatment Value: Drought vs. No Drought
taaaatcattgcagccctggtcctcacaacactctgtatatttgttctgaagcaatctcctggttttggtggcaatagtgtgttttctcgccatgaacatggggttacccacgtcttagtaacaggaggagctggttatattggttcacatgctgctttaaggctcttaaaggataactatcgagttactatcgtggataatctatctagaggaaacatgggagcagtaaaggttctgcagggcttatttccgcagcctgggagactacaattcatctttgctgatctggggaaccagaaatctgtatcctcatttatgcttctaaagctgctttgcttgtgccttttctgcttatggagagttacatccaaagtcttcttttcacttaactggctgccaggtcaacaagatatttgctgaaaatgcatttgatgctgtgatgcactttgcagctgttgcttatgtgggagagagcacattggaaccccttaggtactatcacaatattacatcgaacacactactgattttggaggctatggcatctcatggagtccaaacccttatttactccagtacatgtgctacctacggagaaccagataagatgcctattacagaagccacacctcagttccctatcaatccatatggaaaagctaagaaaatggcagaggatatcataatagatttctcaaactcaaagggagctgacatggctgtcatgattttaagatatttcaatgttattggatctgaccctgagggaagattaggtgaggctcctaggccagaacttcgagagcatggtcggatatctggggcttgctttgatgcagcattaggagtcattccaggattaaaggttaaaggaacagattatcccacagctgatggaacctgcataagagattatattgatgtcacagatttagttgatgctcatgtgaaagcactcaacaaggcagagcctagaaaagtcggcatttacaatgttggaacaggaagaggtcgctcagttaatgagtttgttgatgcctgcaagaaggcaactggggtcaacatcaaaattgagtacctcaacagaaggccaggagattatgcagaagtatacagcgacccaacaaagataaacaaggagctcaactggacagctcattataccgatctcaaagagagcctatcagtcgcatggaggtggcaaaagtcgcatccgcgtggctacgggccaaactaaatatagcctgctgatctataattcacttaatcgtcaatacatattagttctttagttagagatacaagatcttgctgcgatactcctcaaaatcagtccttcgtattcttctttctctcgtcctttttatttcaaaagtttgcatttttggctagcagaaacatgaatggtgatttggatgaaaaaaaggacctgtgatgacaatttcattgtttctgacacattgttggtaaaaaaaatgtaaattgcttcagccaatgagctgcaagattgattgaattgagtt

SEQ ID NO: 1442 - protein, 265 aa, Zea mays subsp. mays
  peptide (1)..(265): Ceres Seq. ID no. 12374228
  misc_feature (1)..(259): Pfam Name: NAD dependent epimerase/dehydratase family Pfam Description: NAD dependent epimerase/dehydratase family
  misc_feature (98)..(261): Homolog of NCBI NO: 5852089 NR Description: zwh12.1 [Oryza sativa (indica cultivar-group)]
  misc_feature (1)..(263): Homolog of NCBI NO: 7437275 NR Description: probable UDPglucose 4-epimerase (EC 5.1.3.2)
  misc_feature (1)..(262): Homolog of NCBI NO: 15241503 NR Description: putative protein; protein id: At5g44480.1
  misc_feature (1)..(263): Homolog of NCBI NO: 24417398 NR Description: unknown [Arabidopsis thaliana]
  misc_feature (1)..(262): Homolog of NCBI NO: 15237098 NR Description: UDP-glucose 4-epimerase - like protein; protein
  misc_feature (1)..(263): Homolog of NCBI NO: 22329866 NR Description: UDP-galactose 4-epimerase-like protein
  misc_feature (1)..(264): Homolog of NCBI NO: 25553524 NR Description: UDP-galactose 4-epimerase-like protein
  misc_feature (1)..(264): Homolog of NCBI NO: 27260937 NR Description: OJ1417_E01.21 [Oryza sativa (japonica
  misc_feature (1)..(263): Homolog of NCBI NO: 26106016 NR Description: UDP-galactose 4-epimerase-like protein
  misc_feature (1)..(265): Homolog of NCBI NO: 27529690 NR Description: UDP-galactose 4-epimerase-like protein
MHFAAVAYVGESTLEPLRYYHNITSNTLLILEAMASHGVQTLIYSSTCATYGEPDKMPITEATPQFPINPYGKAKKMAEDIIIDFSNSKGADMAVMILRYFNVIGSDPEGRLGEAPRPELREHGRISGACFDAALGVIPGLKVKGTDYPTADGTCIRDYIDVTDLVDAHVKALNKAEPRKVGIYNVGTGRGRSVNEFVDACKKATGVNIKIEYLNRRPGDYAEVYSDPTKINKELNWTAHYTDLKESLSVAWRWQKSHPRGYGPN

SEQ ID NO: 1443 - protein, 232 aa, Zea mays subsp. mays
  peptide (1)..(232): Ceres Seq. ID no. 12374229
  misc_feature (1)..(226): Pfam Name: NAD dependent epimerase/dehydratase family Pfam Description: NAD dependent epimerase/dehydratase family
  misc_feature (65)..(228): Homolog of NCBI NO: 5852089 NR Description: zwh12.1 [Oryza sativa (indica cultivar-group)]
  misc_feature (1)..(230): Homolog of NCBI NO: 7437275 NR Description: probable UDPglucose 4-epimerase (EC 5.1.3.2)
  misc_feature (1)..(229): Homolog of NCBI NO: 15241503 NR Description: putative protein; protein id: At5g44480.1
  misc_feature (1)..(230): Homolog of NCBI NO: 24417398 NR Description: unknown [Arabidopsis thaliana]
  misc_feature (1)..(229): Homolog of NCBI NO: 15237098 NR Description: UDP-glucose 4-epimerase - like protein; protein
  misc_feature (1)..(230): Homolog of NCBI NO: 22329866 NR Description: UDP-galactose 4-epimerase-like protein
  misc_feature (1)..(231): Homolog of NCBI NO: 25553524 NR Description: UDP-galactose 4-epimerase-like protein
  misc_feature (1)..(231): Homolog of NCBI NO: 27260937 NR Description: OJ1417_E01.21 [Oryza sativa (japonica
  misc_feature (1)..(230): Homolog of NCBI NO: 26106016 NR Description: UDP-galactose 4-epimerase-like protein
  misc_feature (1)..(232): Homolog of NCBI NO: 27529690 NR Description: UDP-galactose 4-epimerase-like protein
MASHGVQTLIYSSTCATYGEPDKMPITEATPQFPINPYGKAKKMAEDIIIDFSNSKGADMAVMILRYFNVIGSDPEGRLGEAPRPELREHGRISGACFDAALGVIPGLKVKGTDYPTADGTCIRDYIDVTDLVDAHVKALNKAEPRKVGIYNVGTGRGRSVNEFVDACKKATGVNIKIEYLNRRPGDYAEVYSDPTKINKELNWTAHYTDLKESLSVAWRWQKSHPRGYGPN

SEQ ID NO: 1444 - protein, 209 aa, Zea mays subsp. mays
  peptide (1)..(209): Ceres Seq. ID no. 12374230
  misc_feature (1)..(203): Pfam Name: NAD dependent epimerase/dehydratase family Pfam Description: NAD dependent epimerase/dehydratase family
  misc_feature (42)..(205): Homolog of NCBI NO: 5852089 NR Description: zwh12.1 [Oryza sativa (indica cultivar-group)]
  misc_feature (1)..(207): Homolog of NCBI NO: 7437275 NR Description: probable UDPglucose 4-epimerase (EC 5.1.3.2)
  misc_feature (1)..(206): Homolog of NCBI NO: 15241503 NR Description: putative protein; protein id: At5g44480.1
  misc_feature (1)..(207): Homolog of NCBI NO: 24417398 NR Description: unknown [Arabidopsis thaliana]
  misc_feature (1)..(206): Homolog of NCBI NO: 15237098 NR Description: UDP-glucose 4-epimerase - like protein; protein
  misc_feature (1)..(207): Homolog of NCBI NO: 22329866 NR Description: UDP-galactose 4-epimerase-like protein
  misc_feature (1)..(208): Homolog of NCBI NO: 25553524 NR Description: UDP-galactose 4-epimerase-like protein
  misc_feature (1)..(208): Homolog of NCBI NO: 27260937 NR Description: OJ1417_E01.21 [Oryza sativa (japonica
  misc_feature (1)..(207): Homolog of NCBI NO: 26106016 NR Description: UDP-galactose 4-epimerase-like protein
  misc_feature (1)..(209): Homolog of NCBI NO: 27529690 NR Description: UDP-galactose 4-epimerase-like protein
MPITEATPQFPINPYGKAKKMAEDIIIDFSNSKGADMAVMILRYFNVIGSDPEGRLGEAPRPELREHGRISGACFDAALGVIPGLKVKGTDYPTADGTCIRDYIDVTDLVDAHVKALNKAEPRKVGIYNVGTGRGRSVNEFVDACKKATGVNIKIEYLNRRPGDYAEVYSDPTKINKELNWTAHYTDLKESLSVAWRWQKSHPRGYGPN

SEQ ID NO: 1445 - DNA, 1385 bp, Zea mays subsp. mays
  misc_feature (1)..(1385): Ceres Seq. ID no. 12349947
  misc_feature: MA Experiment ID: 20000535 Result: Up-regulated in Transcription
  misc_feature: MA Experiment 20000535 PARAMETER Experiment Name: Zm_Hybrid_Seed_Dev_P Parameter: DAP Value: 30 vs. 12
  misc_feature: MA Experiment 20000535 PARAMETER Experiment Name: Zm_Hybrid_Seed_Dev_P Parameter: Organism Value: Zea mays
  misc_feature: MA Experiment 20000535 PARAMETER Experiment Name: Zm_Hybrid_Seed_Dev_P Parameter: Plant Line Value: 35A19
  misc_feature: MA Experiment 20000535 PARAMETER Experiment Name: Zm_Hybrid_Seed_Dev_P Parameter: Tissue Value: Embryo vs. Unfert Floret
attaaaaactcgggccagcaagaaagaaaaaaaaccacaacaagagagagagagagagagagagagagagacagagacagagagagactgccaacgaggcgaagcagccggccaatctagcatccgcgcgcggggtctgagagcagagcggcagggcgccatggcggcatcggtggcgctgagcagcgggcaccggatgccggcggtggggctgggcgtgtggcggatggagaaggcggacatccgcggcctcatccacacagcgctccgcgtcggctaccgccacctggactgcgccgctgactaccagaacgaagctgaagttggtgacgcgctcgcagaggcattccagaccggactcgtcaagcgggaggacctgttcatcacaaccaagctgtggaactcagaccatgggcatgtgcttgaagcctgcaaggacagcctgaagaagctgcagctagactatctcgacctctacctcatccatttcccagtagccactcggcacaccggagtcggcacgacttctagcgctctgggtgacgatggcgtgctggacatcgacaccactatctccctggaaacgacatggcacgcgatggaagagcttgtttccatggggctggtgcgcagcattggaatcagcaactacgacatcttcctcaccagagactgcctggcctacgccaagataaagccggcggtgaaccagatcgagacgcacccttacttccagcgcgactctcttgtcaagttctgccagaagcacgggatctgcgtgaccgcgcacaccccgctgggtggctccaccgccaacgccgagtggttcgggacggtgtcgtgcctggacgaccctgtcatcaagagcttggctgacaagtacggcaagacgccggcgcagctcgtcctccgctggggtctgcagcgggacacggtggtgatccccaagacctccaaggtggagaggctgcaggagaactttgacgtcttcggtttcgacatctccggcgaggacatggagaggatgaaggccgtggaccggaagtaccggactaaccagcctgccaagttctggggcatcgacctctatgcttagcttttagttcggttgcgttgcgtcgcccccccccccagacaagacagcatcaataatgaggattccctcagacggcatcagtcaaagtcacgaggatctcagacagcatcttccatcacatgtgacggtgtgaggctgatggtagggtttggtgtctccacgtgtccctctctctttcagctcagcttcatcaccatgtagactacgcagtgtttgcctccgattatttactgtttttcttccttacaaatccgtacatatctttactggtaggttgaacaatttgctg

SEQ ID NO: 1446 - protein, 364 aa, Zea mays subsp. mays
  peptide (1)..(364): Ceres Seq. ID no. 12349948
  misc_feature (100)..(364): Homolog of NCBI NO: 19310928 NR Description: NADP dependent sorbitol 6-phosphate dehydrogenase
  misc_feature (100)..(364): Homolog of NCBI NO: 19310926 NR Description: NADP dependent sorbitol 6-phosphate dehydrogenase
  misc_feature (50)..(275): Homolog of NCBI NO: 32400786 NR Description: NADPH-dependent mannose 6-phosphate reductase
  misc_feature (56)..(364): Homolog of NCBI NO: 134153 NR Description: NADP-dependent D-sorbitol-6-phosphate
  misc_feature (57)..(364): Homolog of NCBI NO: 1835701 NR Description: NADPH-dependent mannose 6-phosphate reductase
  misc_feature (58)..(364): Homolog of NCBI NO: 21554266 NR Description: putative NADPH dependent mannose 6-phosphate
  misc_feature (58)..(364): Homolog of NCBI NO: 10334991 NR Description: NADPH-dependent mannose 6-phosphate reductase
  misc_feature (58)..(364): Homolog of NCBI NO: 15226502 NR Description: mannose 6-phosphate reductase (NADPH-dependent),
  misc_feature (58)..(364): Homolog of NCBI NO: 21592829 NR Description: putative NADPH dependent mannose 6-phosphate
  misc_feature (58)..(364): Homolog of NCBI NO: 15226489 NR Description: mannose 6-phosphate reductase (NADPH-dependent),
  misc_feature (100)..(364): Homolog of NCBI NO: 19310928 NR Description: NADP dependent sorbitol 6-phosphate dehydrogenase
  misc_feature (100)..(364): Homolog of NCBI NO: 19310926 NR Description: NADP dependent sorbitol 6-phosphate dehydrogenase
  misc_feature (50)..(275): Homolog of NCBI NO: 32400786 NR Description: NADPH-dependent mannose 6-phosphate reductase
  misc_feature (56)..(364): Homolog of NCBI NO: 134153 NR Description: NADP-dependent D-sorbitol-6-phosphate
  misc_feature (57)..(364): Homolog of NCBI NO: 1835701 NR Description: NADPH-dependent mannose 6-phosphate reductase
  misc_feature (58)..(364): Homolog of NCBI NO: 21554266 NR Description: putative NADPH dependent mannose 6-phosphate
  misc_feature (58)..(364): Homolog of NCBI NO: 10334991 NR Description: NADPH-dependent mannose 6-phosphate reductase
  misc_feature (58)..(364): Homolog of NCBI NO: 15226502 NR Description: mannose 6-phosphate reductase (NADPH-dependent),
  misc_feature (58)..(364): Homolog of NCBI NO: 21592829 NR Description: putative NADPH dependent mannose 6-phosphate
  misc_feature (58)..(364): Homolog of NCBI NO: 15226489 NR Description: mannose 6-phosphate reductase (NADPH-dependent),
LKTRASKKEKKPQQERERERERETETERDCQRGEAAGQSSIRARGLRAERQGAMAASVALSSGHRMPAVGLGVWRMEKADIRGLIHTALRVGYRHLDCAADYQNEAEVGDALAEAFQTGLVKREDLFITTKLWNSDHGHVLEACKDSLKKLQLDYLDLYLIHFPVATRHTGVGTTSSALGDDGVLDIDTTISLETTWHAMEELVSMGLVRSIGISNYDIFLTRDCLAYAKIKPAVNQIETHPYFQRDSLVKFCQKHGICVTAHTPLGGSTANAEWFGTVSCLDDPVIKSLADKYGKTPAQLVLRWGLQRDTVVIPKTSKVERLQENFDVFGFDISGEDMERMKAVDRKYRTNQPAKFWGIDLYA

SEQ ID NO: 1447 - protein, 311 aa, Zea mays subsp. mays
  peptide (1)..(311): Ceres Seq. ID no. 12349949
  misc_feature (1)..(222): Homolog of NCBI NO: 32400786 NR Description: NADPH-dependent mannose 6-phosphate reductase
  misc_feature (3)..(311): Homolog of NCBI NO: 134153 NR Description: NADP-dependent D-sorbitol-6-phosphate
  misc_feature (4)..(311): Homolog of NCBI NO: 1835701 NR Description: NADPH-dependent mannose 6-phosphate reductase
  misc_feature (5)..(311): Homolog of NCBI NO: 21554266 NR Description: putative NADPH dependent mannose 6-phosphate
  misc_feature (5)..(311): Homolog of NCBI NO: 10334991 NR Description: NADPH-dependent mannose 6-phosphate reductase
  misc_feature (5)..(311): Homolog of NCBI NO: 15226502 NR Description: mannose 6-phosphate reductase (NADPH-dependent),
  misc_feature (5)..(311): Homolog of NCBI NO: 21592829 NR Description: putative NADPH dependent mannose 6-phosphate
  misc_feature (5)..(311): Homolog of NCBI NO: 15226489 NR Description: mannose 6-phosphate reductase (NADPH-dependent),
  misc_feature (47)..(311): Homolog of NCBI NO: 19310928 NR Description: NADP dependent sorbitol 6-phosphate dehydrogenase
  misc_feature (47)..(311): Homolog of NCBI NO: 19310926 NR Description: NADP dependent sorbitol 6-phosphate dehydrogenase
  misc_feature (47)..(311): Homolog of NCBI NO: 19310928 NR Description: NADP dependent sorbitol 6-phosphate dehydrogenase
  misc_feature (47)..(311): Homolog of NCBI NO: 19310926 NR Description: NADP dependent sorbitol 6-phosphate dehydrogenase
  misc_feature (1)..(222): Homolog of NCBI NO: 32400786 NR Description: NADPH-dependent mannose 6-phosphate reductase
  misc_feature (3)..(311): Homolog of NCBI NO: 134153 NR Description: NADP-dependent D-sorbitol-6-phosphate
  misc_feature (4)..(311): Homolog of NCBI NO: 1835701 NR Description: NADPH-dependent mannose 6-phosphate reductase
  misc_feature (5)..(311): Homolog of NCBI NO: 21554266 NR Description: putative NADPH dependent mannose 6-phosphate
  misc_feature (5)..(311): Homolog of NCBI NO: 10334991 NR Description: NADPH-dependent mannose 6-phosphate reductase
  misc_feature (5)..(311): Homolog of NCBI NO: 15226502 NR Description: mannose 6-phosphate reductase (NADPH-dependent),
  misc_feature (5)..(311): Homolog of NCBI NO: 21592829 NR Description: putative NADPH dependent mannose 6-phosphate
  misc_feature (5)..(311): Homolog of NCBI NO: 15226489 NR Description: mannose 6-phosphate reductase (NADPH-dependent),
MAASVALSSGHRMPAVGLGVWRMEKADIRGLIHTALRVGYRHLDCAADYQNEAEVGDALAEAFQTGLVKREDLFITTKLWNSDHGHVLEACKDSLKKLQLDYLDLYLIHFPVATRHTGVGTTSSALGDDGVLDIDTTISLETTWHAMEELVSMGLVRSIGISNYDIFLTRDCLAYAKIKPAVNQIETHPYFQRDSLVKFCQKHGICVTAHTPLGGSTANAEWFGTVSCLDDPVIKSLADKYGKTPAQLVLRWGLQRDTVVIPKTSKVERLQENFDVFGFDISGEDMERMKAVDRKYRTNQPAKFWGIDLYA

SEQ ID NO: 1448 - protein, 299 aa, Zea mays subsp. mays
  peptide (1)..(299): Ceres Seq. ID no. 12349950
  misc_feature (35)..(299): Homolog of NCBI NO: 19310928 NR Description: NADP dependent sorbitol 6-phosphate dehydrogenase
  misc_feature (35)..(299): Homolog of NCBI NO: 19310926 NR Description: NADP dependent sorbitol 6-phosphate dehydrogenase
  misc_feature (1)..(210): Homolog of NCBI NO: 32400786 NR Description: NADPH-dependent mannose 6-phosphate reductase
  misc_feature (1)..(299): Homolog of NCBI NO: 134153 NR Description: NADP-dependent D-sorbitol-6-phosphate
  misc_feature (1)..(299): Homolog of NCBI NO: 1835701 NR Description: NADPH-dependent mannose 6-phosphate reductase
  misc_feature (1)..(299): Homolog of NCBI NO: 21554266 NR Description: putative NADPH dependent mannose 6-phosphate
  misc_feature (1)..(299): Homolog of NCBI NO: 10334991 NR Description: NADPH-dependent mannose 6-phosphate reductase
  misc_feature (1)..(299): Homolog of NCBI NO: 15226502 NR Description: mannose 6-phosphate reductase (NADPH-dependent),
  misc_feature (1)..(299): Homolog of NCBI NO: 21592829 NR Description: putative NADPH dependent mannose 6-phosphate
  misc_feature (1)..(299): Homolog of NCBI NO: 15226489 NR Description: mannose 6-phosphate reductase (NADPH-dependent),
  misc_feature (35)..(299): Homolog of NCBI NO: 19310928 NR Description: NADP dependent sorbitol 6-phosphate dehydrogenase
  misc_feature (35)..(299): Homolog of NCBI NO: 19310926 NR Description: NADP dependent sorbitol 6-phosphate dehydrogenase
  misc_feature (1)..(210): Homolog of NCBI NO: 32400786 NR Description: NADPH-dependent mannose 6-phosphate reductase
  misc_feature (1)..(299): Homolog of NCBI NO: 134153 NR Description: NADP-dependent D-sorbitol-6-phosphate
  misc_feature (1)..(299): Homolog of NCBI NO: 1835701 NR Description: NADPH-dependent mannose 6-phosphate reductase
  misc_feature (1)..(299): Homolog of NCBI NO: 21554266 NR Description: putative NADPH dependent mannose 6-phosphate
  misc_feature (1)..(299): Homolog of NCBI NO: 10334991 NR Description: NADPH-dependent mannose 6-phosphate reductase
  misc_feature (1)..(299): Homolog of NCBI NO: 15226502 NR Description: mannose 6-phosphate reductase (NADPH-dependent),
  misc_feature (1)..(299): Homolog of NCBI NO: 21592829 NR Description: putative NADPH dependent mannose 6-phosphate
  misc_feature (1)..(299): Homolog of NCBI NO: 15226489 NR Description: mannose 6-phosphate reductase (NADPH-dependent),
MPAVGLGVWRMEKADIRGLIHTALRVGYRHLDCAADYQNEAEVGDALAEAFQTGLVKREDLFITTKLWNSDHGHVLEACKDSLKKLQLDYLDLYLIHFPVATRHTGVGTTSSALGDDGVLDIDTTISLETTWHAMEELVSMGLVRSIGISNYDIFLTRDCLAYAKIKPAVNQIETHPYFQRDSLVKFCQKHGICVTAHTPLGGSTANAEWFGTVSCLDDPVIKSLADKYGKTPAQLVLRWGLQRDTVVIPKTSKVERLQENFDVFGFDISGEDMERMKAVDRKYRTNQPAKFWGIDLYA

SEQ ID NO: 1449 - DNA, 1522 bp, Zea mays subsp. mays
  misc_feature (1)..(1522): Ceres Seq. ID no. 13498918
  misc_feature: MA Experiment ID: 108528 Result: Down-regulated in Transcription
  misc_feature: MA Experiment 108528 PARAMETER Experiment Name: Zm_Imbibed_Seeds_P Parameter: Age (day) Value: 5 vs. 2
  misc_feature: MA Experiment 108528 PARAMETER Experiment Name: Zm_Imbibed_Seeds_P Parameter: Organism Value: Zea mays
  misc_feature: MA Experiment 108528 PARAMETER Experiment Name: Zm_Imbibed_Seeds_P Parameter: Plant Line Value: 35A19
  misc_feature: MA Experiment 108528 PARAMETER Experiment Name: Zm_Imbibed_Seeds_P Parameter: Tissue Value: Aerial vs. Embryo
  misc_feature: MA Experiment ID: 108530 Result: Down-regulated in Transcription
  misc_feature: MA Experiment 108530 PARAMETER Experiment Name: Zm_Imbibed_Seeds_P Parameter: Age (day) Value: 6 vs. 2
  misc_feature: MA Experiment 108530 PARAMETER Experiment Name: Zm_Imbibed_Seeds_P Parameter: Organism Value: Zea mays
  misc_feature: MA Experiment 108530 PARAMETER Experiment Name: Zm_Imbibed_Seeds_P Parameter: Plant Line Value: 35A19
  misc_feature: MA Experiment 108530 PARAMETER Experiment Name: Zm_Imbibed_Seeds_P Parameter: Tissue Value: Aerial vs. Embryo
  misc_feature: MA Experiment ID: 108535 Result: Up-regulated in Transcription
  misc_feature: MA Experiment 108535 PARAMETER Experiment Name: Zm_Meristem_P Parameter: Age (day) Value: 8
  misc_feature: MA Experiment 108535 PARAMETER Experiment Name: Zm_Meristem_P Parameter: Organism Value: Zea mays
  misc_feature: MA Experiment 108535 PARAMETER Experiment Name: Zm_Meristem_P Parameter: Plant Line Value: 35A19
  misc_feature: MA Experiment 108535 PARAMETER Experiment Name: Zm_Meristem_P Parameter: Tissue Value: Root Meristem vs. Above Root Meristem
  misc_feature: MA Experiment ID: 108536 Result: Up-regulated in Transcription
  misc_feature: MA Experiment 108536 PARAMETER Experiment Name: Zm_Meristem_P Parameter: Age (day) Value: 8
  misc_feature: MA Experiment 108536 PARAMETER Experiment Name: Zm_Meristem_P Parameter: Organism Value: Zea mays
  misc_feature: MA Experiment 108536 PARAMETER Experiment Name: Zm_Meristem_P Parameter: Plant Line Value: 35A19
  misc_feature: MA Experiment 108536 PARAMETER Experiment Name: Zm_Meristem_P Parameter: Tissue Value: Shoot Meristem vs. Above Shoot Meristem
  misc_feature: MA Experiment ID: 108544 Result: Down-regulated in Transcription
  misc_feature: MA Experiment ID: 108545 Result: Down-regulated in Transcription
  misc_feature: MA Experiment 108545 PARAMETER Experiment Name: Zm_Imbibed_Seeds_P Parameter: Age (day) Value: 3 vs. 2
  misc_feature: MA Experiment 108545 PARAMETER Experiment Name: Zm_Imbibed_Seeds_P Parameter: Organism Value: Zea mays
  misc_feature: MA Experiment 108545 PARAMETER Experiment Name: Zm_Imbibed_Seeds_P Parameter: Plant Line Value: 35A19
  misc_feature: MA Experiment 108545 PARAMETER Experiment Name: Zm_Imbibed_Seeds_P Parameter: Tissue Value: Aerial vs. Embryo
  misc_feature: MA Experiment ID: 108547 Result: Down-regulated in Transcription
  misc_feature: MA Experiment 108547 PARAMETER Experiment Name: Zm_Imbibed_Seeds_P Parameter: Age (day) Value: 4 vs. 2
  misc_feature: MA Experiment 108547 PARAMETER Experiment Name: Zm_Imbibed_Seeds_P Parameter: Organism Value: Zea mays
  misc_feature: MA Experiment 108547 PARAMETER Experiment Name: Zm_Imbibed_Seeds_P Parameter: Plant Line Value: 35A19
  misc_feature: MA Experiment 108547 PARAMETER Experiment Name: Zm_Imbibed_Seeds_P Parameter: Tissue Value: Aerial vs. Embryo
  misc_feature: MA Experiment ID: 108556 Result: Down-regulated in Transcription
  misc_feature: MA Experiment 108556 PARAMETER Experiment Name: Zm_Drought_P Parameter: Age (day) Value: 9
  misc_feature: MA Experiment 108556 PARAMETER Experiment Name: Zm_Drought_P Parameter: Organism Value: Zea mays
  misc_feature: MA Experiment 108556 PARAMETER Experiment Name: Zm_Drought_P Parameter: Plant Line Value: 35A19
  misc_feature: MA Experiment 108556 PARAMETER Experiment Name: Zm_Drought_P Parameter: Timepoint (hr) Value: 24
  misc_feature: MA Experiment 108556 PARAMETER Experiment Name: Zm_Drought_P Parameter: Tissue Value: Aerial
  misc_feature: MA Experiment 108556 PARAMETER Experiment Name: Zm_Drought_P Parameter: Treatment Value: Drought vs. No Drought
  misc_feature: MA Experiment ID: 108597 Result: Down-regulated in Transcription
  misc_feature: MA Experiment 108597 PARAMETER Experiment Name: Zm_100uM_ABA_P Parameter: Age (day) Value: 9
  misc_feature: MA Experiment 108597 PARAMETER Experiment Name: Zm_100uM_ABA_P Parameter: Organism Value: Zea mays
  misc_feature: MA Experiment 108597 PARAMETER Experiment Name: Zm_100uM_ABA_P Parameter: Plant Line Value: 35A19
  misc_feature: MA Experiment 108597 PARAMETER Experiment Name: Zm_100uM_ABA_P Parameter: Timepoint (hr) Value: 24
  misc_feature: MA Experiment 108597 PARAMETER Experiment Name: Zm_100uM_ABA_P Parameter: Tissue Value: Aerial
  misc_feature: MA Experiment 108597 PARAMETER Experiment Name: Zm_100uM_ABA_P Parameter: Treatment Value: 100uM ABA vs. No Treatment
  misc_feature: MA Experiment ID: 108689 Result: Down-regulated in Transcription
  misc_feature: MA Experiment 108689 PARAMETER Experiment Name: Zm_Drought_Roots_P Parameter: Age (day) Value: 9
  misc_feature: MA Experiment 108689 PARAMETER Experiment Name: Zm_Drought_Roots_P Parameter: Organism Value: Zea mays
  misc_feature: MA Experiment 108689 PARAMETER Experiment Name: Zm_Drought_Roots_P Parameter: Plant Line Value: 35A19
  misc_feature: MA Experiment 108689 PARAMETER Experiment Name: Zm_Drought_Roots_P Parameter: Timepoint (hr) Value: 24
  misc_feature: MA Experiment 108689 PARAMETER Experiment Name: Zm_Drought_Roots_P Parameter: Tissue Value: Roots
  misc_feature: MA Experiment 108689 PARAMETER Experiment Name: Zm_Drought_Roots_P Parameter: Treatment Value: Drought vs. No Drought
  misc_feature: MA Experiment ID: 20000477 Result: Down-regulated in Transcription
  misc_feature: MA Experiment 20000477 PARAMETER Experiment Name: Zm_5mM_SA_P Parameter: Age (day) Value: 10
  misc_feature: MA Experiment 20000477 PARAMETER Experiment Name: Zm_5mM_SA_P Parameter: Organism Value: Zea mays
  misc_feature: MA Experiment 20000477 PARAMETER Experiment Name: Zm_5mM_SA_P Parameter: Plant Line Value: 35A19
  misc_feature: MA Experiment 20000477 PARAMETER Experiment Name: Zm_5mM_SA_P Parameter: Timepoint (hr) Value: 48
  misc_feature: MA Experiment 20000477 PARAMETER Experiment Name: Zm_5mM_SA_P Parameter: Tissue Value: Aerial
  misc_feature: MA Experiment 20000477 PARAMETER Experiment Name: Zm_5mM_SA_P Parameter: Treatment Value: 5mM SA vs. No Treatment
  misc_feature: MA Experiment ID: 20000478 Result: Down-regulated in Transcription
  misc_feature: MA Experiment 20000478 PARAMETER Experiment Name: Zm_5mM_SA_P Parameter: Age (day) Value: 11
  misc_feature: MA Experiment 20000478 PARAMETER Experiment Name: Zm_5mM_SA_P Parameter: Organism Value: Zea mays
  misc_feature: MA Experiment 20000478 PARAMETER Experiment Name: Zm_5mM_SA_P Parameter: Plant Line Value: 35A19
  misc_feature: MA Experiment 20000478 PARAMETER Experiment Name: Zm_5mM_SA_P Parameter: Timepoint (hr) Value: 72
  misc_feature: MA Experiment 20000478 PARAMETER Experiment Name: Zm_5mM_SA_P Parameter: Tissue Value: Aerial
  misc_feature: MA Experiment 20000478 PARAMETER Experiment Name: Zm_5mM_SA_P Parameter: Treatment Value: 5mM SA vs. No Treatment
  misc_feature: MA Experiment ID: 20000479 Result: Down-regulated in Transcription
  misc_feature: MA Experiment 20000479 PARAMETER Experiment Name: Zm_Drought_P Parameter: Age (day) Value: 10
  misc_feature: MA Experiment 20000479 PARAMETER Experiment Name: Zm_Drought_P Parameter: Organism Value: Zea mays
  misc_feature: MA Experiment 20000479 PARAMETER Experiment Name: Zm_Drought_P Parameter: Plant Line Value: 35A19
  misc_feature: MA Experiment 20000479 PARAMETER Experiment Name: Zm_Drought_P Parameter: Timepoint (hr) Value: 48
  misc_feature: MA Experiment 20000479 PARAMETER Experiment Name: Zm_Drought_P Parameter: Tissue Value: Aerial
  misc_feature: MA Experiment 20000479 PARAMETER Experiment Name: Zm_Drought_P Parameter: Treatment Value: Drought vs. No Drought
  misc_feature: MA Experiment ID: 20000480 Result: Down-regulated in Transcription
  misc_feature: MA Experiment 20000480 PARAMETER Experiment Name: Zm_Drought_P Parameter: Age (day) Value: 11
  misc_feature: MA Experiment 20000480 PARAMETER Experiment Name: Zm_Drought_P Parameter: Organism Value: Zea mays
  misc_feature: MA Experiment 20000480 PARAMETER Experiment Name: Zm_Drought_P Parameter: Plant Line Value: 35A19
  misc_feature: MA Experiment 20000480 PARAMETER Experiment Name: Zm_Drought_P Parameter: Timepoint (hr) Value: 72
  misc_feature: MA Experiment 20000480 PARAMETER Experiment Name: Zm_Drought_P Parameter: Tissue Value: Aerial
  misc_feature: MA Experiment 20000480 PARAMETER Experiment Name: Zm_Drought_P Parameter: Treatment Value: Drought vs. No Drought
  misc_feature: MA Experiment ID: 20000534 Result: Down-regulated in Transcription
  misc_feature: MA Experiment 20000534 PARAMETER Experiment Name: Zm_Hybrid_Pollen_P Parameter: Age (day) Value: 8
  misc_feature: MA Experiment 20000534 PARAMETER Experiment Name: Zm_Hybrid_Pollen_P Parameter: Organism Value: Zea mays
  misc_feature: MA Experiment 20000534 PARAMETER Experiment Name: Zm_Hybrid_Pollen_P Parameter: Plant Line Value: 35A19
  misc_feature: MA Experiment 20000534 PARAMETER Experiment Name: Zm_Hybrid_Pollen_P Parameter: Tissue Value: Pollen vs. Aerial
  misc_feature: MA Experiment ID: 20000535 Result: Up-regulated in Transcription
  misc_feature: MA Experiment 20000535 PARAMETER Experiment Name: Zm_Hybrid_Seed_Dev_P Parameter: DAP Value: 30 vs. 12
  misc_feature: MA Experiment 20000535 PARAMETER Experiment Name: Zm_Hybrid_Seed_Dev_P Parameter: Organism Value: Zea mays
  misc_feature: MA Experiment 20000535 PARAMETER Experiment Name: Zm_Hybrid_Seed_Dev_P Parameter: Plant Line Value: 35A19
  misc_feature: MA Experiment 20000535 PARAMETER Experiment Name: Zm_Hybrid_Seed_Dev_P Parameter: Tissue Value: Embryo vs. Unfert Floret
acataggtgccggactcgtcccagcgaagaaccggacgagcgagcaagaggcctcctcctcaagcttcgaatcctccccttccgcgctttccctccccctcctcctcctcccctttccagtccccaccccagcgaagcttccaaagccgccccaaccccaacggccgcccggcctgatcgagcatacagctgccgcggccctccccgccccgcacgcgacctcggagccatggagaagtacgagctgctgaaggacatcggcgccggcaacttcggcgtggcgcggctcatgcggaacaaggagaccaaggaggctggtcgccatgaagtacatcccccggggccaaaagatcgacgagaatgtggcgagggagatcatcaaccaccgctcgctgcgccaccccaacatcatccggttcaaggaggtggtgctgacgccgacgcacctggcgatcgtgatggagtacgccgccggcggcgagctgttcgaccggatctgcaacgccgggaggttcagcgaggacgaggcgaggtacttcttccagcagctgatttgtggcgtcagctactgccactccatgcaaatctgccaccgagacttgaagctggagaacacgctgctggacggcagcccggcgcctcgcctcaagatctgcgacttcggttactccaagtcgtcgctgctgcactcgaagcccaagtcgacggtcggcacgccggcgtacatcgcccccgaggtgctctcccgccgggaatacgacggcaagacagccgatgtgtggtcctgtggagtcactctttatgtgatgctggtcggtggttacccttttgaggacccagacgacccaaagaatttcagaaagacgatcgggaggatcatgtcaatccaatacaaaataccagagtatgtgcacgtgtcgcaagactgcaaggagctgctttcaaggatctttgttgcaaactctgcaaagagaataacgatcagggagatcaggaaccacccctggttcctgaagaacctgcccagagagctcacggaggctgcgcaggccatgtactacaagaaagacaacagcgccccgacctactccgtccagtccgtggaggagatcatgaagatcgtggagaaggcgcggacgccgcctccttcctccacccctgtggctggcttcggttgggcggaggaggacgagcaggaggacagcaaggaaccagacgaggaacacgaggacggcgaggacgagtacgagaagcaggtgaagcaagtccacgccagcggggagtttcatctcagctgctgatggttttcgccggcctgctagtctgtggtaccagccgatgatggacctgctagtctgtggtcttgtttccaagttttctttcattttttctttcttttgctgtggtgccgcaagactgcaacagttgtaaattattgaagggggttccagcgttgcccttgtattgactgattcaaactagcatggggaacatgattatggaataaaacaggtcgttgagc

SEQ ID NO: 1450 - protein, 325 aa, Zea mays subsp. mays
  peptide (1)..(325): Ceres Seq. ID no. 13498919
  misc_feature (1)..(229): Pfam Name: Protein kinase domain Pfam Description: Protein kinase domain
  misc_feature (1)..(324): Homolog of NCBI NO: 19568098 NR Description: osmotic stress-activated protein kinase
MKYIPRGQKIDENVAREIINHRSLRHPNIIRFKEVVLTPTHLAIVMEYAAGGELFDRICNAGRFSEDEARYFFQQLICGVSYCHSMQICHRDLKLENTLLDGSPAPRLKICDFGYSKSSLLHSKPKSTVGTPAYIAPEVLSRREYDGKTADVWSCGVTLYVMLVGGYPFEDPDDPKNFRKTIGRIMSIQYKIPEYVHVSQDCKELLSRIFVANSAKRITIREIRNHPWFLKNLPRELTEAAQAMYYKKDNSAPTYSVQSVEEIMKIVEKARTPPPSSTPVAGFGWAEEDEQEDSKEPDEEHEDGEDEYEKQVKQVHASGEFHLSC

SEQ ID NO: 1451 - protein, 280 aa, Zea mays subsp. mays
  peptide (1)..(280): Ceres Seq. ID no. 13498920
  misc_feature (1)..(184): Pfam Name: Protein kinase domain Pfam Description: Protein kinase domain
  misc_feature (1)..(279): Homolog of NCBI NO: 19568098 NR Description: osmotic stress-activated protein kinase
MEYAAGGELFDRICNAGRFSEDEARYFFQQLICGVSYCHSMQICHRDLKLENTLLDGSPAPRLKICDFGYSKSSLLHSKPKSTVGTPAYIAPEVLSRREYDGKTADVWSCGVTLYVMLVGGYPFEDPDDPKNFRKTIGRIMSIQYKIPEYVHVSQDCKELLSRIFVANSAKRITIREIRNHPWFLKNLPRELTEAAQAMYYKKDNSAPTYSVQSVEEIMKIVEKARTPPPSSTPVAGFGWAEEDEQEDSKEPDEEHEDGEDEYEKQVKQVHASGEFHLSC

SEQ ID NO: 1452 - protein, 276 aa, Zea mays subsp. mays
  peptide (1)..(276): Ceres Seq. ID no. 13498921
  misc_feature (77)..(104): Homolog of NCBI NO: 19568098 NR Description: osmotic stress-activated protein kinase
HRCRTRPSEEPDERARGLLLKLRILPFRAFPPPPPPPLSSPHPSEASKAAPTPTAARPDRAYSCRGPPRPARDLGAMEKYELLKDIGAGNFGVARLMRNKETKEAGRHEVHPPGPKDRRECGEGDHQPPLAAPPQHHPVQGGGADADAPGDRDGVRRRRRAVRPDLQRREVQRGRGEVLLPAADLWRQLLPLHANLPPRLEAGEHAAGRQPGASPQDLRLRLLQVVAAALEAQVDGRHAGVHRPRGALPPGIRRQDSRCVVLWSHSLCDAGRWLPF

SEQ ID NO: 1453 - DNA, 1756 bp, Zea mays subsp. mays
  misc_feature (1)..(1756): Ceres Seq. ID no. 12374223
  misc_feature: MA Experiment ID: 108536 Result: Up-regulated in Transcription
  misc_feature: MA Experiment 108536 PARAMETER Experiment Name: Zm_Meristem_P Parameter: Age (day) Value: 8
  misc_feature: MA Experiment 108536 PARAMETER Experiment Name: Zm_Meristem_P Parameter: Organism Value: Zea mays
  misc_feature: MA Experiment 108536 PARAMETER Experiment Name: Zm_Meristem_P Parameter: Plant Line Value: 35A19
  misc_feature: MA Experiment 108536 PARAMETER Experiment Name: Zm_Meristem_P Parameter: Tissue Value: Shoot Meristem vs. Above Shoot Meristem
gcacgagaccattacctagaacatcctaatcgaaaaaactgcaggtttatttgcgtggcgtccagtgcagaggccagccggagccggcgctgtacaacggaggcattctcaagttcggcagcagcagcagcggcggcggcgatccggacgggtaccgcacgacggagaccggcgtcttctccccggcgttcgtggtgtacaacctcaacaagaccaccatgtacaccttctcatgctgggtgaagctggaaggcgcgtactcggctctgatcaccgcgaggctggcgccggacaacaccggcgccaggtgcatcgccacggtggttgccaggagcgactgctgggccttcgtcaagggcggattcgtcctggactggccgacgcagacctcggtcatcttctttcagaatgctgacaagacgcccatgaagatcaccgtggcgagcgggtcgctgcagccgttcaccacggaccagtgggcgatgcaccagcaggataccatccggaagaggaggaagcgcgtggcgaccatccacgtggccgacccgcagggcgcccgcgtggtgggcgcgtccgtgtcggtgcagcagacggccaaggacttcccgatcggttcggcgatcgcgtccaccatccttgggaaccaggcgtaccagcagtggttcgtggaccggttcaacgcggcggtgttcgaggacgagctcaagtggtactcgacggagcccatgtcgggtcagctgcgcttcgacgtgccggaccagatgctggcgttcgtgcggtcgcaccgggtgatggtgcgcggccacaacatcttctgggagaaccaggacgcgacgccccggtgggtgaagaacctgacggcggacgacctccgcgccgccgtcaacacgcgcatccagagcctcatgacccgctaccgcggcgagttcgcgcactgggacgtgaacaacgagatgctgcactacaacttctacgagcagcggctggggcccaacgcgtccgcggagttcttcagcgtcgcgcaggacgccgacccgctggccacgctcttcatgaacgagtacaacgtcatcgagacctgcgacgaccccttctccaccgtcgacacgtacgtggccaagctcaaggacctccgcaccgccggcgccatcctggaagggatcggcctggagggacacttctccaagcccaacatcccgctcatgagggccatactcgacaagctcgccaccctggggctgcccatctggttcaccgagatcgacatcagcaacaagttcgacgcgcagacgcaggccgcctacctggaacaggtgctgcgggaggcatactcgcacccggccgtcagcggcgtcatgctgtggacggcgctgcaccccagcggctgctaccagatgtgcctcaccgactggaacctcagcaacctgcccacgggggacgtggtcgaccgcctgctcaacgagtggcggacgctgcaggcggccggccagaccgacgcgcacggcgcctacagcttcaccggctacctgggggagtacgtcctcactgtcagctacaacaacaggaccacgcagtccaccttctcgctgtcgccgggagacgagaccaggcacatcaacgttcagatgtgacgcgccaacattatatttagggctcctctcctcacggtccgatccatacctggatcggactacttattactagctaatgtagtgactgttgtggaagaagattgcacagtcaatctatgtttctc

SEQ ID NO: 1454 - protein, 470 aa, Zea mays subsp. mays
  peptide (1)..(470): Ceres Seq. ID no. 12374224
  misc_feature (120)..(413): Pfam Name: Glycosyl hydrolase family 10 Pfam Description: Glycosyl hydrolase family 10
  misc_feature (1)..(446): Homolog of NCBI NO: 40363757 NR Description: putative 1,4-beta-xylanase [Triticum aestivum]
  misc_feature (1)..(458): Homolog of NCBI NO: 37533260 NR Description: putative 1,4-beta-xylanase
  misc_feature (1)..(454): Homolog of NCBI NO: 37533262 NR Description: putative 1,4-beta-xylanase
  misc_feature (1)..(464): Homolog of NCBI NO: 23429644 NR Description: endoxylanase [Carica papaya]
  misc_feature (1)..(458): Homolog of NCBI NO: 15235134 NR Description: glycosyl hydrolase family 10; protein id:
  misc_feature (1)..(465): Homolog of NCBI NO: 15235131 NR Description: glycosyl hydrolase family 10; protein id:
  misc_feature (1)..(463): Homolog of NCBI NO: 7485619 NR Description: hypothetical protein F17I5.30 - Arabidopsis
  misc_feature (1)..(463): Homolog of NCBI NO: 30689830 NR Description: glycosyl hydrolase family 10 [Arabidopsis
  misc_feature (59)..(470): Homolog of NCBI NO: 15233983 NR Description: glycosyl hydrolase family 10; protein id:
  misc_feature (1)..(470): Homolog of NCBI NO: 28416709 NR Description: At4g38650 [Arabidopsis thaliana]
MYTFSCWVKLEGAYSALITARLAPDNTGARCIATVVARSDCWAFVKGGFVLDWPTQTSVIFFQNADKTPMKITVASGSLQPFTTDQWAMHQQDTIRKRRKRVATIHVADPQGARVVGASVSVQQTAKDFPIGSAIASTILGNQAYQQWFVDRFNAAVFEDELKWYSTEPMSGQLRFDVPDQMLAFVRSHRVMVRGHNIFWENQDATPRWVKNLTADDLRAAVNTRIQSLMTRYRGEFAHWDVNNEMLHYNFYEQRLGPNASAEFFSVAQDADPLATLFMNEYNVIETCDDPFSTVDTYVAKLKDLRTAGAILEGIGLEGHFSKPNIPLMRAILDKLATLGLPIWFTEIDISNKFDAQTQAAYLEQVLREAYSHPAVSGVMLWTALHPSGCYQMCLTDWNLSNLPTGDVVDRLLNEWRTLQAAGQTDAHGAYSFTGYLGEYVLTVSYNNRTTQSTFSLSPGDETRHINVQM

SEQ ID NO: 1455 - protein, 401 aa, Zea mays subsp. mays
  peptide (1)..(401): Ceres Seq. ID no. 12374225
  misc_feature (51)..(344): Pfam Name: Glycosyl hydrolase family 10 Pfam Description: Glycosyl hydrolase family 10
  misc_feature (1)..(377): Homolog of NCBI NO: 40363757 NR Description: putative 1,4-beta-xylanase [Triticum aestivum]
  misc_feature (1)..(389): Homolog of NCBI NO: 37533260 NR Description: putative 1,4-beta-xylanase
  misc_feature (1)..(385): Homolog of NCBI NO: 37533262 NR Description: putative 1,4-beta-xylanase
  misc_feature (1)..(395): Homolog of NCBI NO: 23429644 NR Description: endoxylanase [Carica papaya]
  misc_feature (1)..(389): Homolog of NCBI NO: 15235134 NR Description: glycosyl hydrolase family 10; protein id:
  misc_feature (1)..(396): Homolog of NCBI NO: 15235131 NR Description: glycosyl hydrolase family 10; protein id:
  misc_feature (1)..(394): Homolog of NCBI NO: 7485619 NR Description: hypothetical protein F17I5.30 - Arabidopsis
  misc_feature (1)..(394): Homolog of NCBI NO: 30689830 NR Description: glycosyl hydrolase family 10 [Arabidopsis
  misc_feature (1)..(401): Homolog of NCBI NO: 15233983 NR Description: glycosyl hydrolase family 10; protein id:
  misc_feature (1)..(401): Homolog of NCBI NO: 28416709 NR Description: At4g38650 [Arabidopsis thaliana]
MKITVASGSLQPFTTDQWAMHQQDTIRKRRKRVATIHVADPQGARVVGASVSVQQTAKDFPIGSAIASTILGNQAYQQWFVDRFNAAVFEDELKWYSTEPMSGQLRFDVPDQMLAFVRSHRVMVRGHNIFWENQDATPRWVKNLTADDLRAAVNTRIQSLMTRYRGEFAHWDVNNEMLHYNFYEQRLGPNASAEFFSVAQDADPLATLFMNEYNVIETCDDPFSTVDTYVAKLKDLRTAGAILEGIGLEGHFSKPNIPLMRAILDKLATLGLPIWFTEIDISNKFDAQTQAAYLEQVLREAYSHPAVSGVMLWTALHPSGCYQMCLTDWNLSNLPTGDVVDRLLNEWRTLQAAGQTDAHGAYSFTGYLGEYVLTVSYNNRTTQSTFSLSPGDETRHINVQM

SEQ ID NO: 1456 - protein, 382 aa, Zea mays subsp. mays
  peptide (1)..(382): Ceres Seq. ID no. 12374226
  misc_feature (32)..(325): Pfam Name: Glycosyl hydrolase family 10 Pfam Description: Glycosyl hydrolase family 10
  misc_feature (1)..(358): Homolog of NCBI NO: 40363757 NR Description: putative 1,4-beta-xylanase [Triticum aestivum]
  misc_feature (1)..(370): Homolog of NCBI NO: 37533260 NR Description: putative 1,4-beta-xylanase
  misc_feature (1)..(366): Homolog of NCBI NO: 37533262 NR Description: putative 1,4-beta-xylanase
  misc_feature (1)..(376): Homolog of NCBI NO: 23429644 NR Description: endoxylanase [Carica papaya]
  misc_feature (1)..(370): Homolog of NCBI NO: 15235134 NR Description: glycosyl hydrolase family 10; protein id:
  misc_feature (1)..(377): Homolog of NCBI NO: 15235131 NR Description: glycosyl hydrolase family 10; protein id:
  misc_feature (1)..(375): Homolog of NCBI NO: 7485619 NR Description: hypothetical protein F17I5.30 - Arabidopsis
  misc_feature (1)..(375): Homolog of NCBI NO: 30689830 NR Description: glycosyl hydrolase family 10 [Arabidopsis
  misc_feature (1)..(382): Homolog of NCBI NO: 15233983 NR Description: glycosyl hydrolase family 10; protein id:
  misc_feature (1)..(382): Homolog of NCBI NO: 28416709 NR Description: At4g38650 [Arabidopsis thaliana]
MHQQDTIRKRRKRVATIHVADPQGARVVGASVSVQQTAKDFPIGSAIASTILGNQAYQQWFVDRFNAAVFEDELKWYSTEPMSGQLRFDVPDQMLAFVRSHRVMVRGHNIFWENQDATPRWVKNLTADDLRAAVNTRIQSLMTRYRGEFAHWDVNNEMLHYNFYEQRLGPNASAEFFSVAQDADPLATLFMNEYNVIETCDDPFSTVDTYVAKLKDLRTAGAILEGIGLEGHFSKPNIPLMRAILDKLATLGLPIWFTEIDISNKFDAQTQAAYLEQVLREAYSHPAVSGVMLWTALHPSGCYQMCLTDWNLSNLPTGDVVDRLLNEWRTLQAAGQTDAHGAYSFTGYLGEYVLTVSYNNRTTQSTFSLSPGDETRHINVQM

SEQ ID NO: 1457 - DNA, 1091 bp, Zea mays subsp. mays
  misc_feature (1)..(1091): Ceres Seq. ID no. 12351358
  misc_feature: MA Experiment ID: 108527 Result: Up-regulated in Transcription
  misc_feature: MA Experiment 108527 PARAMETER Experiment Name: Zm_5mM_NO_P Parameter: Age (day) Value: 8
  misc_feature: MA Experiment 108527 PARAMETER Experiment Name: Zm_5mM_NO_P Parameter: Organism Value: Zea mays
  misc_feature: MA Experiment 108527 PARAMETER Experiment Name: Zm_5mM_NO_P Parameter: Plant Line Value: 35A19
  misc_feature: MA Experiment 108527 PARAMETER Experiment Name: Zm_5mM_NO_P Parameter: Timepoint (hr) Value: 6
  misc_feature: MA Experiment 108527 PARAMETER Experiment Name: Zm_5mM_NO_P Parameter: Tissue Value: Aerial
  misc_feature: MA Experiment 108527 PARAMETER Experiment Name: Zm_5mM_NO_P Parameter: Treatment Value: 5mM NO vs. No Treatment
  misc_feature: MA Experiment ID: 108528 Result: Down-regulated in Transcription
  misc_feature: MA Experiment 108528 PARAMETER Experiment Name: Zm_Imbibed_Seeds_P Parameter: Age (day) Value: 5 vs. 2
  misc_feature: MA Experiment 108528 PARAMETER Experiment Name: Zm_Imbibed_Seeds_P Parameter: Organism Value: Zea mays
  misc_feature: MA Experiment 108528 PARAMETER Experiment Name: Zm_Imbibed_Seeds_P Parameter: Plant Line Value: 35A19
  misc_feature: MA Experiment 108528 PARAMETER Experiment Name: Zm_Imbibed_Seeds_P Parameter: Tissue Value: Aerial vs. Embryo
  misc_feature: MA Experiment ID: 108529 Result: Down-regulated in Transcription
  misc_feature: MA Experiment 108529 PARAMETER Experiment Name: Zm_Imbibed_Seeds_P Parameter: Age (day) Value: 5 vs. 2
  misc_feature: MA Experiment 108529 PARAMETER Experiment Name: Zm_Imbibed_Seeds_P Parameter: Organism Value: Zea mays
  misc_feature: MA Experiment 108529 PARAMETER Experiment Name: Zm_Imbibed_Seeds_P Parameter: Plant Line Value: 35A19
  misc_feature: MA Experiment 108529 PARAMETER Experiment Name: Zm_Imbibed_Seeds_P Parameter: Tissue Value: Roots vs. Embryo
  misc_feature: MA Experiment ID: 108530 Result: Down-regulated in Transcription
  misc_feature: MA Experiment 108530 PARAMETER Experiment Name: Zm_Imbibed_Seeds_P Parameter: Age (day) Value: 6 vs. 2
  misc_feature: MA Experiment 108530 PARAMETER Experiment Name: Zm_Imbibed_Seeds_P Parameter: Organism Value: Zea mays
  misc_feature: MA Experiment 108530 PARAMETER Experiment Name: Zm_Imbibed_Seeds_P Parameter: Plant Line Value: 35A19
  misc_feature: MA Experiment 108530 PARAMETER Experiment Name: Zm_Imbibed_Seeds_P Parameter: Tissue Value: Aerial vs. Embryo
  misc_feature: MA Experiment ID: 108543 Result: Down-regulated in Transcription
  misc_feature: MA Experiment ID: 108544 Result: Down-regulated in Transcription
  misc_feature: MA Experiment ID: 108545 Result: Down-regulated in Transcription
  misc_feature: MA Experiment 108545 PARAMETER Experiment Name: Zm_Imbibed_Seeds_P Parameter: Age (day) Value: 3 vs. 2
  misc_feature: MA Experiment 108545 PARAMETER Experiment Name: Zm_Imbibed_Seeds_P Parameter: Organism Value: Zea mays
  misc_feature: MA Experiment 108545 PARAMETER Experiment Name: Zm_Imbibed_Seeds_P Parameter: Plant Line Value: 35A19
  misc_feature: MA Experiment 108545 PARAMETER Experiment Name: Zm_Imbibed_Seeds_P Parameter: Tissue Value: Aerial vs. Embryo
  misc_feature: MA Experiment ID: 108547 Result: Down-regulated in Transcription
  misc_feature: MA Experiment 108547 PARAMETER Experiment Name: Zm_Imbibed_Seeds_P Parameter: Age (day) Value: 4 vs. 2
  misc_feature: MA Experiment 108547 PARAMETER Experiment Name: Zm_Imbibed_Seeds_P Parameter: Organism Value: Zea mays
  misc_feature: MA Experiment 108547 PARAMETER Experiment Name: Zm_Imbibed_Seeds_P Parameter: Plant Line Value: 35A19
  misc_feature: MA Experiment 108547 PARAMETER Experiment Name: Zm_Imbibed_Seeds_P Parameter: Tissue Value: Aerial vs. Embryo
  misc_feature: MA Experiment ID: 108687 Result: Up-regulated in Transcription
  misc_feature: MA Experiment 108687 PARAMETER Experiment Name: Zm_Embryos-Flowers__P Parameter: Tissue Value: Embryo vs. Aerial+
  misc_feature: MA Experiment ID: 108689 Result: Down-regulated in Transcription
  misc_feature: MA Experiment 108689 PARAMETER Experiment Name: Zm_Drought_Roots_P Parameter: Age (day) Value: 9
  misc_feature: MA Experiment 108689 PARAMETER Experiment Name: Zm_Drought_Roots_P Parameter: Organism Value: Zea mays
  misc_feature: MA Experiment 108689 PARAMETER Experiment Name: Zm_Drought_Roots_P Parameter: Plant Line Value: 35A19
  misc_feature: MA Experiment 108689 PARAMETER Experiment Name: Zm_Drought_Roots_P Parameter: Timepoint (hr) Value: 24
  misc_feature: MA Experiment 108689 PARAMETER Experiment Name: Zm_Drought_Roots_P Parameter: Tissue Value: Roots
  misc_feature: MA Experiment 108689 PARAMETER Experiment Name: Zm_Drought_Roots_P Parameter: Treatment Value: Drought vs. No Drought
  misc_feature: MA Experiment ID: 20000535 Result: Up-regulated in Transcription
  misc_feature: MA Experiment 20000535 PARAMETER Experiment Name: Zm_Hybrid_Seed_Dev_P Parameter: DAP Value: 30 vs. 12
  misc_feature: MA Experiment 20000535 PARAMETER Experiment Name: Zm_Hybrid_Seed_Dev_P Parameter: Organism Value: Zea mays
  misc_feature: MA Experiment 20000535 PARAMETER Experiment Name: Zm_Hybrid_Seed_Dev_P Parameter: Plant Line Value: 35A19
  misc_feature: MA Experiment 20000535 PARAMETER Experiment Name: Zm_Hybrid_Seed_Dev_P Parameter: Tissue Value: Embryo vs. Unfert Floret
accaataaaaaggtagagaatacaagaaaccgtcacgaccgcctccgcagtgctctaccatccgttccatggcgccgccgctcgccctgtttcttctcgccgccatcgtgctctcgcgggccgtctcccacggccacggcggcggcggcggcttctacgacccggcgagcgtcactcagctctcctcgcgccccagggcgttcctgtacagcggcttcctctcggacaccgagtgcgaccacatcgtcagcctggcgaaaggcagcatggagaagtcgatggtggcggataacgactccgggaagagtgtggcgagccaggcgcgcaccagctccggcaccttcttggccaagcgcgaggatgagatcgtgtctgcgattgagaaacgcgtagctgcttggacatttctcccggaagaaaacgccgaatcactccaggtcctgcgctacgaaaccggccagaagtatgacgcccacttcgactatttccacgacagaaacaacctgaagctcggcggccagcgagttgcgaccgtccttatgtacctcacagatgtcaagaaaggtggagagactgtatttccaaacgctgagggaagccatttacagtacaaggacgaaacttggtcggagtgttcaagatctggcctggcagtgaagccaaagaaaggagacgcgctactgttcttcaacctccacgtcaacgccacagccgatacaggcagtctccacgggagctgcccggtgatcgagggcgagaaatggtcggcgacgaaatggatccacgtcaggtcgttcgacaaccccccagacgtgaggacggacgcgccgtgctccgacgacaaggagctctgccctagatgggctgctatcggggagtgccacaggaacccgacgtacatggttgggaccaaagacactctcgggttttgccgcaagagctgcgggatctgtgatgcttgaacgtgttttgggggtagattttgatcccatcatgttttcaataacagatgaatcagtaacctagtgtaatgcgaatttcggtacagtcgcctccattggactgtttcgtccaccagatgttctaatact

SEQ ID NO: 1458 - protein, 297 aa, Zea mays subsp. mays
  peptide (1)..(297): Ceres Seq. ID no. 12351359
  misc_feature (118)..(240): Pfam Name: 2OG-Fe(II) oxygenase superfamily Pfam Description: 2OG-Fe(II) oxygenase superfamily
  misc_feature (5)..(295): Homolog of NCBI NO: 20260280 NR Description: unknown protein [Arabidopsis thaliana]
  misc_feature (42)..(295): Homolog of NCBI NO: 28393447 NR Description: putative prolyl 4-hydroxylase [Arabidopsis
  misc_feature (5)..(297): Homolog of NCBI NO: 34393269 NR Description: prolyl 4-hydroxylase alpha-1 subunit
  misc_feature (31)..(295): Homolog of NCBI NO: 30689216 NR Description: oxidoreductase, 2OG-Fe(II) oxygenase family
  misc_feature (30)..(297): Homolog of NCBI NO: 18086437 NR Description: AT3g28480/MFJ20_16 [Arabidopsis thaliana]
  misc_feature (30)..(297): Homolog of NCBI NO: 18405808 NR Description: prolyl 4-hydroxylase, putative
  misc_feature (30)..(297): Homolog of NCBI NO: 9294583 NR Description: prolyl 4-hydroxylase alpha subunit-like protein
  misc_feature (1)..(97): Homolog of NCBI NO: 37534316 NR Description: unknown protein [Oryza sativa (japonica
  misc_feature (98)..(295): Homolog of NCBI NO: 37534316 NR Description: unknown protein [Oryza sativa (japonica
  misc_feature (1)..(297): Homolog of NCBI NO: 29150365 NR Description: putative oxidoreductase [Oryza sativa (japonica
MAPPLALFLLAAIVLSRAVSHGHGGGGGFYDPASVTQLSSRPRAFLYSGFLSDTECDHIVSLAKGSMEKSMVADNDSGKSVASQARTSSGTFLAKREDEIVSAIEKRVAAWTFLPEENAESLQVLRYETGQKYDAHFDYFHDRNNLKLGGQRVATVLMYLTDVKKGGETVFPNAEGSHLQYKDETWSECSRSGLAVKPKKGDALLFFNLHVNATADTGSLHGSCPVIEGEKWSATKWIHVRSFDNPPDVRTDAPCSDDKELCPRWAAIGECHRNPTYMVGTKDTLGFCRKSCGICDA

SEQ ID NO: 1459 - protein, 231 aa, Zea mays subsp. mays
  peptide (1)..(231): Ceres Seq. ID no. 12351360
  misc_feature (52)..(174): Pfam Name: 2OG-Fe(II) oxygenase superfamily Pfam Description: 2OG-Fe(II) oxygenase superfamily
  misc_feature (1)..(229): Homolog of NCBI NO: 20260280 NR Description: unknown protein [Arabidopsis thaliana]
  misc_feature (1)..(229): Homolog of NCBI NO: 28393447 NR Description: putative prolyl 4-hydroxylase [Arabidopsis
  misc_feature (1)..(231): Homolog of NCBI NO: 34393269 NR Description: prolyl 4-hydroxylase alpha-1 subunit
  misc_feature (1)..(229): Homolog of NCBI NO: 30689216 NR Description: oxidoreductase, 2OG-Fe(II) oxygenase family
  misc_feature (1)..(231): Homolog of NCBI NO: 18086437 NR Description: AT3g28480/MFJ20_16 [Arabidopsis thaliana]
  misc_feature (1)..(231): Homolog of NCBI NO: 18405808 NR Description: prolyl 4-hydroxylase, putative
  misc_feature (1)..(231): Homolog of NCBI NO: 9294583 NR Description: prolyl 4-hydroxylase alpha subunit-like protein
  misc_feature (1)..(31): Homolog of NCBI NO: 37534316 NR Description: unknown protein [Oryza sativa (japonica
  misc_feature (32)..(229): Homolog of NCBI NO: 37534316 NR Description: unknown protein [Oryza sativa (japonica
  misc_feature (1)..(231): Homolog of NCBI NO: 29150365 NR Description: putative oxidoreductase [Oryza sativa (japonica
MEKSMVADNDSGKSVASQARTSSGTFLAKREDEIVSAIEKRVAAWTFLPEENAESLQVLRYETGQKYDAHFDYFHDRNNLKLGGQRVATVLMYLTDVKKGGETVFPNAEGSHLQYKDETWSECSRSGLAVKPKKGDALLFFNLHVNATADTGSLHGSCPVIEGEKWSATKWIHVRSFDNPPDVRTDAPCSDDKELCPRWAAIGECHRNPTYMVGTKDTLGFCRKSCGICDA

SEQ ID NO: 1460 - protein, 227 aa, Zea mays subsp. mays
  peptide (1)..(227): Ceres Seq. ID no. 12351361
  misc_feature (48)..(170): Pfam Name: 2OG-Fe(II) oxygenase superfamily Pfam Description: 2OG-Fe(II) oxygenase superfamily
  misc_feature (1)..(225): Homolog of NCBI NO: 20260280 NR Description: unknown protein [Arabidopsis thaliana]
  misc_feature (1)..(225): Homolog of NCBI NO: 28393447 NR Description: putative prolyl 4-hydroxylase [Arabidopsis
  misc_feature (1)..(227): Homolog of NCBI NO: 34393269 NR Description: prolyl 4-hydroxylase alpha-1 subunit
  misc_feature (1)..(225): Homolog of NCBI NO: 30689216 NR Description: oxidoreductase, 2OG-Fe(II) oxygenase family
  misc_feature (1)..(227): Homolog of NCBI NO: 18086437 NR Description: AT3g28480/MFJ20_16 [Arabidopsis thaliana]
  misc_feature (1)..(227): Homolog of NCBI NO: 18405808 NR Description: prolyl 4-hydroxylase, putative
  misc_feature (1)..(227): Homolog of NCBI NO: 9294583 NR Description: prolyl 4-hydroxylase alpha subunit-like protein
  misc_feature (1)..(27): Homolog of NCBI NO: 37534316 NR Description: unknown protein [Oryza sativa (japonica
  misc_feature (28)..(225): Homolog of NCBI NO: 37534316 NR Description: unknown protein [Oryza sativa (japonica
  misc_feature (1)..(227): Homolog of NCBI NO: 29150365 NR Description: putative oxidoreductase [Oryza sativa (japonica
MVADNDSGKSVASQARTSSGTFLAKREDEIVSAIEKRVAAWTFLPEENAESLQVLRYETGQKYDAHFDYFHDRNNLKLGGQRVATVLMYLTDVKKGGETVFPNAEGSHLQYKDETWSECSRSGLAVKPKKGDALLFFNLHVNATADTGSLHGSCPVIEGEKWSATKWIHVRSFDNPPDVRTDAPCSDDKELCPRWAAIGECHRNPTYMVGTKDTLGFCRKSCGICDA

SEQ ID NO: 1461 - DNA, 1935 bp, Zea mays subsp. mays
  misc_feature (1)..(1935): Ceres Seq. ID no. 12341425
  misc_feature: MA Experiment ID: 20000534 Result: Down-regulated in Transcription
  misc_feature: MA Experiment 20000534 PARAMETER Experiment Name: Zm_Hybrid_Pollen_P Parameter: Age (day) Value: 8
  misc_feature: MA Experiment 20000534 PARAMETER Experiment Name: Zm_Hybrid_Pollen_P Parameter: Organism Value: Zea mays
  misc_feature: MA Experiment 20000534 PARAMETER Experiment Name: Zm_Hybrid_Pollen_P Parameter: Plant Line Value: 35A19
  misc_feature: MA Experiment 20000534 PARAMETER Experiment Name: Zm_Hybrid_Pollen_P Parameter: Tissue Value: Pollen vs. Aerial
attttttctccaaccctttcccctctctttctctctctcatctaccctctctctaaaagactggatacagaacgaggaaaacaaacacccgaaaagaaaggaagaagaggagaagaacaccaaacaagcagaacttttttttttgagaactccataggctgtggaattgtctccaggaatcccctctgggtttgacgagattcatacagagaaatacttcttgattttccccctttcttttgctcaagaatttacctgtacaggcgaaaccgcttctttgttcccttttttttctgtgtttgttttattgggattttcctctggtccgttcttcttcacctgtgaggtggtgagaagcagagagaatcatggggaagcaaggaccctgccgtcattgtggagtcacaagtactcccctgtggcgaaatgggccaccagataagccggtgctctgcaatgcatgtggctcgagatggagaacaaagggttcattggcaaactacactccaatgcatcgcaaggacgatattgatgacgatgaacccagagttagcaagctgaagccaccgacatcaaagctgaagtcacagaagaaaaaaccaaatcacattataatggagaatgggccattttctggtcagaatttccgaaagatgggggatgtcgaccaaagttatcggtctagttcgggatctgcagtatcatactctgagagttgtgccccatatggtgctgctgatgcaagtgaaatgactggttcagcacagtcgcatgcttgggagtccctagtgccatcaagaaagaggagctgtgtcacccgtccgaagccttcccctgtagaaaagcttgcaaaagatctaaacttcatcatgcatgaagagcagttatattacccttcaggatcatcggaggaagacctactataccatagtgaaactcctgtcggttcctttgagatgggctctggaagtgtgcttctaagacatccaaactcgaaatcactggagaaagaatcagaagcaagctctattcctgcagataataaatcatatattacaagtgaatcctactcgggctctgcctcgtttgccattcacaatggaaacaaggcagcaattaacttaaacgcttcaaatgcaaggctgaagaagtcgccgctgcatatggaagacaatgctagaaggggagtagggagcatcagtggtccggaaggctttaccaagtctactatgaaaccactcaaaagaccccgtgacacccaatttcagattgatgcagaactagaaggtaccatgaggagtcctctaagaggtctaaaatctggtgctttggctcagtttgaaagttcatctttgccaaaatctggctacaccaccaaagattcaacctgcactggaggagcacttaatttattcatgttacccccagaaaagttattagtggtccctcctcagtatgtcgaccctgatcaagacttgctgctggagatacctctcaatgcacgacacccagaggcagaacttctgtgtcaaccatctcagctgatgagctctataagccgcagctccacctctatgggtggggttgctgaaggagaagggtgcctgaagcaaccatagtctcaggtcacatcagcaaggagcttaggaacagccagtagttgcagtttactttagcctcctggatcttgacgcctccatttactgatcaccaatgggcgttatgcatccgtcattccctaatttacataacaatgtgcgtcatcttccaacttggcgaattgtccgttcagctaacatttgtagcatgcttttggattgggtttctgctggttgtctgtagcatatggtccgtggagaaagtattatctccgtgtgaaaaaaatatcaccttattgcagggaaatgaaaaaaagaggatactggagagttatgc

SEQ ID NO: 1462 - protein, 416 aa, Zea mays subsp. mays
  peptide (1)..(416): Ceres Seq. ID no. 12341426
  misc_feature (40)..(237): Homolog of NCBI NO: 7485111 NR Description: hypothetical protein - Arabidopsis thaliana
  misc_feature (196)..(416): Homolog of NCBI NO: 38345953 NR Description: OSJNBb0038F03.10 [Oryza sativa (japonica
  misc_feature (13)..(238): Homolog of NCBI NO: 8978081 NR Description: gene_id:K14A3.9~pir||D71445~similar to unknown
  misc_feature (1)..(238): Homolog of NCBI NO: 22327632 NR Description: GATA zinc finger protein; protein id: At5g47140.1
  misc_feature (1)..(237): Homolog of NCBI NO: 30684095 NR Description: GATA zinc finger protein [Arabidopsis thaliana]
  misc_feature (1)..(272): Homolog of NCBI NO: 38345953 NR Description: OSJNBb0038F03.10 [Oryza sativa (japonica
MGKQGPCRHCGVTSTPLWRNGPPDKPVLCNACGSRWRTKGSLANYTPMHRKDDIDDDEPRVSKLKPPTSKLKSQKKKPNHIIMENGPFSGQNFRKMGDVDQSYRSSSGSAVSYSESCAPYGAADASEMTGSAQSHAWESLVPSRKRSCVTRPKPSPVEKLAKDLNFIMHEEQLYYPSGSSEEDLLYHSETPVGSFEMGSGSVLLRHPNSKSLEKESEASSIPADNKSYITSESYSGSASFAIHNGNKAAINLNASNARLKKSPLHMEDNARRGVGSISGPEGFTKSTMKPLKRPRDTQFQIDAELEGTMRSPLRGLKSGALAQFESSSLPKSGYTTKDSTCTGGALNLFMLPPEKLLVVPPQYVDPDQDLLLEIPLNARHPEAELLCQPSQLMSSISRSSTSMGGVAEGEGCLKQP

SEQ ID NO: 1463 - protein, 369 aa, Zea mays subsp. mays
  peptide (1)..(369): Ceres Seq. ID no. 12341427
  misc_feature (1)..(190): Homolog of NCBI NO: 7485111 NR Description: hypothetical protein - Arabidopsis thaliana
  misc_feature (149)..(369): Homolog of NCBI NO: 38345953 NR Description: OSJNBb0038F03.10 [Oryza sativa (japonica
  misc_feature (1)..(191): Homolog of NCBI NO: 8978081 NR Description: gene_id:K14A3.9~pir||D71445~similar to unknown
  misc_feature (1)..(191): Homolog of NCBI NO: 22327632 NR Description: GATA zinc finger protein; protein id: At5g47140.1
  misc_feature (1)..(190): Homolog of NCBI NO: 30684095 NR Description: GATA zinc finger protein [Arabidopsis thaliana]
  misc_feature (1)..(225): Homolog of NCBI NO: 38345953 NR Description: OSJNBb0038F03.10 [Oryza sativa (japonica
MHRKDDIDDDEPRVSKLKPPTSKLKSQKKKPNHIIMENGPFSGQNFRKMGDVDQSYRSSSGSAVSYSESCAPYGAADASEMTGSAQSHAWESLVPSRKRSCVTRPKPSPVEKLAKDLNFIMHEEQLYYPSGSSEEDLLYHSETPVGSFEMGSGSVLLRHPNSKSLEKESEASSIPADNKSYITSESYSGSASFAIHNGNKAAINLNASNARLKKSPLHMEDNARRGVGSISGPEGFTKSTMKPLKRPRDTQFQIDAELEGTMRSPLRGLKSGALAQFESSSLPKSGYTTKDSTCTGGALNLFMLPPEKLLVVPPQYVDPDQDLLLEIPLNARHPEAELLCQPSQLMSSISRSSTSMGGVAEGEGCLKQP

SEQ ID NO: 1464 - protein, 334 aa, Zea mays subsp. mays
  peptide (1)..(334): Ceres Seq. ID no. 12341428
  misc_feature (1)..(155): Homolog of NCBI NO: 30684095 NR Description: GATA zinc finger protein [Arabidopsis thaliana]
  misc_feature (1)..(190): Homolog of NCBI NO: 38345953 NR Description: OSJNBb0038F03.10 [Oryza sativa (japonica
  misc_feature (1)..(155): Homolog of NCBI NO: 7485111 NR Description: hypothetical protein - Arabidopsis thaliana
  misc_feature (114)..(334): Homolog of NCBI NO: 38345953 NR Description: OSJNBb0038F03.10 [Oryza sativa (japonica
  misc_feature (1)..(156): Homolog of NCBI NO: 8978081 NR Description: gene_id:K14A3.9~pir||D71445~similar to unknown
  misc_feature (1)..(156): Homolog of NCBI NO: 22327632 NR Description: GATA zinc finger protein; protein id: At5g47140.1
MENGPFSGQNFRKMGDVDQSYRSSSGSAVSYSESCAPYGAADASEMTGSAQSHAWESLVPSRKRSCVTRPKPSPVEKLAKDLNFIMHEEQLYYPSGSSEEDLLYHSETPVGSFEMGSGSVLLRHPNSKSLEKESEASSIPADNKSYITSESYSGSASFAIHNGNKAAINLNASNARLKKSPLHMEDNARRGVGSISGPEGFTKSTMKPLKRPRDTQFQIDAELEGTMRSPLRGLKSGALAQFESSSLPKSGYTTKDSTCTGGALNLFMLPPEKLLVVPPQYVDPDQDLLLEIPLNARHPEAELLCQPSQLMSSISRSSTSMGGVAEGEGCLKQP

SEQ ID NO: 1465 - DNA, 1677 bp, Zea mays subsp. mays
  misc_feature (1)..(1677): Ceres Seq. ID no. 12357902
  misc_feature: MA Experiment ID: 108523 Result: Up-regulated in Transcription
  misc_feature: MA Experiment 108523 PARAMETER Experiment Name: Zm_42deg_Heat_P Parameter: Age (day) Value: 8
  misc_feature: MA Experiment 108523 PARAMETER Experiment Name: Zm_42deg_Heat_P Parameter: Organism Value: Zea mays
  misc_feature: MA Experiment 108523 PARAMETER Experiment Name: Zm_42deg_Heat_P Parameter: Plant Line Value: 35A19
  misc_feature: MA Experiment 108523 PARAMETER Experiment Name: Zm_42deg_Heat_P Parameter: Temperature (deg C) Value: 42 vs. 22
  misc_feature: MA Experiment 108523 PARAMETER Experiment Name: Zm_42deg_Heat_P Parameter: Timepoint (hr) Value: 6
  misc_feature: MA Experiment 108523 PARAMETER Experiment Name: Zm_42deg_Heat_P Parameter: Tissue Value: Aerial
  misc_feature: MA Experiment ID: 108544 Result: Down-regulated in Transcription
actgtctccacaaacaaaattgtagagtcggagaccaacgccacgccgacatcgacagcactgatccgacaagtcgccgtttctgccctaagcacggacgctgtcggtcacactcgcctcttgttttctcccgagccccatccttccctcccggtctctccttgcgagctagtaccctacttgctccacagtgccacaccgctcgcgctggagtatgggttcgagcccgatgtggtggtcaggaccaccaccgtcgccgtggagccgcggtttagggaaatggtgggcgctggtagggccattcgtggtgaaggccgtcgggttcctgctgctcgcgggcctcttgttccgggtgctctggtcctttccgtcctctccggcgccggcgttgcagatcacaaaaggaaaatgcagtcttttcaatggggaatggataccaaacccctctggtccagcctatacaaatgcaagctgtcgatttattgacgatcaccagaactgcatgatgaatggtagacctgataaggaatatctacattggaagtggaaaccttatggatgtgatcttccaccatttgatgcagtaagatttctagattctatgagaaacaaaggttggggactaattggtgactccatcctccgtaaccaagttcagtcattgctttgccttctgtctaaggctgaagaacctgttgaggtttaccatgataacgaattcaaaaacaggagatggcacttccaatcctacaacttcacagtgtccatcgtctgggctcctttcctcatcaaatctggtatttttgagaatgaggatggcgtgtctacctctgaaatacagctccaccttgatatactcgatgctaactggacaagtcagtatgagagctttgactatattattatttctggcggacaatggtttctgaggacagcggtctactgggagaacggtgcagtggttggtggtcataattctcagaacaagaacctcgctgaacttggttttgagcacctgtatcggaaaactctacaaaacgttttcaacttcatcgtctcagcgaaacacaagccagtaattttcttcaggacctggtcacctgatcacttcgaggatggagagtggttcagcggtgggtcttgtcgcaggaaattgccctacaacaagggagagtacagagagggtaacatcgagcgtgtcatgagacagatcgagcttgagtccttcaacaaggctgtagccgcgcttaggggttcagcggacgtggatagactgagactgatggatacctacagcctctcgtccttgagaccggacggccacgttgggccttacagaacaccctatccctttgcaaggggcagcagtaaatccacgcccgtccaaaatgattgcttgcactggtgtgtaccaggccccattgatgcatggaatgatcttgttatgaagatggccctggatccatgaaaaccttatggatttgtatggtgtgctcttatggagtaagtagcagctaagtgggcacaaaaaagtgtgtccgttttggtttagctgtaaaataggagtgctagcaaatagagaaacctcagggttggctttgttgcaaagatatgtgtatgttgttttaaagctttataagtttcaactgggcagatactgccagttgttcctggttt

SEQ ID NO: 1466 - protein, 417 aa, Zea mays subsp. mays
  peptide (1)..(417): Ceres Seq. ID no. 12357903
  misc_feature (237)..(412): Pfam Name: Arabidopsis proteins of unknown function Pfam Description: Arabidopsis proteins of unknown function
  misc_feature (66)..(413): Homolog of NCBI NO: 15237211 NR Description: putative protein; protein id: At5g15890.1
  misc_feature (66)..(413): Homolog of NCBI NO: 15237213 NR Description: putative protein; protein id: At5g15900.1
  misc_feature (66)..(413): Homolog of NCBI NO: 15223079 NR Description: unknown protein
  misc_feature (65)..(412): Homolog of NCBI NO: 30686312 NR Description: expressed protein [Arabidopsis thaliana]
  misc_feature (65)..(412): Homolog of NCBI NO: 7486743 NR Description: hypothetical protein F9D16.260 - Arabidopsis
  misc_feature (50)..(416): Homolog of NCBI NO: 25518737 NR Description: hypothetical protein F6F3.23 [imported] -
  misc_feature (65)..(416): Homolog of NCBI NO: 15237044 NR Description: putative protein; protein id: At4g11090.1
  misc_feature (58)..(416): Homolog of NCBI NO: 30678135 NR Description: expressed protein [Arabidopsis thaliana]
  misc_feature (30)..(416): Homolog of NCBI NO: 15234058 NR Description: hypothetical protein; protein id: At4g01080.1
  misc_feature (30)..(416): Homolog of NCBI NO: 28393189 NR Description: unknown protein [Arabidopsis thaliana]
MGSSPMWWSGPPPSPWSRGLGKWWALVGPFVVKAVGFLLLAGLLFRVLWSFPSSPAPALQITKGKCSLFNGEWIPNPSGPAYTNASCRFIDDHQNCMMNGRPDKEYLHWKWKPYGCDLPPFDAVRFLDSMRNKGWGLIGDSILRNQVQSLLCLLSKAEEPVEVYHDNEFKNRRWHFQSYNFTVSIVWAPFLIKSGIFENEDGVSTSEIQLHLDILDANWTSQYESFDYIIISGGQWFLRTAVYWENGAVVGGHNSQNKNLAELGFEHLYRKTLQNVFNFIVSAKHKPVIFFRTWSPDHFEDGEWFSGGSCRRKLPYNKGEYREGNIERVMRQIELESFNKAVAALRGSADVDRLRLMDTYSLSSLRPDGHVGPYRTPYPFARGSSKSTPVQNDCLHWCVPGPIDAWNDLVMKMALDP

SEQ ID NO: 1467 - protein, 412 aa, Zea mays subsp. mays
  peptide (1)..(412): Ceres Seq. ID no. 12357904
  misc_feature (232)..(407): Pfam Name: Arabidopsis proteins of unknown function Pfam Description: Arabidopsis proteins of unknown function
  misc_feature (61)..(408): Homolog of NCBI NO: 15237211 NR Description: putative protein; protein id: At5g15890.1
  misc_feature (61)..(408): Homolog of NCBI NO: 15237213 NR Description: putative protein; protein id: At5g15900.1
  misc_feature (61)..(408): Homolog of NCBI NO: 15223079 NR Description: unknown protein
  misc_feature (60)..(407): Homolog of NCBI NO: 30686312 NR Description: expressed protein [Arabidopsis thaliana]
  misc_feature (60)..(407): Homolog of NCBI NO: 7486743 NR Description: hypothetical protein F9D16.260 - Arabidopsis
  misc_feature (45)..(411): Homolog of NCBI NO: 25518737 NR Description: hypothetical protein F6F3.23 [imported] -
  misc_feature (60)..(411): Homolog of NCBI NO: 15237044 NR Description: putative protein; protein id: At4g11090.1
  misc_feature (53)..(411): Homolog of NCBI NO: 30678135 NR Description: expressed protein [Arabidopsis thaliana]
  misc_feature (25)..(411): Homolog of NCBI NO: 15234058 NR Description: hypothetical protein; protein id: At4g01080.1
  misc_feature (25)..(411): Homolog of NCBI NO: 28393189 NR Description: unknown protein [Arabidopsis thaliana]
MWWSGPPPSPWSRGLGKWWALVGPFVVKAVGFLLLAGLLFRVLWSFPSSPAPALQITKGKCSLFNGEWIPNPSGPAYTNASCRFIDDHQNCMMNGRPDKEYLHWKWKPYGCDLPPFDAVRFLDSMRNKGWGLIGDSILRNQVQSLLCLLSKAEEPVEVYHDNEFKNRRWHFQSYNFTVSIVWAPFLIKSGIFENEDGVSTSEIQLHLDILDANWTSQYESFDYIIISGGQWFLRTAVYWENGAVVGGHNSQNKNLAELGFEHLYRKTLQNVFNFIVSAKHKPVIFFRTWSPDHFEDGEWFSGGSCRRKLPYNKGEYREGNIERVMRQIELESFNKAVAALRGSADVDRLRLMDTYSLSSLRPDGHVGPYRTPYPFARGSSKSTPVQNDCLHWCVPGPIDAWNDLVMKMALDP

SEQ ID NO: 1468 - protein, 321 aa, Zea mays subsp. mays
  peptide (1)..(321): Ceres Seq. ID no. 12357905
  misc_feature (141)..(316): Pfam Name: Arabidopsis proteins of unknown function Pfam Description: Arabidopsis proteins of unknown function
  misc_feature (1)..(317): Homolog of NCBI NO: 15237211 NR Description: putative protein; protein id: At5g15890.1
  misc_feature (1)..(317): Homolog of NCBI NO: 15237213 NR Description: putative protein; protein id: At5g15900.1
  misc_feature (1)..(317): Homolog of NCBI NO: 15223079 NR Description: unknown protein
  misc_feature (1)..(316): Homolog of NCBI NO: 30686312 NR Description: expressed protein [Arabidopsis thaliana]
  misc_feature (1)..(316): Homolog of NCBI NO: 7486743 NR Description: hypothetical protein F9D16.260 - Arabidopsis
  misc_feature (1)..(320): Homolog of NCBI NO: 25518737 NR Description: hypothetical protein F6F3.23 [imported] -
  misc_feature (1)..(320): Homolog of NCBI NO: 15237044 NR Description: putative protein; protein id: At4g11090.1
  misc_feature (1)..(320): Homolog of NCBI NO: 30678135 NR Description: expressed protein [Arabidopsis thaliana]
  misc_feature (1)..(320): Homolog of NCBI NO: 15234058 NR Description: hypothetical protein; protein id: At4g01080.1
  misc_feature (1)..(320): Homolog of NCBI NO: 28393189 NR Description: unknown protein [Arabidopsis thaliana]
MMNGRPDKEYLHWKWKPYGCDLPPFDAVRFLDSMRNKGWGLIGDSILRNQVQSLLCLLSKAEEPVEVYHDNEFKNRRWHFQSYNFTVSIVWAPFLIKSGIFENEDGVSTSEIQLHLDILDANWTSQYESFDYIIISGGQWFLRTAVYWENGAVVGGHNSQNKNLAELGFEHLYRKTLQNVFNFIVSAKHKPVIFFRTWSPDHFEDGEWFSGGSCRRKLPYNKGEYREGNIERVMRQIELESFNKAVAALRGSADVDRLRLMDTYSLSSLRPDGHVGPYRTPYPFARGSSKSTPVQNDCLHWCVPGPIDAWNDLVMKMALDP

SEQ ID NO: 1469 - DNA, 1462 bp, Zea mays subsp. mays
  misc_feature (1)..(1462): Ceres Seq. ID no. 12345814
  misc_feature: MA Experiment ID: 108527 Result: Down-regulated in Transcription
  misc_feature: MA Experiment 108527 PARAMETER Experiment Name: Zm_5mM_NO_P Parameter: Age (day) Value: 8
  misc_feature: MA Experiment 108527 PARAMETER Experiment Name: Zm_5mM_NO_P Parameter: Organism Value: Zea mays
  misc_feature: MA Experiment 108527 PARAMETER Experiment Name: Zm_5mM_NO_P Parameter: Plant Line Value: 35A19
  misc_feature: MA Experiment 108527 PARAMETER Experiment Name: Zm_5mM_NO_P Parameter: Timepoint (hr) Value: 6
  misc_feature: MA Experiment 108527 PARAMETER Experiment Name: Zm_5mM_NO_P Parameter: Tissue Value: Aerial
  misc_feature: MA Experiment 108527 PARAMETER Experiment Name: Zm_5mM_NO_P Parameter: Treatment Value: 5mM NO vs. No Treatment
  misc_feature: MA Experiment ID: 108528 Result: Up-regulated in Transcription
  misc_feature: MA Experiment 108528 PARAMETER Experiment Name: Zm_Imbibed_Seeds_P Parameter: Age (day) Value: 5 vs. 2
  misc_feature: MA Experiment 108528 PARAMETER Experiment Name: Zm_Imbibed_Seeds_P Parameter: Organism Value: Zea mays
  misc_feature: MA Experiment 108528 PARAMETER Experiment Name: Zm_Imbibed_Seeds_P Parameter: Plant Line Value: 35A19
  misc_feature: MA Experiment 108528 PARAMETER Experiment Name: Zm_Imbibed_Seeds_P Parameter: Tissue Value: Aerial vs. Embryo
  misc_feature: MA Experiment ID: 108530 Result: Up-regulated in Transcription
  misc_feature: MA Experiment 108530 PARAMETER Experiment Name: Zm_Imbibed_Seeds_P Parameter: Age (day) Value: 6 vs. 2
  misc_feature: MA Experiment 108530 PARAMETER Experiment Name: Zm_Imbibed_Seeds_P Parameter: Organism Value: Zea mays
  misc_feature: MA Experiment 108530 PARAMETER Experiment Name: Zm_Imbibed_Seeds_P Parameter: Plant Line Value: 35A19
  misc_feature: MA Experiment 108530 PARAMETER Experiment Name: Zm_Imbibed_Seeds_P Parameter: Tissue Value: Aerial vs. Embryo
  misc_feature: MA Experiment ID: 108547 Result: Up-regulated in Transcription
  misc_feature: MA Experiment 108547 PARAMETER Experiment Name: Zm_Imbibed_Seeds_P Parameter: Age (day) Value: 4 vs. 2
  misc_feature: MA Experiment 108547 PARAMETER Experiment Name: Zm_Imbibed_Seeds_P Parameter: Organism Value: Zea mays
  misc_feature: MA Experiment 108547 PARAMETER Experiment Name: Zm_Imbibed_Seeds_P Parameter: Plant Line Value: 35A19
  misc_feature: MA Experiment 108547 PARAMETER Experiment Name: Zm_Imbibed_Seeds_P Parameter: Tissue Value: Aerial vs. Embryo
  misc_feature: MA Experiment ID: 108556 Result: Down-regulated in Transcription
  misc_feature: MA Experiment 108556 PARAMETER Experiment Name: Zm_Drought_P Parameter: Age (day) Value: 9
  misc_feature: MA Experiment 108556 PARAMETER Experiment Name: Zm_Drought_P Parameter: Organism Value: Zea mays
  misc_feature: MA Experiment 108556 PARAMETER Experiment Name: Zm_Drought_P Parameter: Plant Line Value: 35A19
  misc_feature: MA Experiment 108556 PARAMETER Experiment Name: Zm_Drought_P Parameter: Timepoint (hr) Value: 24
  misc_feature: MA Experiment 108556 PARAMETER Experiment Name: Zm_Drought_P Parameter: Tissue Value: Aerial
  misc_feature: MA Experiment 108556 PARAMETER Experiment Name: Zm_Drought_P Parameter: Treatment Value: Drought vs. No Drought
  misc_feature: MA Experiment ID: 108688 Result: Down-regulated in Transcription
  misc_feature: MA Experiment 108688 PARAMETER Experiment Name: Zm_Embryos-Flowers__P Parameter: Tissue Value: Immature Flowers vs. Aerial+
  misc_feature: MA Experiment ID: 20000108 Result: Up-regulated in Transcription
  misc_feature: MA Experiment 20000108 PARAMETER Experiment Name: Zm_Root-Tips_P Parameter: Age (day) Value: 12
  misc_feature: MA Experiment 20000108 PARAMETER Experiment Name: Zm_Root-Tips_P Parameter: Organism Value: Zea mays
  misc_feature: MA Experiment 20000108 PARAMETER Experiment Name: Zm_Root-Tips_P Parameter: Tissue Value: Root tips vs. Root mid region    35
  misc_feature: MA Experiment 20000108 PARAMETER Experiment Name: Zm_Root-Tips_P Parameter: Tissue Value: Root tips vs. Root mid region   Sequence Listing-Misc Features (4)
  misc_feature: MA Experiment ID: 20000478 Result: Down-regulated in Transcription
  misc_feature: MA Experiment 20000478 PARAMETER Experiment Name: Zm_5mM_SA_P Parameter: Age (day) Value: 11
  misc_feature: MA Experiment 20000478 PARAMETER Experiment Name: Zm_5mM_SA_P Parameter: Organism Value: Zea mays
  misc_feature: MA Experiment 20000478 PARAMETER Experiment Name: Zm_5mM_SA_P Parameter: Plant Line Value: 35A19
  misc_feature: MA Experiment 20000478 PARAMETER Experiment Name: Zm_5mM_SA_P Parameter: Timepoint (hr) Value: 72
  misc_feature: MA Experiment 20000478 PARAMETER Experiment Name: Zm_5mM_SA_P Parameter: Tissue Value: Aerial
  misc_feature: MA Experiment 20000478 PARAMETER Experiment Name: Zm_5mM_SA_P Parameter: Treatment Value: 5mM SA vs. No Treatment
cctgtttgtttacccagattatctggcgtgtttctgttgggcggcgggcttctctgatccgataggggcaaaaacgattcggtagattataatggcaatgatgggtaatttctaggaaacttgaaagggtagtggggaagtgggaaaaaaataatctgaaataagcacctcctcacttgcttatggattatcataatccaaggggttagattatataatctgggcaaataagctagactgtttgtttgcctcttaggattatttaatccagattatataatctgggggtaaacaaacaggcccttaaagtctcttctttcccttttgtgatgggaacctttggccaattatgcagccgagcatttcgggctgccactgccgccaccgtcgcaggccaagggcaaggacttcaagaagggcgccaacttcgccatcaccggcgcgacggccctggagtactccttcttcaaggcgcacggcatcgaccagcgcatctggaacaccggctccatcaacacccagatcggctggctccaggacatgaagccgtccctctgtaaatcggagcaagactgcaaggattacttcagcaaatccctgttcgtcgtcggggagttcgggggcaacgactacaacgcgccgctcttctccggcgtcccattttctgatgtcaagacttacgtgccccttgttgcaaaggctatcgccaatggcgttgagaaactgatcgagcttggggcaacagacctcctggtgcctggcgttctcccaattggctgcttcccgttgtacctgacgctgtacaacaccagcagcaaagcagattacaacgcccggaccgggtgccttcggaggtacaaccgcctggccttccaccacaacagggagctgaagcagcagcttgacgagcttcagaagaagtaccccaagacgaagatcatgtatggagattacttcaaggctgcactgcagtttgtcgtcaaccctgggaaatttggtttcagcacggctttgcaagcgtgctgcggcgccggagggcagggcaactacaacttcaacctgaagaagaagtgtggcgagcagggcgcgagcgtgtgctccaacccgtcgtcgtacgtgagctgggatggcatccacatgaccgaagctgcgtacagaaaggtcgccgatggctggttgaatggcccgtatgctcagcccccaattctcaagtcatgatcgagattactaggctgtgcgtaacagccgccgcagctgcatgctgcggctagagatatatatgaggagtgtttcaggcaatagatatgctaagttatggtaaagctatttggtctgttcattggaagatctgtataaactgcgccggtatagatatgttcccagctgaaatggctctagcncagatgtgcatggcatgttctctgattcttttcatttgttctaaaaaaatattgcggcagtg

SEQ ID NO: 1470 - protein, 225 aa, Zea mays subsp. mays
  peptide (1)..(225): Ceres Seq. ID no. 12345815
  misc_feature (1)..(212): Pfam Name: GDSL-like Lipase/Acylhydrolase Pfam Description: GDSL-like Lipase/Acylhydrolase
  misc_feature (1)..(225): Homolog of NCBI NO: 34904004 NR Description: unnamed protein product [Oryza sativa (japonica
  misc_feature (1)..(225): Homolog of NCBI NO: 15218731 NR Description: lipase, putative
  misc_feature (1)..(225): Homolog of NCBI NO: 10764858 NR Description: F1K23.17 [Arabidopsis thaliana]
  misc_feature (1)..(225): Homolog of NCBI NO: 21593234 NR Description: lipase, putative [Arabidopsis thaliana]
  misc_feature (1)..(225): Homolog of NCBI NO: 34903986 NR Description: unnamed protein product [Oryza sativa (japonica
  misc_feature (1)..(223): Homolog of NCBI NO: 34903994 NR Description: unnamed protein product [Oryza sativa (japonica
  misc_feature (1)..(223): Homolog of NCBI NO: 34903996 NR Description: unnamed protein product [Oryza sativa (japonica
  misc_feature (1)..(223): Homolog of NCBI NO: 34903978 NR Description: unnamed protein product [Oryza sativa (japonica
  misc_feature (1)..(225): Homolog of NCBI NO: 34903958 NR Description: OSJNBa0038J17.24 [Oryza sativa (japonica
  misc_feature (1)..(223): Homolog of NCBI NO: 34903956 NR Description: OSJNBa0038J17.23 [Oryza sativa (japonica
MKPSLCKSEQDCKDYFSKSLFVVGEFGGNDYNAPLFSGVPFSDVKTYVPLVAKAIANGVEKLIELGATDLLVPGVLPIGCFPLYLTLYNTSSKADYNARTGCLRRYNRLAFHHNRELKQQLDELQKKYPKTKIMYGDYFKAALQFVVNPGKFGFSTALQACCGAGGQGNYNFNLKKKCGEQGASVCSNPSSYVSWDGIHMTEAAYRKVADGWLNGPYAQPPILKS

SEQ ID NO: 1471 - DNA, 1299 bp, Zea mays subsp. mays
  misc_feature (1)..(1299): Ceres Seq. ID no. 12373989
  misc_feature: MA Experiment ID: 108522 Result: Down-regulated in Transcription
  misc_feature: MA Experiment 108522 PARAMETER Experiment Name: Zm_42deg_Heat_P Parameter: Age (day) Value: 8
  misc_feature: MA Experiment 108522 PARAMETER Experiment Name: Zm_42deg_Heat_P Parameter: Organism Value: Zea mays
  misc_feature: MA Experiment 108522 PARAMETER Experiment Name: Zm_42deg_Heat_P Parameter: Plant Line Value: 35A19
  misc_feature: MA Experiment 108522 PARAMETER Experiment Name: Zm_42deg_Heat_P Parameter: Temperature (deg C) Value: 42 vs. 22
  misc_feature: MA Experiment 108522 PARAMETER Experiment Name: Zm_42deg_Heat_P Parameter: Timepoint (hr) Value: 1
  misc_feature: MA Experiment 108522 PARAMETER Experiment Name: Zm_42deg_Heat_P Parameter: Tissue Value: Aerial
  misc_feature: MA Experiment ID: 108523 Result: Down-regulated in Transcription
  misc_feature: MA Experiment 108523 PARAMETER Experiment Name: Zm_42deg_Heat_P Parameter: Age (day) Value: 8
  misc_feature: MA Experiment 108523 PARAMETER Experiment Name: Zm_42deg_Heat_P Parameter: Organism Value: Zea mays
  misc_feature: MA Experiment 108523 PARAMETER Experiment Name: Zm_42deg_Heat_P Parameter: Plant Line Value: 35A19
  misc_feature: MA Experiment 108523 PARAMETER Experiment Name: Zm_42deg_Heat_P Parameter: Temperature (deg C) Value: 42 vs. 22
  misc_feature: MA Experiment 108523 PARAMETER Experiment Name: Zm_42deg_Heat_P Parameter: Timepoint (hr) Value: 6
  misc_feature: MA Experiment 108523 PARAMETER Experiment Name: Zm_42deg_Heat_P Parameter: Tissue Value: Aerial
  misc_feature: MA Experiment ID: 108529 Result: Down-regulated in Transcription
  misc_feature: MA Experiment 108529 PARAMETER Experiment Name: Zm_Imbibed_Seeds_P Parameter: Age (day) Value: 5 vs. 2
  misc_feature: MA Experiment 108529 PARAMETER Experiment Name: Zm_Imbibed_Seeds_P Parameter: Organism Value: Zea mays
  misc_feature: MA Experiment 108529 PARAMETER Experiment Name: Zm_Imbibed_Seeds_P Parameter: Plant Line Value: 35A19
  misc_feature: MA Experiment 108529 PARAMETER Experiment Name: Zm_Imbibed_Seeds_P Parameter: Tissue Value: Roots vs. Embryo
  misc_feature: MA Experiment ID: 108543 Result: Up-regulated in Transcription
  misc_feature: MA Experiment ID: 108545 Result: Up-regulated in Transcription
  misc_feature: MA Experiment 108545 PARAMETER Experiment Name: Zm_Imbibed_Seeds_P Parameter: Age (day) Value: 3 vs. 2
  misc_feature: MA Experiment 108545 PARAMETER Experiment Name: Zm_Imbibed_Seeds_P Parameter: Organism Value: Zea mays
  misc_feature: MA Experiment 108545 PARAMETER Experiment Name: Zm_Imbibed_Seeds_P Parameter: Plant Line Value: 35A19
  misc_feature: MA Experiment 108545 PARAMETER Experiment Name: Zm_Imbibed_Seeds_P Parameter: Tissue Value: Aerial vs. Embryo
  misc_feature: MA Experiment ID: 108546 Result: Down-regulated in Transcription
  misc_feature: MA Experiment 108546 PARAMETER Experiment Name: Zm_Imbibed_Seeds_P Parameter: Age (day) Value: 3 vs. 2
  misc_feature: MA Experiment 108546 PARAMETER Experiment Name: Zm_Imbibed_Seeds_P Parameter: Organism Value: Zea mays
  misc_feature: MA Experiment 108546 PARAMETER Experiment Name: Zm_Imbibed_Seeds_P Parameter: Plant Line Value: 35A19
  misc_feature: MA Experiment 108546 PARAMETER Experiment Name: Zm_Imbibed_Seeds_P Parameter: Tissue Value: Roots vs. Embryo
  misc_feature: MA Experiment ID: 108547 Result: Up-regulated in Transcription
  misc_feature: MA Experiment 108547 PARAMETER Experiment Name: Zm_Imbibed_Seeds_P Parameter: Age (day) Value: 4 vs. 2
  misc_feature: MA Experiment 108547 PARAMETER Experiment Name: Zm_Imbibed_Seeds_P Parameter: Organism Value: Zea mays
  misc_feature: MA Experiment 108547 PARAMETER Experiment Name: Zm_Imbibed_Seeds_P Parameter: Plant Line Value: 35A19
  misc_feature: MA Experiment 108547 PARAMETER Experiment Name: Zm_Imbibed_Seeds_P Parameter: Tissue Value: Aerial vs. Embryo
  misc_feature: MA Experiment ID: 20000477 Result: Down-regulated in Transcription
  misc_feature: MA Experiment 20000477 PARAMETER Experiment Name: Zm_5mM_SA_P Parameter: Age (day) Value: 10
  misc_feature: MA Experiment 20000477 PARAMETER Experiment Name: Zm_5mM_SA_P Parameter: Organism Value: Zea mays
  misc_feature: MA Experiment 20000477 PARAMETER Experiment Name: Zm_5mM_SA_P Parameter: Plant Line Value: 35A19
  misc_feature: MA Experiment 20000477 PARAMETER Experiment Name: Zm_5mM_SA_P Parameter: Timepoint (hr) Value: 48
  misc_feature: MA Experiment 20000477 PARAMETER Experiment Name: Zm_5mM_SA_P Parameter: Tissue Value: Aerial
  misc_feature: MA Experiment 20000477 PARAMETER Experiment Name: Zm_5mM_SA_P Parameter: Treatment Value: 5mM SA vs. No Treatment
  misc_feature: MA Experiment ID: 20000478 Result: Down-regulated in Transcription
  misc_feature: MA Experiment 20000478 PARAMETER Experiment Name: Zm_5mM_SA_P Parameter: Age (day) Value: 11
  misc_feature: MA Experiment 20000478 PARAMETER Experiment Name: Zm_5mM_SA_P Parameter: Organism Value: Zea mays
  misc_feature: MA Experiment 20000478 PARAMETER Experiment Name: Zm_5mM_SA_P Parameter: Plant Line Value: 35A19
  misc_feature: MA Experiment 20000478 PARAMETER Experiment Name: Zm_5mM_SA_P Parameter: Timepoint (hr) Value: 72
  misc_feature: MA Experiment 20000478 PARAMETER Experiment Name: Zm_5mM_SA_P Parameter: Tissue Value: Aerial
  misc_feature: MA Experiment 20000478 PARAMETER Experiment Name: Zm_5mM_SA_P Parameter: Treatment Value: 5mM SA vs. No Treatment
  misc_feature: MA Experiment ID: 20000626 Result: Down-regulated in Transcription
  misc_feature: MA Experiment 20000626 PARAMETER Experiment Name: Zm_Herbicide-Treatments_P Parameter: Timepoint (hr) Value: 12
  misc_feature: MA Experiment 20000626 PARAMETER Experiment Name: Zm_Herbicide-Treatments_P Parameter: Tissue Value: Aerial
  misc_feature: MA Experiment 20000626 PARAMETER Experiment Name: Zm_Herbicide-Treatments_P Parameter: Treatment Value: Roundup vs. No Treatment
agactggaaaagcatcggcacgggcggtaggataaagtagcatagcataccacaaaaggtgctgcttgacagatggcaagcttcccacacctcacgcagatggagcatggcctagccagtggtgcctcccatggcacgccgagcttcttcttctgccatggcacagccacggcggattcagcctcgctggagacctcgtctggtgttctcgacacctccccacgaggcacttcttctggcgacaacaaggcctgcaggaagcacaaggaagatagtggtgccagcttcagctctgctcgctccaaggactcaaactcaaaggaaagcagcaaaaggagcggaggaaaaagagacagaagcagcaagaaggtggacgaggaggagcccaaggggtacatacatgtcagggcgaggagaggacaagcaacggacaaccacagccttgcagagagggtgaggagggagagaatcagtgagaggatgagggtgttgcaggccctggtccctggctgtgataaggtcactggaaaagccctcattttggacgagatcatcaattatgtgcagtccttgcagaaccaagttgagttcctttccatgaggattgcttccctgagccctgtgctgtatggttttggcatggacagtagtgatgctttcagtgaccttataactcagaagatcgaagggatggcccaccatgaggcgttcgcgatgcctagcagctctgtcctgaacggcactccgtcggaagctctcgtggacacgcacacctccagctcctccccgtcctacgaggtccacggcgacggcggcaccgccagcgtctctttccctcaggacagtggcagctacatggtgcaaacagtaggtgagccaaggcaagagctgttcagccaagtggtgttcagtaaccacatgtgccctttccagtagggagagagcgagaggatggaaggacgacaggaagcaataatgttgagatcctatggaggtggaggccaccaccagacgagtttgtgatgttggacgcaatccatcccctcgtcggtggccgtaacgggaacccctgcggtagctagcattagcagtagtaataatagtaggctgttggttacatcatcctgttagatctcaaggtctctgtcggtaccgcatcatctagtaggcattgttgctgcttagcttttgggctctcttattaccaagggttgcatgcatgccattgtattgtactctccaattggaaaaaaaagaaaaaaaatatcatttgttcataaacacagtcaatttgtgctc

SEQ ID NO: 1472 - protein, 287 aa, Zea mays subsp. mays
  peptide (1)..(287): Ceres Seq. ID no. 12373990
  misc_feature (118)..(168): Pfam Name: Helix-loop-helix DNA-binding domain Pfam Description: Helix-loop-helix DNA-binding domain
  misc_feature (29)..(224): Homolog of NCBI NO: 15222679 NR Description: bHLH protein; protein id: At1g26260.1
  misc_feature (39)..(219): Homolog of NCBI NO: 15239013 NR Description: putative protein
  misc_feature (40)..(183): Homolog of NCBI NO: 30697769 NR Description: DNA-binding protein -related [Arabidopsis
  misc_feature (39)..(219): Homolog of NCBI NO: 20127085 NR Description: putative bHLH transcription factor [Arabidopsis
  misc_feature (17)..(185): Homolog of NCBI NO: 34906952 NR Description: DNA-binding protein-like protein
  misc_feature (50)..(219): Homolog of NCBI NO: 20127064 NR Description: putative bHLH transcription factor [Arabidopsis
  misc_feature (50)..(219): Homolog of NCBI NO: 15231450 NR Description: bHLH protein
  misc_feature (24)..(233): Homolog of NCBI NO: 18423212 NR Description: Expressed protein
  misc_feature (137)..(287): Homolog of NCBI NO: 38175541 NR Description: bHLH transcription factor-like protein
  misc_feature (19)..(260): Homolog of NCBI NO: 5923912 NR Description: bHLH transcription factor GBOF-1 [Tulipa
MASFPHLTQMEHGLASGASHGTPSFFFCHGTATADSASLETSSGVLDTSPRGTSSGDNKACRKHKEDSGASFSSARSKDSNSKESSKRSGGKRDRSSKKVDEEEPKGYIHVRARRGQATDNHSLAERVRRERISERMRVLQALVPGCDKVTGKALILDEIINYVQSLQNQVEFLSMRIASLSPVLYGFGMDSSDAFSDLITQKIEGMAHHEAFAMPSSSVLNGTPSEALVDTHTSSSSPSYEVHGDGGTASVSFPQDSGSYMVQTVGEPRQELFSQVVFSNHMCPFQ

SEQ ID NO: 1473 - protein, 278 aa, Zea mays subsp. mays
  peptide (1)..(278): Ceres Seq. ID no. 12373991
  misc_feature (109)..(159): Pfam Name: Helix-loop-helix DNA-binding domain Pfam Description: Helix-loop-helix DNA-binding domain
  misc_feature (20)..(215): Homolog of NCBI NO: 15222679 NR Description: bHLH protein; protein id: At1g26260.1
  misc_feature (30)..(210): Homolog of NCBI NO: 15239013 NR Description: putative protein
  misc_feature (31)..(174): Homolog of NCBI NO: 30697769 NR Description: DNA-binding protein -related [Arabidopsis
  misc_feature (30)..(210): Homolog of NCBI NO: 20127085 NR Description: putative bHLH transcription factor [Arabidopsis
  misc_feature (8)..(176): Homolog of NCBI NO: 34906952 NR Description: DNA-binding protein-like protein
  misc_feature (41)..(210): Homolog of NCBI NO: 20127064 NR Description: putative bHLH transcription factor [Arabidopsis
  misc_feature (41)..(210): Homolog of NCBI NO: 15231450 NR Description: bHLH protein
  misc_feature (15)..(224): Homolog of NCBI NO: 18423212 NR Description: Expressed protein
  misc_feature (128)..(278): Homolog of NCBI NO: 38175541 NR Description: bHLH transcription factor-like protein
  misc_feature (10)..(251): Homolog of NCBI NO: 5923912 NR Description: bHLH transcription factor GBOF-1 [Tulipa
MEHGLASGASHGTPSFFFCHGTATADSASLETSSGVLDTSPRGTSSGDNKACRKHKEDSGASFSSARSKDSNSKESSKRSGGKRDRSSKKVDEEEPKGYIHVRARRGQATDNHSLAERVRRERISERMRVLQALVPGCDKVTGKALILDEIINYVQSLQNQVEFLSMRIASLSPVLYGFGMDSSDAFSDLITQKIEGMAHHEAFAMPSSSVLNGTPSEALVDTHTSSSSPSYEVHGDGGTASVSFPQDSGSYMVQTVGEPRQELFSQVVFSNHMCPFQ

SEQ ID NO: 1474 - protein, 151 aa, Zea mays subsp. mays
  peptide (1)..(151): Ceres Seq. ID no. 12373992
  misc_feature (1)..(88): Homolog of NCBI NO: 15222679 NR Description: bHLH protein; protein id: At1g26260.1
  misc_feature (1)..(83): Homolog of NCBI NO: 15239013 NR Description: putative protein
  misc_feature (1)..(47): Homolog of NCBI NO: 30697769 NR Description: DNA-binding protein -related [Arabidopsis
  misc_feature (1)..(83): Homolog of NCBI NO: 20127085 NR Description: putative bHLH transcription factor [Arabidopsis
  misc_feature (1)..(49): Homolog of NCBI NO: 34906952 NR Description: DNA-binding protein-like protein
  misc_feature (1)..(83): Homolog of NCBI NO: 20127064 NR Description: putative bHLH transcription factor [Arabidopsis
  misc_feature (1)..(83): Homolog of NCBI NO: 15231450 NR Description: bHLH protein
  misc_feature (1)..(97): Homolog of NCBI NO: 18423212 NR Description: Expressed protein
  misc_feature (1)..(151): Homolog of NCBI NO: 38175541 NR Description: bHLH transcription factor-like protein
  misc_feature (1)..(124): Homolog of NCBI NO: 5923912 NR Description: bHLH transcription factor GBOF-1 [Tulipa
MRVLQALVPGCDKVTGKALILDEIINYVQSLQNQVEFLSMRIASLSPVLYGFGMDSSDAFSDLITQKIEGMAHHEAFAMPSSSVLNGTPSEALVDTHTSSSSPSYEVHGDGGTASVSFPQDSGSYMVQTVGEPRQELFSQVVFSNHMCPFQ

SEQ ID NO: 1475 - DNA, 1461 bp, Zea mays subsp. mays
  misc_feature (1)..(1461): Ceres Seq. ID no. 12341538
  misc_feature: MA Experiment ID: 20000479 Result: Down-regulated in Transcription
  misc_feature: MA Experiment 20000479 PARAMETER Experiment Name: Zm_Drought_P Parameter: Age (day) Value: 10
  misc_feature: MA Experiment 20000479 PARAMETER Experiment Name: Zm_Drought_P Parameter: Organism Value: Zea mays
  misc_feature: MA Experiment 20000479 PARAMETER Experiment Name: Zm_Drought_P Parameter: Plant Line Value: 35A19
  misc_feature: MA Experiment 20000479 PARAMETER Experiment Name: Zm_Drought_P Parameter: Timepoint (hr) Value: 48
  misc_feature: MA Experiment 20000479 PARAMETER Experiment Name: Zm_Drought_P Parameter: Tissue Value: Aerial
  misc_feature: MA Experiment 20000479 PARAMETER Experiment Name: Zm_Drought_P Parameter: Treatment Value: Drought vs. No Drought
  misc_feature: MA Experiment ID: 20000480 Result: Down-regulated in Transcription
  misc_feature: MA Experiment 20000480 PARAMETER Experiment Name: Zm_Drought_P Parameter: Age (day) Value: 11
  misc_feature: MA Experiment 20000480 PARAMETER Experiment Name: Zm_Drought_P Parameter: Organism Value: Zea mays
  misc_feature: MA Experiment 20000480 PARAMETER Experiment Name: Zm_Drought_P Parameter: Plant Line Value: 35A19
  misc_feature: MA Experiment 20000480 PARAMETER Experiment Name: Zm_Drought_P Parameter: Timepoint (hr) Value: 72
  misc_feature: MA Experiment 20000480 PARAMETER Experiment Name: Zm_Drought_P Parameter: Tissue Value: Aerial
  misc_feature: MA Experiment 20000480 PARAMETER Experiment Name: Zm_Drought_P Parameter: Treatment Value: Drought vs. No Drought
  misc_feature: MA Experiment ID: 20000492 Result: Up-regulated in Transcription
  misc_feature: MA Experiment 20000492 PARAMETER Experiment Name: Zm_Hybrid_Seed_Dev_P Parameter: DAP Value: 12
  misc_feature: MA Experiment 20000492 PARAMETER Experiment Name: Zm_Hybrid_Seed_Dev_P Parameter: Organism Value: Zea mays
  misc_feature: MA Experiment 20000492 PARAMETER Experiment Name: Zm_Hybrid_Seed_Dev_P Parameter: Plant Line Value: 35A19
  misc_feature: MA Experiment 20000492 PARAMETER Experiment Name: Zm_Hybrid_Seed_Dev_P Parameter: Tissue Value: Fert Kernel vs. Unfert Floret
  misc_feature: MA Experiment ID: 20000534 Result: Down-regulated in Transcription
  misc_feature: MA Experiment 20000534 PARAMETER Experiment Name: Zm_Hybrid_Pollen_P Parameter: Age (day) Value: 8
  misc_feature: MA Experiment 20000534 PARAMETER Experiment Name: Zm_Hybrid_Pollen_P Parameter: Organism Value: Zea mays
  misc_feature: MA Experiment 20000534 PARAMETER Experiment Name: Zm_Hybrid_Pollen_P Parameter: Plant Line Value: 35A19
  misc_feature: MA Experiment 20000534 PARAMETER Experiment Name: Zm_Hybrid_Pollen_P Parameter: Tissue Value: Pollen vs. Aerial
cttttctttccagcctcaaatcccgtttttcccatcccgtgaagaaccatggcacggtactccccaccgtcgctgcgctgcttcttccgctgcgccgccagctccgcctcccgagccgtaggcagcggcactcggaagaagaaccttgtattcttgggctctccccaggtcgccgcctcggtcctggacaagctgctgggcgcgtccggctccccggaatccgcatttcaggtggctgccgtcgtgacgcagccgccggccgccaagaacagggggaggaagttgatgccgtcggccgtcgcgcagttagcgctcgatcgcgggttcccagaggaactcatcttcacgccagaacgagcccgagaagagtcgttcctgtcggccttgaaggaagtggaaccggatgtttgcataactgctgcttacgggaacattctgccccagaaatttcttgatatcccatcgtgcggcacagttaatatacacccaagtttgttgcctctatatcgtggtgcagctcctgtgcagagggcactgcaggatggtgttgcagaaacaggtgtttcccttgcatatactgtccgtgcattggatgcaggtccagtgattgcgtgtgaaaggttttctgttgatgaatgtattaaggcaccagagctactttctatgctgtttcatttaggatccaagctattgattaatgaacttccatccattcttgatggttcggctaaagataaggcacaaccacaggatgactccaaagctacactggcaccaaagttaaattctgaggagtcatggctatcgtttgacgaagaagctaaagtgctgcataacaaggtgcgggcatttgcaggatggcctgggacgcgcgcaaagctgcaactcataaaccaaaacagtgtacccgatgtactagagattaaggttatcagcacgaaggtttcaacatcatgtgtcaaagttggagatgaaaacgagatactattctctgggagctcgttgctgattccttgcagtggttcgacctggctcgaggtgttggagcttcaactccctggaaagaaagtaacaaaggcacaagatttttggaatggtttgcgtggtcagaagctgatgaaattgccatagggggatatctgcattcgcagcacaggagtgtgcctatatgcatagcaagggttattgaggtcagtcattgcgcgaacataagcagggtagtgctagaagcctatatgcggagatctcggttttatgactaccttttccttctggtaaacttggtgctataaactcgtaactcagttacattaggcatgccatttgtattgcttcctcaatttcagaaaacacactgctgtaactatttcagttattcaatttttcactgtcataactgagctacaaacatttgagaaataatacagttatgtggtgagtaataaggcaataatttgccgt

SEQ ID NO: 1476 - protein, 360 aa, Zea mays subsp. mays
  peptide (1)..(360): Ceres Seq. ID no. 12341539
  misc_feature (31)..(219): Pfam Name: Formyl transferase Pfam Description: Formyl transferase
  misc_feature (32)..(352): Homolog of NCBI NO: 23056000 NR Description: hypothetical protein [Geobacter metallireducens]
  misc_feature (33)..(356): Homolog of NCBI NO: 22990871 NR Description: hypothetical protein [Enterococcus faecium]
  misc_feature (33)..(358): Homolog of NCBI NO: 15643294 NR Description: methionyl-tRNA formyltransferase [Thermotoga
  misc_feature (151)..(340): Homolog of NCBI NO: 15864563 NR Description: fmt putative protein [Brassica napus]
  misc_feature (165)..(359): Homolog of NCBI NO: 6069504 NR Description: S-locus protein 8 [Brassica rapa]
  misc_feature (9)..(359): Homolog of NCBI NO: 7657875 NR Description: Fmt protein [Brassica napus var. napus]
  misc_feature (9)..(359): Homolog of NCBI NO: 29824361 NR Description: putative formyl transferase [Arabidopsis thaliana]
  misc_feature (9)..(359): Homolog of NCBI NO: 15219681 NR Description: formyl transferase, putative; protein id:
  misc_feature (330)..(360): Homolog of NCBI NO: 34911294 NR Description: similar to formyl transferase
  misc_feature (1)..(313): Homolog of NCBI NO: 34911294 NR Description: similar to formyl transferase
MARYSPPSLRCFFRCAASSASRAVGSGTRKKNLVFLGSPQVAASVLDKLLGASGSPESAFQVAAVVTQPPAAKNRGRKLMPSAVAQLALDRGFPEELIFTPERAREESFLSALKEVEPDVCITAAYGNILPQKFLDIPSCGTVNIHPSLLPLYRGAAPVQRALQDGVAETGVSLAYTVRALDAGPVIACERFSVDECIKAPELLSMLFHLGSKLLINELPSILDGSAKDKAQPQDDSKATLAPKLNSEESWLSFDEEAKVLHNKVRAFAGWPGTRAKLQLINQNSVPDVLEIKVISTKVSTSCVKVGDENEILFSGSSLLIPCSGSTWLEVLELQLPGKKVTKAQDFWNGLRGQKLMKLP

SEQ ID NO: 1477 - protein, 281 aa, Zea mays subsp. mays
  peptide (1)..(281): Ceres Seq. ID no. 12341540
  misc_feature (1)..(140): Pfam Name: Formyl transferase Pfam Description: Formyl transferase
  misc_feature (1)..(273): Homolog of NCBI NO: 23056000 NR Description: hypothetical protein [Geobacter metallireducens]
  misc_feature (1)..(277): Homolog of NCBI NO: 22990871 NR Description: hypothetical protein [Enterococcus faecium]
  misc_feature (1)..(279): Homolog of NCBI NO: 15643294 NR Description: methionyl-tRNA formyltransferase [Thermotoga
  misc_feature (72)..(261): Homolog of NCBI NO: 15864563 NR Description: fmt putative protein [Brassica napus]
  misc_feature (86)..(280): Homolog of NCBI NO: 6069504 NR Description: S-locus protein 8 [Brassica rapa]
  misc_feature (1)..(280): Homolog of NCBI NO: 7657875 NR Description: Fmt protein [Brassica napus var. napus]
  misc_feature (1)..(280): Homolog of NCBI NO: 29824361 NR Description: putative formyl transferase [Arabidopsis thaliana]
  misc_feature (1)..(280): Homolog of NCBI NO: 15219681 NR Description: formyl transferase, putative; protein id:
  misc_feature (251)..(281): Homolog of NCBI NO: 34911294 NR Description: similar to formyl transferase
  misc_feature (1)..(234): Homolog of NCBI NO: 34911294 NR Description: similar to formyl transferase
MPSAVAQLALDRGFPEELIFTPERAREESFLSALKEVEPDVCITAAYGNILPQKFLDIPSCGTVNIHPSLLPLYRGAAPVQRALQDGVAETGVSLAYTVRALDAGPVIACERFSVDECIKAPELLSMLFHLGSKLLINELPSILDGSAKDKAQPQDDSKATLAPKLNSEESWLSFDEEAKVLHNKVRAFAGWPGTRAKLQLINQNSVPDVLEIKVISTKVSTSCVKVGDENEILFSGSSLLIPCSGSTWLEVLELQLPGKKVTKAQDFWNGLRGQKLMKLP

SEQ ID NO: 1478 - DNA, 1429 bp, Zea mays subsp. mays
  misc_feature (1)..(1429): Ceres Seq. ID no. 12341429
  misc_feature: MA Experiment ID: 108544 Result: Up-regulated in Transcription
  misc_feature: MA Experiment ID: 108687 Result: Up-regulated in Transcription
  misc_feature: MA Experiment 108687 PARAMETER Experiment Name: Zm_Embryos-Flowers__P Parameter: Tissue Value: Embryo vs. Aerial+
aaagaggaacacttctgtgttttcgaagatgaagctgtagatggaacttctaaacaaaatgaaggttctaccagcagatctccccagggtagacctaagaattatctcaagttttcaggcaaggatcattcaggtgcagaaaatgaaggtaacaagagagcccagaggtctgcagaggatagtgaaaatgcatctgaggctgatgaagatatctctggcagtgaatctgctggtgatgaggagtcttctcatgaagatcaggaggaagaagaggatgatatggatcttgatacaaaggcaaaaaatgactgcagagcagaggtaaatagggaggcacagggtttggatggaggaacatcattgtcattttcagaatgtttgcaaagtacagttaaaccaatttccaagtatgtttccactgcattaccaaaccatgaaaagaaactttctcacatattttatggaaatgactcattttatgttctgttcaggctacatcagatcttttatgagagaatattgtcagctaagacaaactgttccacatcagacaataactggaaagcttcaaggcacataaattctccagatcaatattcaaggtttatcagtgcactatacaacttgcttgatggttcttctgaccacaccaaatttgaagatgactgccgctccatcattgggactcagtcatatgttctctttactatagataaactgatatacaaaattgtgaagcagcttcaagcattagcatctgatgaaatggacaaccagcttctccagctttatttatatgaaaagtcgaggtctcctgggagcttctttgatctggtttatcacgaaaatgcacgagcccttctacatgatgacaacatataccgttttgaatgtcattctgatcctacagaattaactattcagctcatggagtatgggaatgaaaaacctgagttgactgctgtctcatttgatccaaccttttcaccgtatctttataatggttatctgtcaagtattgatgataccaaattggttgatgacgtcttccttaggaggaataagcggaagcaagggaggaatgatgactcccctacttccttgaagatcatggacaatgtcatgtttgctaatggtcttgaatgcaagatatcttgcgaatcttcaaaagtctcttatgtcctcgatactgaggatgtcttatttcgtacgagaaagaggagaagctctatctagtggaaccatgcctgcgctgcaaagacaaattttgtgaaaattaacaccgtaaaatcgatagtttcatttatctcttcagaccgtatagggtcttgtggtagagttatgttaattacaatggcatgcactggtgggatcctcgtgttgttgatctgtcacttcactggaatatattggtgattctttgtgtttc

SEQ ID NO: 1479 - protein, 411 aa, Zea mays subsp. mays
  peptide (1)..(411): Ceres Seq. ID no. 12341430
  misc_feature (1)..(386): Homolog of NCBI NO: 25404243 NR Description: hypothetical protein F23H11.20 [imported] -
  misc_feature (39)..(406): Homolog of NCBI NO: 15218525 NR Description: unknown protein; protein id: At1g10450.1
  misc_feature (1)..(353): Homolog of NCBI NO: 15221694 NR Description: hypothetical protein; protein id: At1g24190.1
  misc_feature (1)..(411): Homolog of NCBI NO: 15218938 NR Description: hypothetical protein; protein id: At1g59890.1
  misc_feature (14)..(410): Homolog of NCBI NO: 30678317 NR Description: expressed protein [Arabidopsis thaliana]
  misc_feature (2)..(410): Homolog of NCBI NO: 6094552 NR Description: unknown protein [Arabidopsis thaliana]
  misc_feature (18)..(408): Homolog of NCBI NO: 25406027 NR Description: hypothetical protein F20P5.21 [imported] -
  misc_feature (18)..(408): Homolog of NCBI NO: 15223031 NR Description: hypothetical protein; protein id: At1g70060.1
  misc_feature (3)..(353): Homolog of NCBI NO: 9945050 NR Description: Similar to Arabidopsis chromosome I BAC genomic
  misc_feature (1)..(391): Homolog of NCBI NO: 34894158 NR Description: putative co-repressor protein
KEEHFCVFEDEAVDGTSKQNEGSTSRSPQGRPKNYLKFSGKDHSGAENEGNKRAQRSAEDSENASEADEDISGSESAGDEESSHEDQEEEEDDMDLDTKAKNDCRAEVNREAQGLDGGTSLSFSECLQSTVKPISKYVSTALPNHEKKLSHIFYGNDSFYVLFRLHQIFYERILSAKTNCSTSDNNWKASRHINSPDQYSRFISALYNLLDGSSDHTKFEDDCRSIIGTQSYVLFTIDKLIYKIVKQLQALASDEMDNQLLQLYLYEKSRSPGSFFDLVYHENARALLHDDNIYRFECHSDPTELTIQLMEYGNEKPELTAVSFDPTFSPYLYNGYLSSIDDTKLVDDVFLRRNKRKQGRNDDSPTSLKIMDNVMFANGLECKISCESSKVSYVLDTEDVLFRTRKRRSSI

SEQ ID NO: 1480 - protein, 318 aa, Zea mays subsp. mays
  peptide (1)..(318): Ceres Seq. ID no. 12341431
  misc_feature (1)..(293): Homolog of NCBI NO: 25404243 NR Description: hypothetical protein F23H11.20 [imported] -
  misc_feature (1)..(313): Homolog of NCBI NO: 15218525 NR Description: unknown protein; protein id: At1g10450.1
  misc_feature (1)..(260): Homolog of NCBI NO: 15221694 NR Description: hypothetical protein; protein id: At1g24190.1
  misc_feature (1)..(318): Homolog of NCBI NO: 15218938 NR Description: hypothetical protein; protein id: At1g59890.1
  misc_feature (1)..(317): Homolog of NCBI NO: 30678317 NR Description: expressed protein [Arabidopsis thaliana]
  misc_feature (1)..(317): Homolog of NCBI NO: 6094552 NR Description: unknown protein [Arabidopsis thaliana]
  misc_feature (1)..(315): Homolog of NCBI NO: 25406027 NR Description: hypothetical protein F20P5.21 [imported] -
  misc_feature (1)..(315): Homolog of NCBI NO: 15223031 NR Description: hypothetical protein; protein id: At1g70060.1
  misc_feature (1)..(260): Homolog of NCBI NO: 9945050 NR Description: Similar to Arabidopsis chromosome I BAC genomic
  misc_feature (1)..(298): Homolog of NCBI NO: 34894158 NR Description: putative co-repressor protein
MDLDTKAKNDCRAEVNREAQGLDGGTSLSFSECLQSTVKPISKYVSTALPNHEKKLSHIFYGNDSFYVLFRLHQIFYERILSAKTNCSTSDNNWKASRHINSPDQYSRFISALYNLLDGSSDHTKFEDDCRSIIGTQSYVLFTIDKLIYKIVKQLQALASDEMDNQLLQLYLYEKSRSPGSFFDLVYHENARALLHDDNIYRFECHSDPTELTIQLMEYGNEKPELTAVSFDPTFSPYLYNGYLSSIDDTKLVDDVFLRRNKRKQGRNDDSPTSLKIMDNVMFANGLECKISCESSKVSYVLDTEDVLFRTRKRRSSI

SEQ ID NO: 1481 - DNA, 1534 bp, Zea mays subsp. mays
  misc_feature (1)..(1534): Ceres Seq. ID no. 12373985
  misc_feature: MA Experiment ID: 108535 Result: Up-regulated in Transcription
  misc_feature: MA Experiment 108535 PARAMETER Experiment Name: Zm_Meristem_P Parameter: Age (day) Value: 8
  misc_feature: MA Experiment 108535 PARAMETER Experiment Name: Zm_Meristem_P Parameter: Organism Value: Zea mays
  misc_feature: MA Experiment 108535 PARAMETER Experiment Name: Zm_Meristem_P Parameter: Plant Line Value: 35A19
  misc_feature: MA Experiment 108535 PARAMETER Experiment Name: Zm_Meristem_P Parameter: Tissue Value: Root Meristem vs. Above Root Meristem
  misc_feature: MA Experiment ID: 20000487 Result: Up-regulated in Transcription
  misc_feature: MA Experiment 20000487 PARAMETER Experiment Name: Zm_50mM_NH4NO3_L_to_H_P Parameter: Organism Value: Zea mays
  misc_feature: MA Experiment 20000487 PARAMETER Experiment Name: Zm_50mM_NH4NO3_L_to_H_P Parameter: Timepoint (hr) Value: 4
  misc_feature: MA Experiment 20000487 PARAMETER Experiment Name: Zm_50mM_NH4NO3_L_to_H_P Parameter: Tissue Value: Leaves
  misc_feature: MA Experiment 20000487 PARAMETER Experiment Name: Zm_50mM_NH4NO3_L_to_H_P Parameter: Treatment Value: 50mM NH4NO3 vs. 100mM Mannitol
  misc_feature: MA Experiment ID: 20000488 Result: Up-regulated in Transcription
  misc_feature: MA Experiment 20000488 PARAMETER Experiment Name: Zm_50mM_NH4NO3_L_to_H_P Parameter: Organism Value: Zea mays
  misc_feature: MA Experiment 20000488 PARAMETER Experiment Name: Zm_50mM_NH4NO3_L_to_H_P Parameter: Timepoint (hr) Value: 8
  misc_feature: MA Experiment 20000488 PARAMETER Experiment Name: Zm_50mM_NH4NO3_L_to_H_P Parameter: Tissue Value: Leaves
  misc_feature: MA Experiment 20000488 PARAMETER Experiment Name: Zm_50mM_NH4NO3_L_to_H_P Parameter: Treatment Value: 50mM NH4NO3 vs. 100mM Mannitol
  misc_feature: MA Experiment ID: 20001606 Result: Up-regulated in Transcription
  misc_feature: MA Experiment 20001606 PARAMETER Experiment Name: Zm_50ppm_KNO3_L-to-H_P Parameter: Age (day) Value: 19
  misc_feature: MA Experiment 20001606 PARAMETER Experiment Name: Zm_50ppm_KNO3_L-to-H_P Parameter: Organism Value: Zea mays
  misc_feature: MA Experiment 20001606 PARAMETER Experiment Name: Zm_50ppm_KNO3_L-to-H_P Parameter: Plant Line Value: 35A19
  misc_feature: MA Experiment 20001606 PARAMETER Experiment Name: Zm_50ppm_KNO3_L-to-H_P Parameter: Timepoint (hr) Value: 8
  misc_feature: MA Experiment 20001606 PARAMETER Experiment Name: Zm_50ppm_KNO3_L-to-H_P Parameter: Tissue Value: Shoots
  misc_feature: MA Experiment 20001606 PARAMETER Experiment Name: Zm_50ppm_KNO3_L-to-H_P Parameter: Treatment Value: 50ppm KNO3 vs. 50ppm KCl
ggtgtaactctaattcctagccccgagactgacgccggctgcctcgctccatttctaatccggtaatcccccctcccgagtccaaaccctaaacctaaacccctcacccggcgccgccgccgccaccgccgccgccccgaggccccatcccagcgcaaccgacttccgcctcggattgaagcaatgtcgtcggacgacgaggtcagggaggagaaggagctcgacctctcctccaacgatgtcgtcaccaagtacaagactgccgccgaaatcctgaacaacgctctgaagctggttgtgtctgagtgcaagccaaaagcaaagattgttgacctttgtgagaagggtgactctttcataagagagcaaactgggaatgtctacaagaatgcaaagaggaagattgaaaggggcattgctttcccaacctgtgtttctgtgaacaacacagtctgccacttctccccgcttaccacagatgatgcagttctggaagaaaatgatatggttaaaattgacatggggtgtcatattgatggctttattgctgtggtggcacatacacatgtaattgcaaatgggcctgtcacaggaagagcagctgatgttcttgctgctgccaacacagcagcagaagttgcaatgaggcttgtcagacctgggaagaagaataaggatgttactgaagcaattcagaaagttgctcctgtttatgattgcaaaattgtggaaggtgttcttagccatcaactgaagcaatttgtgattgatggtaacaaagttgtgctaagtgtctccaatgctgatacaaaggttgatgatgctgaatttgaagaaaatgaagtctatgcaatcgatattgtcaccagcactggggaggggaagcccaagttattggatgagaagcagaccaccatctacaaaagggctgtagacaagaattataacctgaagatgaaagcgtcaagatttattttcagtgaaatcagccagaagttcccaatcatgcccttcactgctagggcattagaagagaagcgtgcacgcttaggcttggtggaatgcatgaaccatgagctattgcagccgtaccctgtacttcatgagaagccaggtgaccttgttgcacacataaagttcactgtgctgctaatgcccaatggatcggataggattacatcatatccgctacaggagttaaagccaacaaaatccattgaagacaatgctgagataaaggcatggcttgctttggggacgaaatcaaagaagaagggtggtggaaagaagaagaaaggcaagaaaggagatgcagcaggagatcccatggaggcgacaaacgatgctacaagccaagaataattctgatttttggaattactgcacccagcattttctctcttgtttcttcgctgcatctgatggtgttatattacattcagttgcgaaaaaatgaatacttttttctagtgtctaagaaacgaagcatcctgttgcacattatcgcatccaatggcacaaagataattatctg

SEQ ID NO: 1482 - protein, 392 aa, Zea mays subsp. mays
  peptide (1)..(392): Ceres Seq. ID no. 12373986
  misc_feature (1)..(383): Homolog of NCBI NO: 34862215 NR Description: similar to proliferation-associated protein 1
  misc_feature (1)..(388): Homolog of NCBI NO: 13632817 NR Description: Proliferation-associated protein 2G4 (Cell cycle
  misc_feature (1)..(388): Homolog of NCBI NO: 5453842 NR Description: proliferation-associated 2G4, 38kDa
  misc_feature (3)..(383): Homolog of NCBI NO: 26788026 NR Description: SI:dZ150I12.2 (novel protein similar to human
  misc_feature (1)..(390): Homolog of NCBI NO: 34193902 NR Description: Proliferation-associated protein 1 [Danio rerio]
  misc_feature (1)..(388): Homolog of NCBI NO: 30693537 NR Description: nuclear DNA-binding protein G2p -related
  misc_feature (1)..(388): Homolog of NCBI NO: 13430628 NR Description: putative nuclear DNA-binding protein G2p
  misc_feature (1)..(388): Homolog of NCBI NO: 15231039 NR Description: putative nuclear DNA-binding protein G2p
  misc_feature (3)..(388): Homolog of NCBI NO: 9652218 NR Description: putative DNA binding protein [Atriplex hortensis]
  misc_feature (1)..(391): Homolog of NCBI NO: 7447216 NR Description: probable DNA-binding protein GBP16 - rice
MSSDDEVREEKELDLSSNDVVTKYKTAAEILNNALKLVVSECKPKAKIVDLCEKGDSFIREQTGNVYKNAKRKIERGIAFPTCVSVNNTVCHFSPLTTDDAVLEENDMVKIDMGCHIDGFIAVVAHTHVIANGPVTGRAADVLAAANTAAEVAMRLVRPGKKNKDVTEAIQKVAPVYDCKIVEGVLSHQLKQFVIDGNKVVLSVSNADTKVDDAEFEENEVYAIDIVTSTGEGKPKLLDEKQTTIYKRAVDKNYNLKMKASRFIFSEISQKFPIMPFTARALEEKRARLGLVECMNHELLQPYPVLHEKPGDLVAHIKFTVLLMPNGSDRITSYPLQELKPTKSIEDNAEIKAWLALGTKSKKKGGGKKKKGKKGDAAGDPMEATNDATSQE

SEQ ID NO: 1483 - protein, 285 aa, Zea mays subsp. mays
  peptide (1)..(285): Ceres Seq. ID no. 12373987
  misc_feature (1)..(276): Homolog of NCBI NO: 34862215 NR Description: similar to proliferation-associated protein 1
  misc_feature (1)..(281): Homolog of NCBI NO: 13632817 NR Description: Proliferation-associated protein 2G4 (Cell cycle
  misc_feature (1)..(281): Homolog of NCBI NO: 5453842 NR Description: proliferation-associated 2G4, 38kDa
  misc_feature (1)..(276): Homolog of NCBI NO: 26788026 NR Description: SI:dZ150I12.2 (novel protein similar to human
  misc_feature (1)..(283): Homolog of NCBI NO: 34193902 NR Description: Proliferation-associated protein 1 [Danio rerio]
  misc_feature (1)..(281): Homolog of NCBI NO: 30693537 NR Description: nuclear DNA-binding protein G2p -related
  misc_feature (1)..(281): Homolog of NCBI NO: 13430628 NR Description: putative nuclear DNA-binding protein G2p
  misc_feature (1)..(281): Homolog of NCBI NO: 15231039 NR Description: putative nuclear DNA-binding protein G2p
  misc_feature (1)..(281): Homolog of NCBI NO: 9652218 NR Description: putative DNA binding protein [Atriplex hortensis]
  misc_feature (1)..(284): Homolog of NCBI NO: 7447216 NR Description: probable DNA-binding protein GBP16 - rice
MVKIDMGCHIDGFIAVVAHTHVIANGPVTGRAADVLAAANTAAEVAMRLVRPGKKNKDVTEAIQKVAPVYDCKIVEGVLSHQLKQFVIDGNKVVLSVSNADTKVDDAEFEENEVYAIDIVTSTGEGKPKLLDEKQTTIYKRAVDKNYNLKMKASRFIFSEISQKFPIMPFTARALEEKRARLGLVECMNHELLQPYPVLHEKPGDLVAHIKFTVLLMPNGSDRITSYPLQELKPTKSIEDNAEIKAWLALGTKSKKKGGGKKKKGKKGDAAGDPMEATNDATSQE

SEQ ID NO: 1484 - protein, 280 aa, Zea mays subsp. mays
  peptide (1)..(280): Ceres Seq. ID no. 12373988
  misc_feature (1)..(271): Homolog of NCBI NO: 34862215 NR Description: similar to proliferation-associated protein 1
  misc_feature (1)..(276): Homolog of NCBI NO: 13632817 NR Description: Proliferation-associated protein 2G4 (Cell cycle
  misc_feature (1)..(276): Homolog of NCBI NO: 5453842 NR Description: proliferation-associated 2G4, 38kDa
  misc_feature (1)..(271): Homolog of NCBI NO: 26788026 NR Description: SI:dZ150I12.2 (novel protein similar to human
  misc_feature (1)..(278): Homolog of NCBI NO: 34193902 NR Description: Proliferation-associated protein 1 [Danio rerio]
  misc_feature (1)..(276): Homolog of NCBI NO: 30693537 NR Description: nuclear DNA-binding protein G2p -related
  misc_feature (1)..(276): Homolog of NCBI NO: 13430628 NR Description: putative nuclear DNA-binding protein G2p
  misc_feature (1)..(276): Homolog of NCBI NO: 15231039 NR Description: putative nuclear DNA-binding protein G2p
  misc_feature (1)..(276): Homolog of NCBI NO: 9652218 NR Description: putative DNA binding protein [Atriplex hortensis]
  misc_feature (1)..(279): Homolog of NCBI NO: 7447216 NR Description: probable DNA-binding protein GBP16 - rice
MGCHIDGFIAVVAHTHVIANGPVTGRAADVLAAANTAAEVAMRLVRPGKKNKDVTEAIQKVAPVYDCKIVEGVLSHQLKQFVIDGNKVVLSVSNADTKVDDAEFEENEVYAIDIVTSTGEGKPKLLDEKQTTIYKRAVDKNYNLKMKASRFIFSEISQKFPIMPFTARALEEKRARLGLVECMNHELLQPYPVLHEKPGDLVAHIKFTVLLMPNGSDRITSYPLQELKPTKSIEDNAEIKAWLALGTKSKKKGGGKKKKGKKGDAAGDPMEATNDATSQE

SEQ ID NO: 1485 - DNA, 1781 bp, Zea mays subsp. mays
  misc_feature (1)..(1781): Ceres Seq. ID no. 12353639
  misc_feature: MA Experiment ID: 108535 Result: Up-regulated in Transcription
  misc_feature: MA Experiment 108535 PARAMETER Experiment Name: Zm_Meristem_P Parameter: Age (day) Value: 8
  misc_feature: MA Experiment 108535 PARAMETER Experiment Name: Zm_Meristem_P Parameter: Organism Value: Zea mays
  misc_feature: MA Experiment 108535 PARAMETER Experiment Name: Zm_Meristem_P Parameter: Plant Line Value: 35A19
  misc_feature: MA Experiment 108535 PARAMETER Experiment Name: Zm_Meristem_P Parameter: Tissue Value: Root Meristem vs. Above Root Meristem
  misc_feature: MA Experiment ID: 20000478 Result: Down-regulated in Transcription
  misc_feature: MA Experiment 20000478 PARAMETER Experiment Name: Zm_5mM_SA_P Parameter: Age (day) Value: 11
  misc_feature: MA Experiment 20000478 PARAMETER Experiment Name: Zm_5mM_SA_P Parameter: Organism Value: Zea mays
  misc_feature: MA Experiment 20000478 PARAMETER Experiment Name: Zm_5mM_SA_P Parameter: Plant Line Value: 35A19
  misc_feature: MA Experiment 20000478 PARAMETER Experiment Name: Zm_5mM_SA_P Parameter: Timepoint (hr) Value: 72
  misc_feature: MA Experiment 20000478 PARAMETER Experiment Name: Zm_5mM_SA_P Parameter: Tissue Value: Aerial
  misc_feature: MA Experiment 20000478 PARAMETER Experiment Name: Zm_5mM_SA_P Parameter: Treatment Value: 5mM SA vs. No Treatment
  misc_feature: MA Experiment ID: 20000535 Result: Up-regulated in Transcription
  misc_feature: MA Experiment 20000535 PARAMETER Experiment Name: Zm_Hybrid_Seed_Dev_P Parameter: DAP Value: 30 vs. 12
  misc_feature: MA Experiment 20000535 PARAMETER Experiment Name: Zm_Hybrid_Seed_Dev_P Parameter: Organism Value: Zea mays
  misc_feature: MA Experiment 20000535 PARAMETER Experiment Name: Zm_Hybrid_Seed_Dev_P Parameter: Plant Line Value: 35A19
  misc_feature: MA Experiment 20000535 PARAMETER Experiment Name: Zm_Hybrid_Seed_Dev_P Parameter: Tissue Value: Embryo vs. Unfert Floret
ctccgtcccctcctcctgcgaaggctcctccagcaccactagctagagctaaccccgtgctgctgctgctgctactacctgctgccgcgcgccgttcgttgccgtgcgggcgtgttgtggtccgctgatctcgttcgcgggacgccggggggtggtggtggtggcagcggtggttggtggtgcgcggcgtgaaagaaagaaagaaaaaaaaaaggcccgccgctttgcgctgctctgcttccgtaggtgtcacgagatttggccctagcctttcgctttcctttttcatctcgctcacaagggaagggaccgagggacgagggagacgttggggaggggagcgagcgagccgtaacatccgagctgttccaatggcgacccctgccgttgctttcgtcgccagcgctttgttggggcggtggtagcgctaggagcggagcagtactaggttggtaggtggttgtagctttgcgcgtgacccgagcgcgcgctcgctcgctcctgtgcctctctacctcgcttgcgtgcgccgggaaggcagtgggtggctggtcggttctcgcaagaggttgctggtgctgttcctcctcccccggttgatgagcatggggcattgctccgagcagcggacggggttcgaggtgactaaggactggaacggcgccgaccagttcgcgatccggtccccgcggggggcgtccgttcgggtctgcctgcacggcgggcaggtcgtctcgtggaggaaccaccgcggcgaggagctcctcttcagcagcagcaaggcaatcttcaagccgccaagagcgacccgtggtggcattccgatatgcttcccacagtttggaaactgtggaacattggagcagcatggatttgcaaggaacaagatatggacaatagacgatgaggctccacctctaaattatggtgataataacagcaacaaagcttctgttgaccttctgctaaagccatctgaagatgacctgaagtgctggccacactgttttgagttacgtctcagagtctctctttcaatggatggagacctttcactgatatcacgggtcagaaatgttaatgggaagccattcagtttcgcatttgcttaccatacatacctttctgtttctgacatcagtgaagtgaggatagaaggtctggagacccttgattatcttgacaaccttagccagcgggaacgttttaccgaacagggagatgccataacatttgaatcagaggttgatcgagtctatgttggctgcccaggcgtaatagctgttcttgaccatggaaagaaacgcacattcatcgtgcggaaagaagggcttcctgatattgttgtgtggaacccctgggagaagaagtccaagacgatggcagacttcggcgacgacgagtacaagcagatgctgtgcgtggatgcagccgcggtcgagagggccatcacgctgaagcccggggaggagtggacggggaagctggagctctccgccgtggcgtcgaccaactgcagcgaccacctggatcgcccgggcaggctgtagagcgctgggtgggtgggttcgttcgcccctgacgaaaggcatgtactagttttttttcatgtacatgggggcgctaggtccggcccttgcaggctgcagtatcatctacctgtcaggtgtgtcatgtgtgagtttaaacttatgtcagatccaagtattgctgtgatcgacatgttcgatgttcctggactgcgaagtctcaagcgcaggctgttcgtttggctggctttt

SEQ ID NO: 1486 - protein, 316 aa, Zea mays subsp. mays
  peptide (1)..(316): Ceres Seq. ID no. 12353640
  misc_feature (23)..(299): Pfam Name: Aldose 1-epimerase Pfam Description: Aldose 1-epimerase
  misc_feature (18)..(311): Homolog of NCBI NO: 18395868 NR Description: expressed protein
  misc_feature (9)..(316): Homolog of NCBI NO: 38344152 NR Description: OSJNBa0041A02.19 [Oryza sativa (japonica
  misc_feature (14)..(311): Homolog of NCBI NO: 2501555 NR Description: POSSIBLE APOSPORY-ASSOCIATED PROTEIN C
  misc_feature (13)..(311): Homolog of NCBI NO: 40253263 NR Description: putative Aldose 1-epimerase
  misc_feature (9)..(311): Homolog of NCBI NO: 15242099 NR Description: apospory-associated protein C
  misc_feature (9)..(316): Homolog of NCBI NO: 19387263 NR Description: putative apospory-associated protein C
  misc_feature (2)..(304): Homolog of NCBI NO: 15236591 NR Description: putative protein
  misc_feature (244)..(313): Homolog of NCBI NO: 34911992 NR Description: P0694A04.29 [Oryza sativa (japonica
  misc_feature (3)..(165): Homolog of NCBI NO: 34911992 NR Description: P0694A04.29 [Oryza sativa (japonica
  misc_feature (8)..(311): Homolog of NCBI NO: 15233165 NR Description: putative protein; protein id: At3g61610.1
MSMGHCSEQRTGFEVTKDWNGADQFAIRSPRGASVRVCLHGGQVVSWRNHRGEELLFSSSKAIFKPPRATRGGIPICFPQFGNCGTLEQHGFARNKIWTIDDEAPPLNYGDNNSNKASVDLLLKPSEDDLKCWPHCFELRLRVSLSMDGDLSLISRVRNVNGKPFSFAFAYHTYLSVSDISEVRIEGLETLDYLDNLSQRERFTEQGDAITFESEVDRVYVGCPGVIAVLDHGKKRTFIVRKEGLPDIVVWNPWEKKSKTMADFGDDEYKQMLCVDAAAVERAITLKPGEEWTGKLELSAVASTNCSDHLDRPGRL

SEQ ID NO: 1487 - protein, 314 aa, Zea mays subsp. mays
  peptide (1)..(314): Ceres Seq. ID no. 12353641
  misc_feature (21)..(297): Pfam Name: Aldose 1-epimerase Pfam Description: Aldose 1-epimerase
  misc_feature (11)..(309): Homolog of NCBI NO: 40253263 NR Description: putative Aldose 1-epimerase
  misc_feature (7)..(309): Homolog of NCBI NO: 15242099 NR Description: apospory-associated protein C
  misc_feature (7)..(314): Homolog of NCBI NO: 19387263 NR Description: putative apospory-associated protein C
  misc_feature (1)..(302): Homolog of NCBI NO: 15236591 NR Description: putative protein
  misc_feature (7)..(314): Homolog of NCBI NO: 38344152 NR Description: OSJNBa0041A02.19 [Oryza sativa (japonica
  misc_feature (12)..(309): Homolog of NCBI NO: 2501555 NR Description: POSSIBLE APOSPORY-ASSOCIATED PROTEIN C
  misc_feature (16)..(309): Homolog of NCBI NO: 18395868 NR Description: expressed protein
  misc_feature (242)..(311): Homolog of NCBI NO: 34911992 NR Description: P0694A04.29 [Oryza sativa (japonica
  misc_feature (1)..(163): Homolog of NCBI NO: 34911992 NR Description: P0694A04.29 [Oryza sativa (japonica
  misc_feature (6)..(309): Homolog of NCBI NO: 15233165 NR Description: putative protein; protein id: At3g61610.1
MGHCSEQRTGFEVTKDWNGADQFAIRSPRGASVRVCLHGGQVVSWRNHRGEELLFSSSKAIFKPPRATRGGIPICFPQFGNCGTLEQHGFARNKIWTIDDEAPPLNYGDNNSNKASVDLLLKPSEDDLKCWPHCFELRLRVSLSMDGDLSLISRVRNVNGKPFSFAFAYHTYLSVSDISEVRIEGLETLDYLDNLSQRERFTEQGDAITFESEVDRVYVGCPGVIAVLDHGKKRTFIVRKEGLPDIVVWNPWEKKSKTMADFGDDEYKQMLCVDAAAVERAITLKPGEEWTGKLELSAVASTNCSDHLDRPGRL

SEQ ID NO: 1488 - protein, 170 aa, Zea mays subsp. mays
  peptide (1)..(170): Ceres Seq. ID no. 12353642
  misc_feature (1)..(153): Pfam Name: Aldose 1-epimerase Pfam Description: Aldose 1-epimerase
  misc_feature (1)..(165): Homolog of NCBI NO: 18395868 NR Description: expressed protein
  misc_feature (1)..(170): Homolog of NCBI NO: 38344152 NR Description: OSJNBa0041A02.19 [Oryza sativa (japonica
  misc_feature (1)..(165): Homolog of NCBI NO: 2501555 NR Description: POSSIBLE APOSPORY-ASSOCIATED PROTEIN C
  misc_feature (1)..(165): Homolog of NCBI NO: 40253263 NR Description: putative Aldose 1-epimerase
  misc_feature (1)..(165): Homolog of NCBI NO: 15242099 NR Description: apospory-associated protein C
  misc_feature (1)..(170): Homolog of NCBI NO: 19387263 NR Description: putative apospory-associated protein C
  misc_feature (1)..(158): Homolog of NCBI NO: 15236591 NR Description: putative protein
  misc_feature (98)..(167): Homolog of NCBI NO: 34911992 NR Description: P0694A04.29 [Oryza sativa (japonica
  misc_feature (1)..(19): Homolog of NCBI NO: 34911992 NR Description: P0694A04.29 [Oryza sativa (japonica
  misc_feature (1)..(165): Homolog of NCBI NO: 15233165 NR Description: putative protein; protein id: At3g61610.1
MDGDLSLISRVRNVNGKPFSFAFAYHTYLSVSDISEVRIEGLETLDYLDNLSQRERFTEQGDAITFESEVDRVYVGCPGVIAVLDHGKKRTFIVRKEGLPDIVVWNPWEKKSKTMADFGDDEYKQMLCVDAAAVERAITLKPGEEWTGKLELSAVASTNCSDHLDRPGRL

SEQ ID NO: 1489 - DNA, 1335 bp, Zea mays subsp. mays
  misc_feature (1)..(1335): Ceres Seq. ID no. 12367315
  misc_feature: MA Experiment ID: 108522 Result: Up-regulated in Transcription
  misc_feature: MA Experiment 108522 PARAMETER Experiment Name: Zm_42deg_Heat_P Parameter: Age (day) Value: 8
  misc_feature: MA Experiment 108522 PARAMETER Experiment Name: Zm_42deg_Heat_P Parameter: Organism Value: Zea mays
  misc_feature: MA Experiment 108522 PARAMETER Experiment Name: Zm_42deg_Heat_P Parameter: Plant Line Value: 35A19
  misc_feature: MA Experiment 108522 PARAMETER Experiment Name: Zm_42deg_Heat_P Parameter: Temperature (deg C) Value: 42 vs. 22
  misc_feature: MA Experiment 108522 PARAMETER Experiment Name: Zm_42deg_Heat_P Parameter: Timepoint (hr) Value: 1
  misc_feature: MA Experiment 108522 PARAMETER Experiment Name: Zm_42deg_Heat_P Parameter: Tissue Value: Aerial
  misc_feature: MA Experiment ID: 108556 Result: Up-regulated in Transcription
  misc_feature: MA Experiment 108556 PARAMETER Experiment Name: Zm_Drought_P Parameter: Age (day) Value: 9
  misc_feature: MA Experiment 108556 PARAMETER Experiment Name: Zm_Drought_P Parameter: Organism Value: Zea mays
  misc_feature: MA Experiment 108556 PARAMETER Experiment Name: Zm_Drought_P Parameter: Plant Line Value: 35A19
  misc_feature: MA Experiment 108556 PARAMETER Experiment Name: Zm_Drought_P Parameter: Timepoint (hr) Value: 24
  misc_feature: MA Experiment 108556 PARAMETER Experiment Name: Zm_Drought_P Parameter: Tissue Value: Aerial
  misc_feature: MA Experiment 108556 PARAMETER Experiment Name: Zm_Drought_P Parameter: Treatment Value: Drought vs. No Drought
  misc_feature: MA Experiment ID: 108689 Result: Up-regulated in Transcription
  misc_feature: MA Experiment 108689 PARAMETER Experiment Name: Zm_Drought_Roots_P Parameter: Age (day) Value: 9
  misc_feature: MA Experiment 108689 PARAMETER Experiment Name: Zm_Drought_Roots_P Parameter: Organism Value: Zea mays
  misc_feature: MA Experiment 108689 PARAMETER Experiment Name: Zm_Drought_Roots_P Parameter: Plant Line Value: 35A19
  misc_feature: MA Experiment 108689 PARAMETER Experiment Name: Zm_Drought_Roots_P Parameter: Timepoint (hr) Value: 24
  misc_feature: MA Experiment 108689 PARAMETER Experiment Name: Zm_Drought_Roots_P Parameter: Tissue Value: Roots
  misc_feature: MA Experiment 108689 PARAMETER Experiment Name: Zm_Drought_Roots_P Parameter: Treatment Value: Drought vs. No Drought
  misc_feature: MA Experiment ID: 20000534 Result: Up-regulated in Transcription
  misc_feature: MA Experiment 20000534 PARAMETER Experiment Name: Zm_Hybrid_Pollen_P Parameter: Age (day) Value: 8
  misc_feature: MA Experiment 20000534 PARAMETER Experiment Name: Zm_Hybrid_Pollen_P Parameter: Organism Value: Zea mays
  misc_feature: MA Experiment 20000534 PARAMETER Experiment Name: Zm_Hybrid_Pollen_P Parameter: Plant Line Value: 35A19
  misc_feature: MA Experiment 20000534 PARAMETER Experiment Name: Zm_Hybrid_Pollen_P Parameter: Tissue Value: Pollen vs. Aerial
gggaatcaatcacgcacacgcgcacgcaccgccacccttcccgaaaagtctcctcacctcccggtcccggcctcccttcctctctctccccccctctcaaacatccccgcgccgatggatctccgcctcgcccactaggcctccggcgcgaccgagggtgggcagggggatggggctcctcgggcggaggacgttgctgcggctcctcgccctcgcttccgcggccgtcgccgtcgccgtcaccgtggaagcctacgagggcgacgctgatccgctctacagagcttgtgtggaaggatgccaaaagacaggctccctgaaggagacttctattaaacattgtatggtgccaaccgatggccaacctgttgacaagtcatggtacacgcatgagccactgtacttgcaatggaaggactggaactgcaagagtgaatgcagataccactgtatgatggaaagggagaatgaaagggcaaagcttggcctccagcctgttaagtatcatggaaaatggcctttgaagcgtgcctctgtgtttcaggaacctttatctgcagctctctctgcgcttactcttgttgtgcaatttaatgggtggctatcatttttcctcttgctttattataaacttcctctgcggccagaaactcacaagacatactatgaatacactggcttgtggcacatctatgggctccttgccatgaattcatggttctggagtgccatatatcacagttgtgacacaatttggacagaaaaactatatttttcatcagatgctgcctttctggggtattccctcattttggcgatactgcggactttaaatttaagagacgaagcatctagagttatggttgccgctcctattctagcatttgtgacaacccacattctgtacctcaacttctacgaacttgacaaaggcctgaacatgaaggtttgtactgtgataatcattgctcagtgtctcctatgggcactgtgggctgtcatgactcggcatccttcacggctgaagatcatatttgttgccatcggaggtgcggctgcggtacttctggaagcttctgacattcctccgcgatggggatatgtggatggccgtgctatatgccttgctgtggctatcccccttttacctttggtggagctttgccaaggaagatgcggagatgcgaacgtcagcaatcctgaagaaggcacgttaacaagtcgcctgtgtgataatttcatgcctgcgcccagccattgtaaagataaaagtttcacttgtaatcttaggtaactactaacttagcatgtgaattaccgtcttatttttgttcc

SEQ ID NO: 1490 - protein, 430 aa, Zea mays subsp. mays
  peptide (1)..(430): Ceres Seq. ID no. 12367316
  misc_feature (130)..(381): Pfam Name: Per1-like Pfam Description: Per1-like
  misc_feature (231)..(381): Homolog of NCBI NO: 22761646 NR Description: unnamed protein product [Homo sapiens]
  misc_feature (140)..(388): Homolog of NCBI NO: 24586036 NR Description: CG3271-PA [Drosophila melanogaster]
  misc_feature (75)..(381): Homolog of NCBI NO: 19114746 NR Description: similar to yeast protein involved in Mn2+
  misc_feature (79)..(381): Homolog of NCBI NO: 28372501 NR Description: CAB2 [Homo sapiens]
  misc_feature (107)..(381): Homolog of NCBI NO: 32949296 NR Description: CAB2 protein [Homo sapiens]
  misc_feature (100)..(247): Homolog of NCBI NO: 20260110 NR Description: unknown protein [Arabidopsis thaliana]
  misc_feature (131)..(381): Homolog of NCBI NO: 10176931 NR Description: gene_id:MTG10.16~unknown protein [Arabidopsis
  misc_feature (68)..(381): Homolog of NCBI NO: 18424554 NR Description: putative protein
  misc_feature (84)..(381): Homolog of NCBI NO: 15219283 NR Description: unknown protein; protein id: At1g16560.1
  misc_feature (57)..(381): Homolog of NCBI NO: 37536224 NR Description: unknown protein [Oryza sativa (japonica
GINHAHAHAPPPFPKSLLTSRSRPPFLSLPPSQTSPRRWISASPTRPPARPRVGRGMGLLGRRTLLRLLALASAAVAVAVTVEAYEGDADPLYRACVEGCQKTGSLKETSIKHCMVPTDGQPVDKSWYTHEPLYLQWKDWNCKSECRYHCMMERENERAKLGLQPVKYHGKWPLKRASVFQEPLSAALSALTLVVQFNGWLSFFLLLYYKLPLRPETHKTYYEYTGLWHIYGLLAMNSWFWSAIYHSCDTIWTEKLYFSSDAAFLGYSLILAILRTLNLRDEASRVMVAAPILAFVTTHILYLNFYELDKGLNMKVCTVIIIAQCLLWALWAVMTRHPSRLKIIFVAIGGAAAVLLEASDIPPRWGYVDGRAICLAVAIPLLPLVELCQGRCGDANVSNPEEGTLTSRLCDNFMPAPSHCKDKSFTCNLR

SEQ ID NO: 1491 - protein, 374 aa, Zea mays subsp. mays
  peptide (1)..(374): Ceres Seq. ID no. 12367317
  misc_feature (74)..(325): Pfam Name: Per1-like Pfam Description: Per1-like
  misc_feature (175)..(325): Homolog of NCBI NO: 22761646 NR Description: unnamed protein product [Homo sapiens]
  misc_feature (84)..(332): Homolog of NCBI NO: 24586036 NR Description: CG3271-PA [Drosophila melanogaster]
  misc_feature (19)..(325): Homolog of NCBI NO: 19114746 NR Description: similar to yeast protein involved in Mn2+
  misc_feature (23)..(325): Homolog of NCBI NO: 28372501 NR Description: CAB2 [Homo sapiens]
  misc_feature (51)..(325): Homolog of NCBI NO: 32949296 NR Description: CAB2 protein [Homo sapiens]
  misc_feature (44)..(191): Homolog of NCBI NO: 20260110 NR Description: unknown protein [Arabidopsis thaliana]
  misc_feature (75)..(325): Homolog of NCBI NO: 10176931 NR Description: gene_id:MTG10.16~unknown protein [Arabidopsis
  misc_feature (12)..(325): Homolog of NCBI NO: 18424554 NR Description: putative protein
  misc_feature (28)..(325): Homolog of NCBI NO: 15219283 NR Description: unknown protein; protein id: At1g16560.1
  misc_feature (1)..(325): Homolog of NCBI NO: 37536224 NR Description: unknown protein [Oryza sativa (japonica
MGLLGRRTLLRLLALASAAVAVAVTVEAYEGDADPLYRACVEGCQKTGSLKETSIKHCMVPTDGQPVDKSWYTHEPLYLQWKDWNCKSECRYHCMMERENERAKLGLQPVKYHGKWPLKRASVFQEPLSAALSALTLVVQFNGWLSFFLLLYYKLPLRPETHKTYYEYTGLWHIYGLLAMNSWFWSAIYHSCDTIWTEKLYFSSDAAFLGYSLILAILRTLNLRDEASRVMVAAPILAFVTTHILYLNFYELDKGLNMKVCTVIIIAQCLLWALWAVMTRHPSRLKIIFVAIGGAAAVLLEASDIPPRWGYVDGRAICLAVAIPLLPLVELCQGRCGDANVSNPEEGTLTSRLCDNFMPAPSHCKDKSFTCNLR

SEQ ID NO: 1492 - protein, 316 aa, Zea mays subsp. mays
  peptide (1)..(316): Ceres Seq. ID no. 12367318
  misc_feature (16)..(267): Pfam Name: Per1-like Pfam Description: Per1-like
  misc_feature (117)..(267): Homolog of NCBI NO: 22761646 NR Description: unnamed protein product [Homo sapiens]
  misc_feature (26)..(274): Homolog of NCBI NO: 24586036 NR Description: CG3271-PA [Drosophila melanogaster]
  misc_feature (1)..(267): Homolog of NCBI NO: 19114746 NR Description: similar to yeast protein involved in Mn2+
  misc_feature (1)..(267): Homolog of NCBI NO: 28372501 NR Description: CAB2 [Homo sapiens]
  misc_feature (1)..(267): Homolog of NCBI NO: 32949296 NR Description: CAB2 protein [Homo sapiens]
  misc_feature (1)..(133): Homolog of NCBI NO: 20260110 NR Description: unknown protein [Arabidopsis thaliana]
  misc_feature (17)..(267): Homolog of NCBI NO: 10176931 NR Description: gene_id:MTG10.16~unknown protein [Arabidopsis
  misc_feature (1)..(267): Homolog of NCBI NO: 18424554 NR Description: putative protein
  misc_feature (1)..(267): Homolog of NCBI NO: 15219283 NR Description: unknown protein; protein id: At1g16560.1
  misc_feature (1)..(267): Homolog of NCBI NO: 37536224 NR Description: unknown protein [Oryza sativa (japonica
MVPTDGQPVDKSWYTHEPLYLQWKDWNCKSECRYHCMMERENERAKLGLQPVKYHGKWPLKRASVFQEPLSAALSALTLVVQFNGWLSFFLLLYYKLPLRPETHKTYYEYTGLWHIYGLLAMNSWFWSAIYHSCDTIWTEKLYFSSDAAFLGYSLILAILRTLNLRDEASRVMVAAPILAFVTTHILYLNFYELDKGLNMKVCTVIIIAQCLLWALWAVMTRHPSRLKIIFVAIGGAAAVLLEASDIPPRWGYVDGRAICLAVAIPLLPLVELCQGRCGDANVSNPEEGTLTSRLCDNFMPAPSHCKDKSFTCNLR

SEQ ID NO: 1493 - DNA, 863 bp, Zea mays subsp. mays
  misc_feature (1)..(863): Ceres Seq. ID no. 12411158
  misc_feature: MA Experiment ID: 20000480 Result: Down-regulated in Transcription
  misc_feature: MA Experiment 20000480 PARAMETER Experiment Name: Zm_Drought_P Parameter: Age (day) Value: 11
  misc_feature: MA Experiment 20000480 PARAMETER Experiment Name: Zm_Drought_P Parameter: Organism Value: Zea mays
  misc_feature: MA Experiment 20000480 PARAMETER Experiment Name: Zm_Drought_P Parameter: Plant Line Value: 35A19
  misc_feature: MA Experiment 20000480 PARAMETER Experiment Name: Zm_Drought_P Parameter: Timepoint (hr) Value: 72
  misc_feature: MA Experiment 20000480 PARAMETER Experiment Name: Zm_Drought_P Parameter: Tissue Value: Aerial
  misc_feature: MA Experiment 20000480 PARAMETER Experiment Name: Zm_Drought_P Parameter: Treatment Value: Drought vs. No Drought
  misc_feature: MA Experiment ID: 20000535 Result: Down-regulated in Transcription
  misc_feature: MA Experiment 20000535 PARAMETER Experiment Name: Zm_Hybrid_Seed_Dev_P Parameter: DAP Value: 30 vs. 12
  misc_feature: MA Experiment 20000535 PARAMETER Experiment Name: Zm_Hybrid_Seed_Dev_P Parameter: Organism Value: Zea mays
  misc_feature: MA Experiment 20000535 PARAMETER Experiment Name: Zm_Hybrid_Seed_Dev_P Parameter: Plant Line Value: 35A19
  misc_feature: MA Experiment 20000535 PARAMETER Experiment Name: Zm_Hybrid_Seed_Dev_P Parameter: Tissue Value: Embryo vs. Unfert Floret
atcccaattcttgcctaccggctaccgctgctcctgttaggagtacttgccaattactgttggaatcaccttcnccgcctcctcgagaaccaattctagcctaaaacccgcagtgatccgcccaactcccgacccactcatggtcgatcggcgcggccgctgaactgcctgcggcgggggcgagaggacgcgggtcgaggcgggcgatggccgggctggcggggaggcctggttcctggggcggccttgtgctgcgggtggggcaggctctcttcgccgccgcctgcatcggcgtcatgggcagctcgctcggattcgccagctacaccgccttctgctacttgattgcgtcaatggggcttcaaatgctgtggagtttcggacttgcatgtcttgatggatatgccattagagccaataaagatctcaccagtcccattctattgagcttgtttgtcgttggagactgggtaacagcaatcctgtcattcgccgcatcaagctcagctgccggtgtagtaatcctatttcaaaaggacgtgctcttctgcagaaggtatccccagctcccctgcggaaaatacgagctcgccacggcgttcgccttcctgtcttgggcgctcagtgcgacatcagcattgatcatgttttggctcctggctgcgttctgattttgtgtaaaaattttgtgacagcgatgttcatagtgcccacttcgctgttctctcatcgcattcttttacgaccatgtcacatatttagagccacatagccccccccccccccccaccccccaaaaaaaagaatgttgggatcatgtaaagtccttgaagggaacagttactaatggaagaaattcactg

SEQ ID NO: 1494 - protein, 154 aa, Zea mays subsp. mays
  peptide (1)..(154): Ceres Seq. ID no. 12411159
  misc_feature (6)..(139): Pfam Name: Domain of unknown function (DUF588) Pfam Description: Domain of unknown function (DUF588)
  misc_feature (1)..(151): Homolog of NCBI NO: 22330130 NR Description: hypothetical protein; protein id: At1g49405.1
  misc_feature (1)..(88): Homolog of NCBI NO: 7939530 NR Description: gb|AAD20689.1~gene_id:K14B15.11~similar to
  misc_feature (8)..(137): Homolog of NCBI NO: 26006486 NR Description: Unknown protein [Oryza sativa (japonica
  misc_feature (1)..(152): Homolog of NCBI NO: 30687069 NR Description: expressed protein [Arabidopsis thaliana]
  misc_feature (1)..(152): Homolog of NCBI NO: 25408537 NR Description: hypothetical protein At2g37200 [imported] -
  misc_feature (1)..(153): Homolog of NCBI NO: 18401722 NR Description: expressed protein
  misc_feature (43)..(153): Homolog of NCBI NO: 11357817 NR Description: hypothetical protein F5K20.150 - Arabidopsis
  misc_feature (1)..(153): Homolog of NCBI NO: 30686969 NR Description: expressed protein [Arabidopsis thaliana]
  misc_feature (1)..(151): Homolog of NCBI NO: 15241672 NR Description: putative protein; protein id: At5g02060.1
  misc_feature (1)..(153): Homolog of NCBI NO: 18409932 NR Description: putative protein
MAGLAGRPGSWGGLVLRVGQALFAAACIGVMGSSLGFASYTAFCYLIASMGLQMLWSFGLACLDGYAIRANKDLTSPILLSLFVVGDWVTAILSFAASSSAAGVVILFQKDVLFCRRYPQLPCGKYELATAFAFLSWALSATSALIMFWLLAAF

SEQ ID NO: 1495 - protein, 124 aa, Zea mays subsp. mays
  peptide (1)..(124): Ceres Seq. ID no. 12411160
  misc_feature (1)..(109): Pfam Name: Domain of unknown function (DUF588) Pfam Description: Domain of unknown function (DUF588)
  misc_feature (1)..(121): Homolog of NCBI NO: 22330130 NR Description: hypothetical protein; protein id: At1g49405.1
  misc_feature (1)..(58): Homolog of NCBI NO: 7939530 NR Description: gb|AAD20689.1~gene_id:K14B15.11~similar to
  misc_feature (1)..(107): Homolog of NCBI NO: 26006486 NR Description: Unknown protein [Oryza sativa (japonica
  misc_feature (1)..(122): Homolog of NCBI NO: 30687069 NR Description: expressed protein [Arabidopsis thaliana]
  misc_feature (1)..(122): Homolog of NCBI NO: 25408537 NR Description: hypothetical protein At2g37200 [imported] -
  misc_feature (1)..(123): Homolog of NCBI NO: 18401722 NR Description: expressed protein
  misc_feature (13)..(123): Homolog of NCBI NO: 11357817 NR Description: hypothetical protein F5K20.150 - Arabidopsis
  misc_feature (1)..(123): Homolog of NCBI NO: 30686969 NR Description: expressed protein [Arabidopsis thaliana]
  misc_feature (1)..(121): Homolog of NCBI NO: 15241672 NR Description: putative protein; protein id: At5g02060.1
  misc_feature (1)..(123): Homolog of NCBI NO: 18409932 NR Description: putative protein
MGSSLGFASYTAFCYLIASMGLQMLWSFGLACLDGYAIRANKDLTSPILLSLFVVGDWVTAILSFAASSSAAGVVILFQKDVLFCRRYPQLPCGKYELATAFAFLSWALSATSALIMFWLLAAF

SEQ ID NO: 1496 - protein, 105 aa, Zea mays subsp. mays
  peptide (1)..(105): Ceres Seq. ID no. 12411161
  misc_feature (1)..(90): Pfam Name: Domain of unknown function (DUF588) Pfam Description: Domain of unknown function (DUF588)
  misc_feature (1)..(102): Homolog of NCBI NO: 22330130 NR Description: hypothetical protein; protein id: At1g49405.1
  misc_feature (1)..(39): Homolog of NCBI NO: 7939530 NR Description: gb|AAD20689.1~gene_id:K14B15.11~similar to
  misc_feature (1)..(88): Homolog of NCBI NO: 26006486 NR Description: Unknown protein [Oryza sativa (japonica
  misc_feature (1)..(103): Homolog of NCBI NO: 30687069 NR Description: expressed protein [Arabidopsis thaliana]
  misc_feature (1)..(103): Homolog of NCBI NO: 25408537 NR Description: hypothetical protein At2g37200 [imported] -
  misc_feature (1)..(104): Homolog of NCBI NO: 18401722 NR Description: expressed protein
  misc_feature (1)..(104): Homolog of NCBI NO: 11357817 NR Description: hypothetical protein F5K20.150 - Arabidopsis
  misc_feature (1)..(104): Homolog of NCBI NO: 30686969 NR Description: expressed protein [Arabidopsis thaliana]
  misc_feature (1)..(102): Homolog of NCBI NO: 15241672 NR Description: putative protein; protein id: At5g02060.1
  misc_feature (1)..(104): Homolog of NCBI NO: 18409932 NR Description: putative protein
MGLQMLWSFGLACLDGYAIRANKDLTSPILLSLFVVGDWVTAILSFAASSSAAGVVILFQKDVLFCRRYPQLPCGKYELATAFAFLSWALSATSALIMFWLLAAF

SEQ ID NO: 1497 - DNA, 893 bp, Zea mays subsp. mays
  misc_feature (1)..(893): Ceres Seq. ID no. 12414333
  misc_feature: MA Experiment ID: 108535 Result: Down-regulated in Transcription
  misc_feature: MA Experiment 108535 PARAMETER Experiment Name: Zm_Meristem_P Parameter: Age (day) Value: 8
  misc_feature: MA Experiment 108535 PARAMETER Experiment Name: Zm_Meristem_P Parameter: Organism Value: Zea mays
  misc_feature: MA Experiment 108535 PARAMETER Experiment Name: Zm_Meristem_P Parameter: Plant Line Value: 35A19
  misc_feature: MA Experiment 108535 PARAMETER Experiment Name: Zm_Meristem_P Parameter: Tissue Value: Root Meristem vs. Above Root Meristem
  misc_feature: MA Experiment ID: 108559 Result: Down-regulated in Transcription
  misc_feature: MA Experiment 108559 PARAMETER Experiment Name: Zm_5mM_NO_P Parameter: Age (day) Value: 8
  misc_feature: MA Experiment 108559 PARAMETER Experiment Name: Zm_5mM_NO_P Parameter: Organism Value: Zea mays
  misc_feature: MA Experiment 108559 PARAMETER Experiment Name: Zm_5mM_NO_P Parameter: Plant Line Value: 35A19
  misc_feature: MA Experiment 108559 PARAMETER Experiment Name: Zm_5mM_NO_P Parameter: Timepoint (hr) Value: 12
  misc_feature: MA Experiment 108559 PARAMETER Experiment Name: Zm_5mM_NO_P Parameter: Tissue Value: Aerial
  misc_feature: MA Experiment 108559 PARAMETER Experiment Name: Zm_5mM_NO_P Parameter: Treatment Value: 5mM NO vs. No Treatment
  misc_feature: MA Experiment ID: 108689 Result: Down-regulated in Transcription
  misc_feature: MA Experiment 108689 PARAMETER Experiment Name: Zm_Drought_Roots_P Parameter: Age (day) Value: 9
  misc_feature: MA Experiment 108689 PARAMETER Experiment Name: Zm_Drought_Roots_P Parameter: Organism Value: Zea mays
  misc_feature: MA Experiment 108689 PARAMETER Experiment Name: Zm_Drought_Roots_P Parameter: Plant Line Value: 35A19
  misc_feature: MA Experiment 108689 PARAMETER Experiment Name: Zm_Drought_Roots_P Parameter: Timepoint (hr) Value: 24
  misc_feature: MA Experiment 108689 PARAMETER Experiment Name: Zm_Drought_Roots_P Parameter: Tissue Value: Roots
  misc_feature: MA Experiment 108689 PARAMETER Experiment Name: Zm_Drought_Roots_P Parameter: Treatment Value: Drought vs. No Drought
gcacgagaccattacctagaacatcctaatcgaaaaaagagccgtcgaagccgaagcagagcacgacggacaaaaatatggcagggaaagccggcggactcaaaggggttgccctcatcggcggcagcgccaacagcacggtcgctggggtcattcacttcttcgaggacccctccaccaggtacaccgaggtgaggggcaaggtcacgggcttgactccgggaaggcatggattccacatccacgtcttcggcgacactaccaatggctgcaactcaaccggtccccattttaaccctcataataaaccccatggagctccatttgacgacgaacgacatttgggcgacctgggaaatatagtagccaatgaagatggagatgcagaagtgttcataagagacttacagatttcattgagtgggcctcattccattctgggaagggcagttgttgtacatgctgatcctgatgacctagggaggggtggccatgaactgagtaagtcaacaggaaacgcaggagctagaattggatgtggtatcattggaattcagtcatcagtttgacaaataacggcttagtagcaccagaaaaagagggggtcatgattccacagtctgtgcaatgtgctggttcagggacatggaaatggtgttcgttgttctggaccgtttgaagactaaatatctccagccatgtatacaataattttgtcagtgagaggaaattgcttgtaaaatcttgtattgacttatatcactggttaccagcagcaataagtctatatgtaaaacttctcgatttgtatatcagctatgtttcgtgtggagaagggaagcgaacgcaagtcagctttttgtgagtgcattccgttcagttcttacttggtc

SEQ ID NO: 1498 - protein, 163 aa, Zea mays subsp. mays
  peptide (1)..(163): Ceres Seq. ID no. 12414334
  misc_feature (8)..(161): Pfam Name: Copper/zinc superoxide dismutase (SODC) Pfam Description: Copper/zinc superoxide dismutase (SODC)
  misc_feature (6)..(162): Homolog of NCBI NO: 11358866 NR Description: superoxide dismutase (EC 1.15.1.1) (Cu-Zn) 3
  misc_feature (7)..(163): Homolog of NCBI NO: 13374180 NR Description: superoxide dismutase [Pinus sylvestris]
  misc_feature (1)..(162): Homolog of NCBI NO: 15238738 NR Description: copper/zinc superoxide dismutase (CSD3); protein
  misc_feature (8)..(160): Homolog of NCBI NO: 134595 NR Description: Superoxide dismutase [Cu-Zn] 1
  misc_feature (12)..(163): Homolog of NCBI NO: 3786214 NR Description: high pI CuZn-superoxide dismutase [Pinus
  misc_feature (6)..(160): Homolog of NCBI NO: 134621 NR Description: Superoxide dismutase [Cu-Zn]
  misc_feature (8)..(160): Homolog of NCBI NO: 134613 NR Description: Superoxide dismutase [Cu-Zn] 2
  misc_feature (6)..(163): Homolog of NCBI NO: 3334333 NR Description: Superoxide dismutase [Cu-Zn] 2
  misc_feature (6)..(163): Homolog of NCBI NO: 15131679 NR Description: putative CuZn-superoxide dismutase
  misc_feature (6)..(163): Homolog of NCBI NO: 13274154 NR Description: putative CuZn-superoxide dismutase
MAGKAGGLKGVALIGGSANSTVAGVIHFFEDPSTRYTEVRGKVTGLTPGRHGFHIHVFGDTTNGCNSTGPHFNPHNKPHGAPFDDERHLGDLGNIVANEDGDAEVFIRDLQISLSGPHSILGRAVVVHADPDDLGRGGHELSKSTGNAGARIGCGIIGIQSSV

SEQ ID NO: 1499 - DNA, 1291 bp, Zea mays subsp. mays
  misc_feature (1)..(1291): Ceres Seq. ID no. 12414321
  misc_feature: MA Experiment ID: 108504 Result: Down-regulated in Transcription
  misc_feature: MA Experiment 108504 PARAMETER Experiment Name: Zm_Drought_P Parameter: Age (day) Value: 8
  misc_feature: MA Experiment 108504 PARAMETER Experiment Name: Zm_Drought_P Parameter: Organism Value: Zea mays
  misc_feature: MA Experiment 108504 PARAMETER Experiment Name: Zm_Drought_P Parameter: Plant Line Value: 35A19
  misc_feature: MA Experiment 108504 PARAMETER Experiment Name: Zm_Drought_P Parameter: Timepoint (hr) Value: 12
  misc_feature: MA Experiment 108504 PARAMETER Experiment Name: Zm_Drought_P Parameter: Tissue Value: Aerial
  misc_feature: MA Experiment 108504 PARAMETER Experiment Name: Zm_Drought_P Parameter: Treatment Value: Drought vs. No Drought
  misc_feature: MA Experiment ID: 108527 Result: Up-regulated in Transcription
  misc_feature: MA Experiment 108527 PARAMETER Experiment Name: Zm_5mM_NO_P Parameter: Age (day) Value: 8
  misc_feature: MA Experiment 108527 PARAMETER Experiment Name: Zm_5mM_NO_P Parameter: Organism Value: Zea mays
  misc_feature: MA Experiment 108527 PARAMETER Experiment Name: Zm_5mM_NO_P Parameter: Plant Line Value: 35A19
  misc_feature: MA Experiment 108527 PARAMETER Experiment Name: Zm_5mM_NO_P Parameter: Timepoint (hr) Value: 6
  misc_feature: MA Experiment 108527 PARAMETER Experiment Name: Zm_5mM_NO_P Parameter: Tissue Value: Aerial
  misc_feature: MA Experiment 108527 PARAMETER Experiment Name: Zm_5mM_NO_P Parameter: Treatment Value: 5mM NO vs. No Treatment
  misc_feature: MA Experiment ID: 108528 Result: Down-regulated in Transcription
  misc_feature: MA Experiment 108528 PARAMETER Experiment Name: Zm_Imbibed_Seeds_P Parameter: Age (day) Value: 5 vs. 2
  misc_feature: MA Experiment 108528 PARAMETER Experiment Name: Zm_Imbibed_Seeds_P Parameter: Organism Value: Zea mays
  misc_feature: MA Experiment 108528 PARAMETER Experiment Name: Zm_Imbibed_Seeds_P Parameter: Plant Line Value: 35A19
  misc_feature: MA Experiment 108528 PARAMETER Experiment Name: Zm_Imbibed_Seeds_P Parameter: Tissue Value: Aerial vs. Embryo
  misc_feature: MA Experiment ID: 108530 Result: Down-regulated in Transcription
  misc_feature: MA Experiment 108530 PARAMETER Experiment Name: Zm_Imbibed_Seeds_P Parameter: Age (day) Value: 6 vs. 2
  misc_feature: MA Experiment 108530 PARAMETER Experiment Name: Zm_Imbibed_Seeds_P Parameter: Organism Value: Zea mays
  misc_feature: MA Experiment 108530 PARAMETER Experiment Name: Zm_Imbibed_Seeds_P Parameter: Plant Line Value: 35A19
  misc_feature: MA Experiment 108530 PARAMETER Experiment Name: Zm_Imbibed_Seeds_P Parameter: Tissue Value: Aerial vs. Embryo
  misc_feature: MA Experiment ID: 108535 Result: Down-regulated in Transcription
  misc_feature: MA Experiment 108535 PARAMETER Experiment Name: Zm_Meristem_P Parameter: Age (day) Value: 8
  misc_feature: MA Experiment 108535 PARAMETER Experiment Name: Zm_Meristem_P Parameter: Organism Value: Zea mays
  misc_feature: MA Experiment 108535 PARAMETER Experiment Name: Zm_Meristem_P Parameter: Plant Line Value: 35A19
  misc_feature: MA Experiment 108535 PARAMETER Experiment Name: Zm_Meristem_P Parameter: Tissue Value: Root Meristem vs. Above Root Meristem
  misc_feature: MA Experiment ID: 108545 Result: Down-regulated in Transcription
  misc_feature: MA Experiment 108545 PARAMETER Experiment Name: Zm_Imbibed_Seeds_P Parameter: Age (day) Value: 3 vs. 2
  misc_feature: MA Experiment 108545 PARAMETER Experiment Name: Zm_Imbibed_Seeds_P Parameter: Organism Value: Zea mays
  misc_feature: MA Experiment 108545 PARAMETER Experiment Name: Zm_Imbibed_Seeds_P Parameter: Plant Line Value: 35A19
  misc_feature: MA Experiment 108545 PARAMETER Experiment Name: Zm_Imbibed_Seeds_P Parameter: Tissue Value: Aerial vs. Embryo
  misc_feature: MA Experiment ID: 108547 Result: Down-regulated in Transcription
  misc_feature: MA Experiment 108547 PARAMETER Experiment Name: Zm_Imbibed_Seeds_P Parameter: Age (day) Value: 4 vs. 2
  misc_feature: MA Experiment 108547 PARAMETER Experiment Name: Zm_Imbibed_Seeds_P Parameter: Organism Value: Zea mays
  misc_feature: MA Experiment 108547 PARAMETER Experiment Name: Zm_Imbibed_Seeds_P Parameter: Plant Line Value: 35A19
  misc_feature: MA Experiment 108547 PARAMETER Experiment Name: Zm_Imbibed_Seeds_P Parameter: Tissue Value: Aerial vs. Embryo
  misc_feature: MA Experiment ID: 108559 Result: Up-regulated in Transcription
  misc_feature: MA Experiment 108559 PARAMETER Experiment Name: Zm_5mM_NO_P Parameter: Age (day) Value: 8
  misc_feature: MA Experiment 108559 PARAMETER Experiment Name: Zm_5mM_NO_P Parameter: Organism Value: Zea mays
  misc_feature: MA Experiment 108559 PARAMETER Experiment Name: Zm_5mM_NO_P Parameter: Plant Line Value: 35A19
  misc_feature: MA Experiment 108559 PARAMETER Experiment Name: Zm_5mM_NO_P Parameter: Timepoint (hr) Value: 12
  misc_feature: MA Experiment 108559 PARAMETER Experiment Name: Zm_5mM_NO_P Parameter: Tissue Value: Aerial
  misc_feature: MA Experiment 108559 PARAMETER Experiment Name: Zm_5mM_NO_P Parameter: Treatment Value: 5mM NO vs. No Treatment
  misc_feature: MA Experiment ID: 108597 Result: Down-regulated in Transcription
  misc_feature: MA Experiment 108597 PARAMETER Experiment Name: Zm_100uM_ABA_P Parameter: Age (day) Value: 9
  misc_feature: MA Experiment 108597 PARAMETER Experiment Name: Zm_100uM_ABA_P Parameter: Organism Value: Zea mays
  misc_feature: MA Experiment 108597 PARAMETER Experiment Name: Zm_100uM_ABA_P Parameter: Plant Line Value: 35A19
  misc_feature: MA Experiment 108597 PARAMETER Experiment Name: Zm_100uM_ABA_P Parameter: Timepoint (hr) Value: 24
  misc_feature: MA Experiment 108597 PARAMETER Experiment Name: Zm_100uM_ABA_P Parameter: Tissue Value: Aerial
  misc_feature: MA Experiment 108597 PARAMETER Experiment Name: Zm_100uM_ABA_P Parameter: Treatment Value: 100uM ABA vs. No Treatment
  misc_feature: MA Experiment ID: 108687 Result: Down-regulated in Transcription
  misc_feature: MA Experiment 108687 PARAMETER Experiment Name: Zm_Embryos-Flowers__P Parameter: Tissue Value: Embryo vs. Aerial+
  misc_feature: MA Experiment ID: 20000477 Result: Up-regulated in Transcription
  misc_feature: MA Experiment 20000477 PARAMETER Experiment Name: Zm_5mM_SA_P Parameter: Age (day) Value: 10
  misc_feature: MA Experiment 20000477 PARAMETER Experiment Name: Zm_5mM_SA_P Parameter: Organism Value: Zea mays
  misc_feature: MA Experiment 20000477 PARAMETER Experiment Name: Zm_5mM_SA_P Parameter: Plant Line Value: 35A19
  misc_feature: MA Experiment 20000477 PARAMETER Experiment Name: Zm_5mM_SA_P Parameter: Timepoint (hr) Value: 48
  misc_feature: MA Experiment 20000477 PARAMETER Experiment Name: Zm_5mM_SA_P Parameter: Tissue Value: Aerial
  misc_feature: MA Experiment 20000477 PARAMETER Experiment Name: Zm_5mM_SA_P Parameter: Treatment Value: 5mM SA vs. No Treatment
  misc_feature: MA Experiment ID: 20000478 Result: Up-regulated in Transcription
  misc_feature: MA Experiment 20000478 PARAMETER Experiment Name: Zm_5mM_SA_P Parameter: Age (day) Value: 11
  misc_feature: MA Experiment 20000478 PARAMETER Experiment Name: Zm_5mM_SA_P Parameter: Organism Value: Zea mays
  misc_feature: MA Experiment 20000478 PARAMETER Experiment Name: Zm_5mM_SA_P Parameter: Plant Line Value: 35A19
  misc_feature: MA Experiment 20000478 PARAMETER Experiment Name: Zm_5mM_SA_P Parameter: Timepoint (hr) Value: 72
  misc_feature: MA Experiment 20000478 PARAMETER Experiment Name: Zm_5mM_SA_P Parameter: Tissue Value: Aerial
  misc_feature: MA Experiment 20000478 PARAMETER Experiment Name: Zm_5mM_SA_P Parameter: Treatment Value: 5mM SA vs. No Treatment
  misc_feature: MA Experiment ID: 20000480 Result: Down-regulated in Transcription
  misc_feature: MA Experiment 20000480 PARAMETER Experiment Name: Zm_Drought_P Parameter: Age (day) Value: 11
  misc_feature: MA Experiment 20000480 PARAMETER Experiment Name: Zm_Drought_P Parameter: Organism Value: Zea mays
  misc_feature: MA Experiment 20000480 PARAMETER Experiment Name: Zm_Drought_P Parameter: Plant Line Value: 35A19
  misc_feature: MA Experiment 20000480 PARAMETER Experiment Name: Zm_Drought_P Parameter: Timepoint (hr) Value: 72
  misc_feature: MA Experiment 20000480 PARAMETER Experiment Name: Zm_Drought_P Parameter: Tissue Value: Aerial
  misc_feature: MA Experiment 20000480 PARAMETER Experiment Name: Zm_Drought_P Parameter: Treatment Value: Drought vs. No Drought
  misc_feature: MA Experiment ID: 20000487 Result: Down-regulated in Transcription
  misc_feature: MA Experiment 20000487 PARAMETER Experiment Name: Zm_50mM_NH4NO3_L_to_H_P Parameter: Organism Value: Zea mays
  misc_feature: MA Experiment 20000487 PARAMETER Experiment Name: Zm_50mM_NH4NO3_L_to_H_P Parameter: Timepoint (hr) Value: 4
  misc_feature: MA Experiment 20000487 PARAMETER Experiment Name: Zm_50mM_NH4NO3_L_to_H_P Parameter: Tissue Value: Leaves
  misc_feature: MA Experiment 20000487 PARAMETER Experiment Name: Zm_50mM_NH4NO3_L_to_H_P Parameter: Treatment Value: 50mM NH4NO3 vs. 100mM Mannitol
  misc_feature: MA Experiment ID: 20000488 Result: Down-regulated in Transcription
  misc_feature: MA Experiment 20000488 PARAMETER Experiment Name: Zm_50mM_NH4NO3_L_to_H_P Parameter: Organism Value: Zea mays
  misc_feature: MA Experiment 20000488 PARAMETER Experiment Name: Zm_50mM_NH4NO3_L_to_H_P Parameter: Timepoint (hr) Value: 8
  misc_feature: MA Experiment 20000488 PARAMETER Experiment Name: Zm_50mM_NH4NO3_L_to_H_P Parameter: Tissue Value: Leaves
  misc_feature: MA Experiment 20000488 PARAMETER Experiment Name: Zm_50mM_NH4NO3_L_to_H_P Parameter: Treatment Value: 50mM NH4NO3 vs. 100mM Mannitol
  misc_feature: MA Experiment ID: 20000533 Result: Up-regulated in Transcription
  misc_feature: MA Experiment 20000533 PARAMETER Experiment Name: Zm_0.001percent_MeJA_P Parameter: Age (day) Value: 11
  misc_feature: MA Experiment 20000533 PARAMETER Experiment Name: Zm_0.001percent_MeJA_P Parameter: Organism Value: Zea mays
  misc_feature: MA Experiment 20000533 PARAMETER Experiment Name: Zm_0.001percent_MeJA_P Parameter: Plant Line Value: 35A19
  misc_feature: MA Experiment 20000533 PARAMETER Experiment Name: Zm_0.001percent_MeJA_P Parameter: Timepoint (hr) Value: 72
  misc_feature: MA Experiment 20000533 PARAMETER Experiment Name: Zm_0.001percent_MeJA_P Parameter: Tissue Value: Aerial
  misc_feature: MA Experiment 20000533 PARAMETER Experiment Name: Zm_0.001percent_MeJA_P Parameter: Treatment Value: 0.001percent MeJA vs. No Treatment
  misc_feature: MA Experiment ID: 20000535 Result: Down-regulated in Transcription
  misc_feature: MA Experiment 20000535 PARAMETER Experiment Name: Zm_Hybrid_Seed_Dev_P Parameter: DAP Value: 30 vs. 12
  misc_feature: MA Experiment 20000535 PARAMETER Experiment Name: Zm_Hybrid_Seed_Dev_P Parameter: Organism Value: Zea mays
  misc_feature: MA Experiment 20000535 PARAMETER Experiment Name: Zm_Hybrid_Seed_Dev_P Parameter: Plant Line Value: 35A19
  misc_feature: MA Experiment 20000535 PARAMETER Experiment Name: Zm_Hybrid_Seed_Dev_P Parameter: Tissue Value: Embryo vs. Unfert Floret
  misc_feature: MA Experiment ID: 20000626 Result: Up-regulated in Transcription
  misc_feature: MA Experiment 20000626 PARAMETER Experiment Name: Zm_Herbicide-Treatments_P Parameter: Timepoint (hr) Value: 12
  misc_feature: MA Experiment 20000626 PARAMETER Experiment Name: Zm_Herbicide-Treatments_P Parameter: Tissue Value: Aerial
  misc_feature: MA Experiment 20000626 PARAMETER Experiment Name: Zm_Herbicide-Treatments_P Parameter: Treatment Value: Roundup vs. No Treatment
gccaagcaggtctcagcgaggttttctgctataaataaggcatcgtccaggcaaacaattaatagggcaaagcaaatcaaggacgctctgcacgtactattcatcttccattgttgctttgctttgctttgcttaccggcaaccatggccagcactcgtgcagcagcaactctccttttgctcctcgcgctcgccggcacctcgtcggcgcagctgttccacgggcttctactcctactcgtgccccggcgtgtacggcgccgtcaagtcggtgatgcagtccgccatcgccagggagaagcgcatgggggccctccatcctccgcctcttcttccacgactgcttcgtccagggctgcgacgcgtcgctgctgctggacgacacgcccagcttccagggcgagaagatggccaaccctaacaacggctccgtcaggggattcgaggtcatcgacgccgtcaagtccgccgtcgaaaagctgtgccccggcgtcgtctcctgcgccgacatcctcgccatcgccgccagggacagcgtcgtcatcctgggtggtccgacctgggacgtgaaggtcgggcggcgggactccacgacggcgagcttcagcggcgccaacaacaacatcccgccgccgacgtcgggcctcgccaacctcacgtcgctcttcgccgcgcagggactttctcagaaggacatggtcgcgctctctggtgctcacaccatcgggcaggcacgctgcaccaacttcagagcccacatctacaacgacaccgacatcgacgctgccttcgcgagaacgaggcagtcaggctgcccaagcacctcaggcgccggcggcgacaacaacctggcgccattggacctccagacccctaccgtcttcgagaacaactactacaggaacctcctcgccaagaaggggctcctgcactccgaccaggagctcttcaatggcggagccaccgacgcgctggtccagtcctacgtcgggagccagagcgcgttcttcgcggatttcgtggcgggcatgatcaagatgggcgacatcacaccgctgaccggctccaacaacggacagataaggaagaactgcagaagagtcaattagcagatagctagctagggtcactaattaagacccatgcatggctgttgaactgcaagctaagtaaacactatgtgagatcgtcgcgttgatgtgctcacatgtcgtctttttatttgggtgaaggatggatgcatgtatcagatcacttgttgtttaattaatgccatttcagtctttgtccg

SEQ ID NO: 1500 - protein, 233 aa, Zea mays subsp. mays
  peptide (1)..(233): Ceres Seq. ID no. 12414322
  misc_feature (1)..(193): Pfam Name: Peroxidase Pfam Description: Peroxidase
  misc_feature (1)..(233): Homolog of NCBI NO: 15237190 NR Description: peroxidase, putative; protein id: At5g58400.1
  misc_feature (1)..(233): Homolog of NCBI NO: 464365 NR Description: Peroxidase P7 (TP7)
  misc_feature (1)..(233): Homolog of NCBI NO: 15239075 NR Description: peroxidase, putative
  misc_feature (1)..(233): Homolog of NCBI NO: 19698446 NR Description: gaiacol peroxidase [Gossypium hirsutum]
  misc_feature (1)..(233): Homolog of NCBI NO: 39777532 NR Description: peroxidase precursor [Quercus suber]
  misc_feature (1)..(233): Homolog of NCBI NO: 39777536 NR Description: peroxidase precursor [Quercus suber]
  misc_feature (1)..(233): Homolog of NCBI NO: 5381253 NR Description: peroxidase [Nicotiana tabacum]
  misc_feature (1)..(233): Homolog of NCBI NO: 28400796 NR Description: peroxidase [Asparagus officinalis]
  misc_feature (1)..(233): Homolog of NCBI NO: 28400794 NR Description: peroxidase [Asparagus officinalis]
  misc_feature (1)..(233): Homolog of NCBI NO: 28400798 NR Description: peroxidase [Asparagus officinalis]
MANPNNGSVRGFEVIDAVKSAVEKLCPGVVSCADILAIAARDSVVILGGPTWDVKVGRRDSTTASFSGANNNIPPPTSGLANLTSLFAAQGLSQKDMVALSGAHTIGQARCTNFRAHIYNDTDIDAAFARTRQSGCPSTSGAGGDNNLAPLDLQTPTVFENNYYRNLLAKKGLLHSDQELFNGGATDALVQSYVGSQSAFFADFVAGMIKMGDITPLTGSNNGQIRKNCRRVN

SEQ ID NO: 1501 - protein, 189 aa, Zea mays subsp. mays
  peptide (1)..(189): Ceres Seq. ID no. 12414323
  misc_feature (107)..(189): Pfam Name: Equine herpesvirus glycoprotein gp2 Pfam Description: Equine herpesvirus glycoprotein gp2
  misc_feature (107)..(189): Homolog of NCBI NO: 17221114 NR Description: glycoprotein gp2 [Equine herpesvirus 1]
  misc_feature (106)..(189): Homolog of NCBI NO: 17221114 NR Description: glycoprotein gp2 [Equine herpesvirus 1]
  misc_feature (141)..(189): Homolog of NCBI NO: 17221114 NR Description: glycoprotein gp2 [Equine herpesvirus 1]
  misc_feature (107)..(189): Homolog of NCBI NO: 17221114 NR Description: glycoprotein gp2 [Equine herpesvirus 1]
AKQVSARFSAINKASSRQTINRAKQIKDALHVLFIFHCCFALLCLPATMASTRAAATLLLLLALAGTSSAQLFHGLLLLLVPRRVRRRQVGDAVRHRQGEAHGGPPSSASSSTTASSRAATRRCCWTTRPASRARRWPTLTTAPSGDSRSSTPSSPPSKSCAPASSPAPTSSPSPPGTASSSWVVRPGT

SEQ ID NO: 1502 - protein, 141 aa, Zea mays subsp. mays
  peptide (1)..(141): Ceres Seq. ID no. 12414324
  misc_feature (59)..(141): Pfam Name: Equine herpesvirus glycoprotein gp2 Pfam Description: Equine herpesvirus glycoprotein gp2
  misc_feature (59)..(141): Homolog of NCBI NO: 17221114 NR Description: glycoprotein gp2 [Equine herpesvirus 1]
  misc_feature (58)..(141): Homolog of NCBI NO: 17221114 NR Description: glycoprotein gp2 [Equine herpesvirus 1]
  misc_feature (93)..(141): Homolog of NCBI NO: 17221114 NR Description: glycoprotein gp2 [Equine herpesvirus 1]
  misc_feature (59)..(141): Homolog of NCBI NO: 17221114 NR Description: glycoprotein gp2 [Equine herpesvirus 1]
MASTRAAATLLLLLALAGTSSAQLFHGLLLLLVPRRVRRRQVGDAVRHRQGEAHGGPPSSASSSTTASSRAATRRCCWTTRPASRARRWPTLTTAPSGDSRSSTPSSPPSKSCAPASSPAPTSSPSPPGTASSSWVVRPGT

SEQ ID NO: 1503 - DNA, 1676 bp, Zea mays subsp. mays
  misc_feature (1)..(1676): Ceres Seq. ID no. 12361385
  misc_feature: MA Experiment ID: 108535 Result: Down-regulated in Transcription
  misc_feature: MA Experiment 108535 PARAMETER Experiment Name: Zm_Meristem_P Parameter: Age (day) Value: 8
  misc_feature: MA Experiment 108535 PARAMETER Experiment Name: Zm_Meristem_P Parameter: Organism Value: Zea mays
  misc_feature: MA Experiment 108535 PARAMETER Experiment Name: Zm_Meristem_P Parameter: Plant Line Value: 35A19
  misc_feature: MA Experiment 108535 PARAMETER Experiment Name: Zm_Meristem_P Parameter: Tissue Value: Root Meristem vs. Above Root Meristem
  misc_feature: MA Experiment ID: 20000108 Result: Down-regulated in Transcription
  misc_feature: MA Experiment 20000108 PARAMETER Experiment Name: Zm_Root-Tips_P Parameter: Age (day) Value: 12
  misc_feature: MA Experiment 20000108 PARAMETER Experiment Name: Zm_Root-Tips_P Parameter: Organism Value: Zea mays
  misc_feature: MA Experiment 20000108 PARAMETER Experiment Name: Zm_Root-Tips_P Parameter: Tissue Value: Root tips vs. Root mid region    35
  misc_feature: MA Experiment 20000108 PARAMETER Experiment Name: Zm_Root-Tips_P Parameter: Tissue Value: Root tips vs. Root mid region   Sequence Listing-Misc Features (4)
  misc_feature: MA Experiment ID: 20001610 Result: Up-regulated in Transcription
  misc_feature: MA Experiment 20001610 PARAMETER Experiment Name: Zm_50ppm_KNO3_L-to-H_P Parameter: Age (day) Value: 19
  misc_feature: MA Experiment 20001610 PARAMETER Experiment Name: Zm_50ppm_KNO3_L-to-H_P Parameter: Organism Value: Zea mays
  misc_feature: MA Experiment 20001610 PARAMETER Experiment Name: Zm_50ppm_KNO3_L-to-H_P Parameter: Plant Line Value: 35A19
  misc_feature: MA Experiment 20001610 PARAMETER Experiment Name: Zm_50ppm_KNO3_L-to-H_P Parameter: Timepoint (hr) Value: 2
  misc_feature: MA Experiment 20001610 PARAMETER Experiment Name: Zm_50ppm_KNO3_L-to-H_P Parameter: Tissue Value: Roots
  misc_feature: MA Experiment 20001610 PARAMETER Experiment Name: Zm_50ppm_KNO3_L-to-H_P Parameter: Treatment Value: 50ppm KNO3 vs. 50ppm KCl
  misc_feature: MA Experiment ID: 20001612 Result: Up-regulated in Transcription
  misc_feature: MA Experiment 20001612 PARAMETER Experiment Name: Zm_50ppm_KNO3_L-to-H_P Parameter: Age (day) Value: 19
  misc_feature: MA Experiment 20001612 PARAMETER Experiment Name: Zm_50ppm_KNO3_L-to-H_P Parameter: Organism Value: Zea mays
  misc_feature: MA Experiment 20001612 PARAMETER Experiment Name: Zm_50ppm_KNO3_L-to-H_P Parameter: Plant Line Value: 35A19
  misc_feature: MA Experiment 20001612 PARAMETER Experiment Name: Zm_50ppm_KNO3_L-to-H_P Parameter: Timepoint (hr) Value: 8
  misc_feature: MA Experiment 20001612 PARAMETER Experiment Name: Zm_50ppm_KNO3_L-to-H_P Parameter: Tissue Value: Roots
  misc_feature: MA Experiment 20001612 PARAMETER Experiment Name: Zm_50ppm_KNO3_L-to-H_P Parameter: Treatment Value: 50ppm KNO3 vs. 50ppm KCl
acctcgtggactccttccccacaaaactaaaccctcgcttcggaggcgcgtgaacccaagaccgacaggcgaacgaagcgagggtcctcacaaccaccatcccctgctgcaacgacgccatcgccaaccccgacgagggtcgcatggtgggccactactggctccgcgacccggccctcgctcccaactccttcctccggaacaagatcgagaccgcactcgacagaatcctcgccttctctcaagatgtcgtctctggaaagattctttccccatctggtcgtttcacttcaattctctctataggaatcggagggtcagctttgggccctcaatttgttgctgaggcacttgcgcctgataaccctccactgaagataagatttattgacaacaccgatcctgctgggattgatcatcaaattgctcaactaggacctgaactggcaactactcttgtaattgtcatttctaagagtggaggcacacctgaaacccgcaatgggctactggaagtacagaaagccttcagagatgcaggtctgcaattctcgaaacagggtgttgcaatcactcaagaaaattctctgttggataacactgccagaatagagggatggttagctcggtttcctatgtttgactgggttggtggtaggacttcagaaatgtcagctgttggtttacttccagctgcattgcagggtattgatatcaaggaaatgctagttggtgcagctttaatggatgaggaaacccggaacactgtggttaaagcaaatccagcagcattgcttgcattatgttggtattgggcatcggaagggataggcaaaaaggatatggttgtgcttccttacaaggatagtttattacttttgagtagatatttgcaacaacttgtcatggaatctcttggaaaagaattcgacctggatggcaaccgtgttaatcaagggctaactgtatatggtaacaaaggaagcactgaccagcatgcttacattcagcagctgagagaaggtgtacaaaacttctttgttacgtttattgaggtcttgcgtgacaggcctgctggacatgattgggagcttgaacctggagtcacgtgtggtgactatttgtttgggatgttgcagggaacccgttctgctctttatgcaaatgaccgggagtctatctctgttactgtgcaagaggtaactcctagagctgttggagcactgattgcactttatgaacgtgctgtggggatttatgcttctttggtaaatatcaatgcctatcatcagcctggtgttgaggctgggaaaaaggcagcaggagaagtattggcccttcagaaaagggttctgactgtattaaaggaggccatctgcgagaaccctactgagccattgactctagatgaaattgcagatcgctgccattgccctgaagatattgagatgatctacaaaataatccagcacatggctgctaacgacagagcacttatagcagaaggcagctgcggctctcctcgcagtgttaaggtgtacctcggtgaatgcagtgtggacgaagatatgcaggccgcatagattctgtgtctggatccgtgtaacattgttggaataaatcagaagcaacacaatagcgatgctatgcatgggtgtcgctgatgctgatgtctc

SEQ ID NO: 1504 - protein, 479 aa, Zea mays subsp. mays
  peptide (1)..(479): Ceres Seq. ID no. 12361386
  misc_feature (1)..(404): Pfam Name: Phosphoglucose isomerase Pfam Description: Phosphoglucose isomerase
  misc_feature (1)..(447): Homolog of NCBI NO: 23053592 NR Description: hypothetical protein [Geobacter metallireducens]
  misc_feature (1)..(465): Homolog of NCBI NO: 16330760 NR Description: glucose-6-phosphate isomerase [Synechocystis sp.
  misc_feature (1)..(465): Homolog of NCBI NO: 23040343 NR Description: hypothetical protein [Trichodesmium erythraeum
  misc_feature (1)..(464): Homolog of NCBI NO: 22298259 NR Description: glucose-6-phosphate isomerase
  misc_feature (1)..(467): Homolog of NCBI NO: 17228545 NR Description: glucose-6-phosphate isomerase [Nostoc sp. PCC
  misc_feature (1)..(465): Homolog of NCBI NO: 23125809 NR Description: hypothetical protein [Nostoc punctiforme]
  misc_feature (1)..(474): Homolog of NCBI NO: 6690395 NR Description: phosphoglucose isomerase precursor [Arabidopsis
  misc_feature (1)..(474): Homolog of NCBI NO: 7484979 NR Description: glucose-6-phosphate isomerase (EC 5.3.1.9) -
  misc_feature (1)..(474): Homolog of NCBI NO: 30686602 NR Description: glucose-6-phosphate isomerase [Arabidopsis
  misc_feature (1)..(474): Homolog of NCBI NO: 7484671 NR Description: glucose-6-phosphate isomerase (EC 5.3.1.9)
MVGHYWLRDPALAPNSFLRNKIETALDRILAFSQDVVSGKILSPSGRFTSILSIGIGGSALGPQFVAEALAPDNPPLKIRFIDNTDPAGIDHQIAQLGPELATTLVIVISKSGGTPETRNGLLEVQKAFRDAGLQFSKQGVAITQENSLLDNTARIEGWLARFPMFDWVGGRTSEMSAVGLLPAALQGIDIKEMLVGAALMDEETRNTVVKANPAALLALCWYWASEGIGKKDMVVLPYKDSLLLLSRYLQQLVMESLGKEFDLDGNRVNQGLTVYGNKGSTDQHAYIQQLREGVQNFFVTFIEVLRDRPAGHDWELEPGVTCGDYLFGMLQGTRSALYANDRESISVTVQEVTPRAVGALIALYERAVGIYASLVNINAYHQPGVEAGKKAAGEVLALQKRVLTVLKEAICENPTEPLTLDEIADRCHCPEDIEMIYKIIQHMAANDRALIAEGSCGSPRSVKVYLGECSVDEDMQAA

SEQ ID NO: 1505 - protein, 315 aa, Zea mays subsp. mays
  peptide (1)..(315): Ceres Seq. ID no. 12361387
  misc_feature (1)..(240): Pfam Name: Phosphoglucose isomerase Pfam Description: Phosphoglucose isomerase
  misc_feature (1)..(283): Homolog of NCBI NO: 23053592 NR Description: hypothetical protein [Geobacter metallireducens]
  misc_feature (1)..(301): Homolog of NCBI NO: 16330760 NR Description: glucose-6-phosphate isomerase [Synechocystis sp.
  misc_feature (1)..(301): Homolog of NCBI NO: 23040343 NR Description: hypothetical protein [Trichodesmium erythraeum
  misc_feature (1)..(300): Homolog of NCBI NO: 22298259 NR Description: glucose-6-phosphate isomerase
  misc_feature (1)..(303): Homolog of NCBI NO: 17228545 NR Description: glucose-6-phosphate isomerase [Nostoc sp. PCC
  misc_feature (1)..(301): Homolog of NCBI NO: 23125809 NR Description: hypothetical protein [Nostoc punctiforme]
  misc_feature (1)..(310): Homolog of NCBI NO: 6690395 NR Description: phosphoglucose isomerase precursor [Arabidopsis
  misc_feature (1)..(310): Homolog of NCBI NO: 7484979 NR Description: glucose-6-phosphate isomerase (EC 5.3.1.9) -
  misc_feature (1)..(310): Homolog of NCBI NO: 30686602 NR Description: glucose-6-phosphate isomerase [Arabidopsis
  misc_feature (1)..(310): Homolog of NCBI NO: 7484671 NR Description: glucose-6-phosphate isomerase (EC 5.3.1.9)
MFDWVGGRTSEMSAVGLLPAALQGIDIKEMLVGAALMDEETRNTVVKANPAALLALCWYWASEGIGKKDMVVLPYKDSLLLLSRYLQQLVMESLGKEFDLDGNRVNQGLTVYGNKGSTDQHAYIQQLREGVQNFFVTFIEVLRDRPAGHDWELEPGVTCGDYLFGMLQGTRSALYANDRESISVTVQEVTPRAVGALIALYERAVGIYASLVNINAYHQPGVEAGKKAAGEVLALQKRVLTVLKEAICENPTEPLTLDEIADRCHCPEDIEMIYKIIQHMAANDRALIAEGSCGSPRSVKVYLGECSVDEDMQAA

SEQ ID NO: 1506 - protein, 304 aa, Zea mays subsp. mays
  peptide (1)..(304): Ceres Seq. ID no. 12361388
  misc_feature (1)..(229): Pfam Name: Phosphoglucose isomerase Pfam Description: Phosphoglucose isomerase
  misc_feature (1)..(272): Homolog of NCBI NO: 23053592 NR Description: hypothetical protein [Geobacter metallireducens]
  misc_feature (1)..(290): Homolog of NCBI NO: 16330760 NR Description: glucose-6-phosphate isomerase [Synechocystis sp.
  misc_feature (1)..(290): Homolog of NCBI NO: 23040343 NR Description: hypothetical protein [Trichodesmium erythraeum
  misc_feature (1)..(289): Homolog of NCBI NO: 22298259 NR Description: glucose-6-phosphate isomerase
  misc_feature (1)..(292): Homolog of NCBI NO: 17228545 NR Description: glucose-6-phosphate isomerase [Nostoc sp. PCC
  misc_feature (1)..(290): Homolog of NCBI NO: 23125809 NR Description: hypothetical protein [Nostoc punctiforme]
  misc_feature (1)..(299): Homolog of NCBI NO: 6690395 NR Description: phosphoglucose isomerase precursor [Arabidopsis
  misc_feature (1)..(299): Homolog of NCBI NO: 7484979 NR Description: glucose-6-phosphate isomerase (EC 5.3.1.9) -
  misc_feature (1)..(299): Homolog of NCBI NO: 30686602 NR Description: glucose-6-phosphate isomerase [Arabidopsis
  misc_feature (1)..(299): Homolog of NCBI NO: 7484671 NR Description: glucose-6-phosphate isomerase (EC 5.3.1.9)
MSAVGLLPAALQGIDIKEMLVGAALMDEETRNTVVKANPAALLALCWYWASEGIGKKDMVVLPYKDSLLLLSRYLQQLVMESLGKEFDLDGNRVNQGLTVYGNKGSTDQHAYIQQLREGVQNFFVTFIEVLRDRPAGHDWELEPGVTCGDYLFGMLQGTRSALYANDRESISVTVQEVTPRAVGALIALYERAVGIYASLVNINAYHQPGVEAGKKAAGEVLALQKRVLTVLKEAICENPTEPLTLDEIADRCHCPEDIEMIYKIIQHMAANDRALIAEGSCGSPRSVKVYLGECSVDEDMQAA

SEQ ID NO: 1507 - DNA, 1377 bp, Zea mays subsp. mays
  misc_feature (1)..(1377): Ceres Seq. ID no. 12341432
  misc_feature: MA Experiment ID: 108534 Result: Up-regulated in Transcription
  misc_feature: MA Experiment 108534 PARAMETER Experiment Name: Zm_4deg_Cold_P Parameter: Age (hr) Value: 8
  misc_feature: MA Experiment 108534 PARAMETER Experiment Name: Zm_4deg_Cold_P Parameter: Organism Value: Zea mays
  misc_feature: MA Experiment 108534 PARAMETER Experiment Name: Zm_4deg_Cold_P Parameter: Plant Line Value: 35A19
  misc_feature: MA Experiment 108534 PARAMETER Experiment Name: Zm_4deg_Cold_P Parameter: Temperature (deg C) Value: 4 vs. 22
  misc_feature: MA Experiment 108534 PARAMETER Experiment Name: Zm_4deg_Cold_P Parameter: Timepoint (hr) Value: 6
  misc_feature: MA Experiment 108534 PARAMETER Experiment Name: Zm_4deg_Cold_P Parameter: Tissue Value: Aerial
  misc_feature: MA Experiment ID: 108543 Result: Up-regulated in Transcription
  misc_feature: MA Experiment ID: 108556 Result: Down-regulated in Transcription
  misc_feature: MA Experiment 108556 PARAMETER Experiment Name: Zm_Drought_P Parameter: Age (day) Value: 9
  misc_feature: MA Experiment 108556 PARAMETER Experiment Name: Zm_Drought_P Parameter: Organism Value: Zea mays
  misc_feature: MA Experiment 108556 PARAMETER Experiment Name: Zm_Drought_P Parameter: Plant Line Value: 35A19
  misc_feature: MA Experiment 108556 PARAMETER Experiment Name: Zm_Drought_P Parameter: Timepoint (hr) Value: 24
  misc_feature: MA Experiment 108556 PARAMETER Experiment Name: Zm_Drought_P Parameter: Tissue Value: Aerial
  misc_feature: MA Experiment 108556 PARAMETER Experiment Name: Zm_Drought_P Parameter: Treatment Value: Drought vs. No Drought
  misc_feature: MA Experiment ID: 108597 Result: Down-regulated in Transcription
  misc_feature: MA Experiment 108597 PARAMETER Experiment Name: Zm_100uM_ABA_P Parameter: Age (day) Value: 9
  misc_feature: MA Experiment 108597 PARAMETER Experiment Name: Zm_100uM_ABA_P Parameter: Organism Value: Zea mays
  misc_feature: MA Experiment 108597 PARAMETER Experiment Name: Zm_100uM_ABA_P Parameter: Plant Line Value: 35A19
  misc_feature: MA Experiment 108597 PARAMETER Experiment Name: Zm_100uM_ABA_P Parameter: Timepoint (hr) Value: 24
  misc_feature: MA Experiment 108597 PARAMETER Experiment Name: Zm_100uM_ABA_P Parameter: Tissue Value: Aerial
  misc_feature: MA Experiment 108597 PARAMETER Experiment Name: Zm_100uM_ABA_P Parameter: Treatment Value: 100uM ABA vs. No Treatment
  misc_feature: MA Experiment ID: 20000478 Result: Down-regulated in Transcription
  misc_feature: MA Experiment 20000478 PARAMETER Experiment Name: Zm_5mM_SA_P Parameter: Age (day) Value: 11
  misc_feature: MA Experiment 20000478 PARAMETER Experiment Name: Zm_5mM_SA_P Parameter: Organism Value: Zea mays
  misc_feature: MA Experiment 20000478 PARAMETER Experiment Name: Zm_5mM_SA_P Parameter: Plant Line Value: 35A19
  misc_feature: MA Experiment 20000478 PARAMETER Experiment Name: Zm_5mM_SA_P Parameter: Timepoint (hr) Value: 72
  misc_feature: MA Experiment 20000478 PARAMETER Experiment Name: Zm_5mM_SA_P Parameter: Tissue Value: Aerial
  misc_feature: MA Experiment 20000478 PARAMETER Experiment Name: Zm_5mM_SA_P Parameter: Treatment Value: 5mM SA vs. No Treatment
  misc_feature: MA Experiment ID: 20000479 Result: Down-regulated in Transcription
  misc_feature: MA Experiment 20000479 PARAMETER Experiment Name: Zm_Drought_P Parameter: Age (day) Value: 10
  misc_feature: MA Experiment 20000479 PARAMETER Experiment Name: Zm_Drought_P Parameter: Organism Value: Zea mays
  misc_feature: MA Experiment 20000479 PARAMETER Experiment Name: Zm_Drought_P Parameter: Plant Line Value: 35A19
  misc_feature: MA Experiment 20000479 PARAMETER Experiment Name: Zm_Drought_P Parameter: Timepoint (hr) Value: 48
  misc_feature: MA Experiment 20000479 PARAMETER Experiment Name: Zm_Drought_P Parameter: Tissue Value: Aerial
  misc_feature: MA Experiment 20000479 PARAMETER Experiment Name: Zm_Drought_P Parameter: Treatment Value: Drought vs. No Drought
  misc_feature: MA Experiment ID: 20000480 Result: Down-regulated in Transcription
  misc_feature: MA Experiment 20000480 PARAMETER Experiment Name: Zm_Drought_P Parameter: Age (day) Value: 11
  misc_feature: MA Experiment 20000480 PARAMETER Experiment Name: Zm_Drought_P Parameter: Organism Value: Zea mays
  misc_feature: MA Experiment 20000480 PARAMETER Experiment Name: Zm_Drought_P Parameter: Plant Line Value: 35A19
  misc_feature: MA Experiment 20000480 PARAMETER Experiment Name: Zm_Drought_P Parameter: Timepoint (hr) Value: 72
  misc_feature: MA Experiment 20000480 PARAMETER Experiment Name: Zm_Drought_P Parameter: Tissue Value: Aerial
  misc_feature: MA Experiment 20000480 PARAMETER Experiment Name: Zm_Drought_P Parameter: Treatment Value: Drought vs. No Drought
  misc_feature: MA Experiment ID: 20001608 Result: Down-regulated in Transcription
  misc_feature: MA Experiment 20001608 PARAMETER Experiment Name: Zm_50ppm_KNO3_L-to-H_P Parameter: Age (day) Value: 21
  misc_feature: MA Experiment 20001608 PARAMETER Experiment Name: Zm_50ppm_KNO3_L-to-H_P Parameter: Organism Value: Zea mays
  misc_feature: MA Experiment 20001608 PARAMETER Experiment Name: Zm_50ppm_KNO3_L-to-H_P Parameter: Plant Line Value: 35A19
  misc_feature: MA Experiment 20001608 PARAMETER Experiment Name: Zm_50ppm_KNO3_L-to-H_P Parameter: Timepoint (hr) Value: 48
  misc_feature: MA Experiment 20001608 PARAMETER Experiment Name: Zm_50ppm_KNO3_L-to-H_P Parameter: Tissue Value: Shoots
  misc_feature: MA Experiment 20001608 PARAMETER Experiment Name: Zm_50ppm_KNO3_L-to-H_P Parameter: Treatment Value: 50ppm KNO3 vs. 50ppm KCl
  misc_feature: MA Experiment ID: 20001610 Result: Down-regulated in Transcription
  misc_feature: MA Experiment 20001610 PARAMETER Experiment Name: Zm_50ppm_KNO3_L-to-H_P Parameter: Age (day) Value: 19
  misc_feature: MA Experiment 20001610 PARAMETER Experiment Name: Zm_50ppm_KNO3_L-to-H_P Parameter: Organism Value: Zea mays
  misc_feature: MA Experiment 20001610 PARAMETER Experiment Name: Zm_50ppm_KNO3_L-to-H_P Parameter: Plant Line Value: 35A19
  misc_feature: MA Experiment 20001610 PARAMETER Experiment Name: Zm_50ppm_KNO3_L-to-H_P Parameter: Timepoint (hr) Value: 2
  misc_feature: MA Experiment 20001610 PARAMETER Experiment Name: Zm_50ppm_KNO3_L-to-H_P Parameter: Tissue Value: Roots
  misc_feature: MA Experiment 20001610 PARAMETER Experiment Name: Zm_50ppm_KNO3_L-to-H_P Parameter: Treatment Value: 50ppm KNO3 vs. 50ppm KCl
  misc_feature: MA Experiment ID: 20001612 Result: Down-regulated in Transcription
  misc_feature: MA Experiment 20001612 PARAMETER Experiment Name: Zm_50ppm_KNO3_L-to-H_P Parameter: Age (day) Value: 19
  misc_feature: MA Experiment 20001612 PARAMETER Experiment Name: Zm_50ppm_KNO3_L-to-H_P Parameter: Organism Value: Zea mays
  misc_feature: MA Experiment 20001612 PARAMETER Experiment Name: Zm_50ppm_KNO3_L-to-H_P Parameter: Plant Line Value: 35A19
  misc_feature: MA Experiment 20001612 PARAMETER Experiment Name: Zm_50ppm_KNO3_L-to-H_P Parameter: Timepoint (hr) Value: 8
  misc_feature: MA Experiment 20001612 PARAMETER Experiment Name: Zm_50ppm_KNO3_L-to-H_P Parameter: Tissue Value: Roots
  misc_feature: MA Experiment 20001612 PARAMETER Experiment Name: Zm_50ppm_KNO3_L-to-H_P Parameter: Treatment Value: 50ppm KNO3 vs. 50ppm KCl
  misc_feature: MA Experiment ID: 20001613 Result: Down-regulated in Transcription
  misc_feature: MA Experiment 20001613 PARAMETER Experiment Name: Zm_50ppm_KNO3_L-to-H_P Parameter: Age (day) Value: 20
  misc_feature: MA Experiment 20001613 PARAMETER Experiment Name: Zm_50ppm_KNO3_L-to-H_P Parameter: Organism Value: Zea mays
  misc_feature: MA Experiment 20001613 PARAMETER Experiment Name: Zm_50ppm_KNO3_L-to-H_P Parameter: Plant Line Value: 35A19
  misc_feature: MA Experiment 20001613 PARAMETER Experiment Name: Zm_50ppm_KNO3_L-to-H_P Parameter: Timepoint (hr) Value: 24
  misc_feature: MA Experiment 20001613 PARAMETER Experiment Name: Zm_50ppm_KNO3_L-to-H_P Parameter: Tissue Value: Roots
  misc_feature: MA Experiment 20001613 PARAMETER Experiment Name: Zm_50ppm_KNO3_L-to-H_P Parameter: Treatment Value: 50ppm KNO3 vs. 50ppm KCl
  misc_feature: MA Experiment ID: 20001614 Result: Down-regulated in Transcription
  misc_feature: MA Experiment 20001614 PARAMETER Experiment Name: Zm_50ppm_KNO3_L-to-H_P Parameter: Age (day) Value: 21
  misc_feature: MA Experiment 20001614 PARAMETER Experiment Name: Zm_50ppm_KNO3_L-to-H_P Parameter: Organism Value: Zea mays
  misc_feature: MA Experiment 20001614 PARAMETER Experiment Name: Zm_50ppm_KNO3_L-to-H_P Parameter: Plant Line Value: 35A19
  misc_feature: MA Experiment 20001614 PARAMETER Experiment Name: Zm_50ppm_KNO3_L-to-H_P Parameter: Timepoint (hr) Value: 48
  misc_feature: MA Experiment 20001614 PARAMETER Experiment Name: Zm_50ppm_KNO3_L-to-H_P Parameter: Tissue Value: Roots
  misc_feature: MA Experiment 20001614 PARAMETER Experiment Name: Zm_50ppm_KNO3_L-to-H_P Parameter: Treatment Value: 50ppm KNO3 vs. 50ppm KCl
acaatccatgcggcggcatatggcgcccatcaaggagcaaaaacacacgacaagcgcagaacagcaggtgatgctggatgccgagctccagctgtggaaccacaccttcggctacgtcaagtccatggcgctcaaggccgcgatcgacctcggcatacccgaggccatccaccagcacggcggcacggccaccctcccacaaatagtcaccagggtcacgctccacccgtccaagacaccatgcctgcggcgcctcatgcgcgtgctcaccctcaccggcgtcttcggcgcgcaggaggcgcacgacgacgacggcggctgtgacgacgagctcgtctacacgctcacgccggcatcccgtctcctcgtcggctcaccggggcagaacgtgggccctttcctgaccgtgatgctcggccccatcttcatgtcgtccttcctcgacctccgcgggtggttccagcacgagacgccggacccgtcccccttcaagatgacgcacgggcgggacatatgggagctggccgcccacgacgccgccttcggcaggctcttcgacgccggcatggtcgctgacagcagcttcatcatggacgtcgtggtcagggagtgtggtggcgtgttcgaggggatcagctccctcgtcgacgtcgccggcgggctcggtggcgccacacagaccatcgcgaaggcgttcccgaacctggagtgcagcgtgctggatctcccaaacgtcgtcgccagcgctcccactgataccgccgtgaagtatgtcgccggtgacatgttcgagagcgttccggcggcagacgctgtcttcctcaagggtgatgccgactgtgtcaagatactgaagaactgcaagaaggccataccggctcaaggaggcaaggtgataatactggatatcgtggttggagcagggtcgtcatgcgaccggaagaatgtggagacgcaatgcttgtttgatctcttcatcatgtttatcaacggtgccgaacgagatgagcgacagtggaagaagatcatctttgaagctggctttacatcttacaagatcatacctgtcctaggcattagatccataattgaagtctgcctatagaaactaatataattaaggatgaaaacgggtcaggttcgggttgagttgagcaaaattctacccgggatggcatccttaaagtctacataaacccactcacgatcgtacccacgagtgcaattctaaacccgcacgtaaaccggtcaggtttgaggtattgtatacttttaaataataattcaactctctctactactgtacgtcacaccttttccttcgttcacctctccttgctcccccatatttaaatagtaataaagttaaaattattc

SEQ ID NO: 1508 - protein, 367 aa, Zea mays subsp. mays
  peptide (1)..(367): Ceres Seq. ID no. 12341433
  misc_feature (108)..(342): Pfam Name: O-methyltransferase Pfam Description: O-methyltransferase
  misc_feature (24)..(365): Homolog of NCBI NO: 453244 NR Description: flavonoid 7-O-methyltransferase [Hordeum vulgare
  misc_feature (24)..(365): Homolog of NCBI NO: 2130032 NR Description: catechol O-methyltransferase (EC 2.1.1.6) - barley
  misc_feature (13)..(365): Homolog of NCBI NO: 20514367 NR Description: orcinol O-methyltransferase [Rosa hybrid
  misc_feature (13)..(365): Homolog of NCBI NO: 20514369 NR Description: orcinol O-methyltransferase [Rosa hybrid
  misc_feature (25)..(365): Homolog of NCBI NO: 38175602 NR Description: putative catechol O-methyltransferase
  misc_feature (24)..(365): Homolog of NCBI NO: 4098238 NR Description: o-methyltransferase [Triticum aestivum]
  misc_feature (20)..(365): Homolog of NCBI NO: 22093735 NR Description: putative o-methyltransferase
  misc_feature (11)..(365): Homolog of NCBI NO: 37530600 NR Description: putative o-methyltransferase ZRP4
  misc_feature (24)..(365): Homolog of NCBI NO: 37530606 NR Description: putative o-methyltransferase ZRP4
  misc_feature (18)..(365): Homolog of NCBI NO: 1353193 NR Description: O-METHYLTRANSFERASE ZRP4 (OMT)
QSMRRHMAPIKEQKHTTSAEQQVMLDAELQLWNHTFGYVKSMALKAAIDLGIPEAIHQHGGTATLPQIVTRVTLHPSKTPCLRRLMRVLTLTGVFGAQEAHDDDGGCDDELVYTLTPASRLLVGSPGQNVGPFLTVMLGPIFMSSFLDLRGWFQHETPDPSPFKMTHGRDIWELAAHDAAFGRLFDAGMVADSSFIMDVVVRECGGVFEGISSLVDVAGGLGGATQTIAKAFPNLECSVLDLPNVVASAPTDTAVKYVAGDMFESVPAADAVFLKGDADCVKILKNCKKAIPAQGGKVIILDIVVGAGSSCDRKNVETQCLFDLFIMFINGAERDERQWKKIIFEAGFTSYKIIPVLGIRSIIEVCL

SEQ ID NO: 1509 - protein, 365 aa, Zea mays subsp. mays
  peptide (1)..(365): Ceres Seq. ID no. 12341434
  misc_feature (106)..(340): Pfam Name: O-methyltransferase Pfam Description: O-methyltransferase
  misc_feature (22)..(363): Homolog of NCBI NO: 453244 NR Description: flavonoid 7-O-methyltransferase [Hordeum vulgare
  misc_feature (22)..(363): Homolog of NCBI NO: 2130032 NR Description: catechol O-methyltransferase (EC 2.1.1.6) - barley
  misc_feature (11)..(363): Homolog of NCBI NO: 20514367 NR Description: orcinol O-methyltransferase [Rosa hybrid
  misc_feature (11)..(363): Homolog of NCBI NO: 20514369 NR Description: orcinol O-methyltransferase [Rosa hybrid
  misc_feature (23)..(363): Homolog of NCBI NO: 38175602 NR Description: putative catechol O-methyltransferase
  misc_feature (22)..(363): Homolog of NCBI NO: 4098238 NR Description: o-methyltransferase [Triticum aestivum]
  misc_feature (18)..(363): Homolog of NCBI NO: 22093735 NR Description: putative o-methyltransferase
  misc_feature (9)..(363): Homolog of NCBI NO: 37530600 NR Description: putative o-methyltransferase ZRP4
  misc_feature (22)..(363): Homolog of NCBI NO: 37530606 NR Description: putative o-methyltransferase ZRP4
  misc_feature (16)..(363): Homolog of NCBI NO: 1353193 NR Description: O-METHYLTRANSFERASE ZRP4 (OMT)
MRRHMAPIKEQKHTTSAEQQVMLDAELQLWNHTFGYVKSMALKAAIDLGIPEAIHQHGGTATLPQIVTRVTLHPSKTPCLRRLMRVLTLTGVFGAQEAHDDDGGCDDELVYTLTPASRLLVGSPGQNVGPFLTVMLGPIFMSSFLDLRGWFQHETPDPSPFKMTHGRDIWELAAHDAAFGRLFDAGMVADSSFIMDVVVRECGGVFEGISSLVDVAGGLGGATQTIAKAFPNLECSVLDLPNVVASAPTDTAVKYVAGDMFESVPAADAVFLKGDADCVKILKNCKKAIPAQGGKVIILDIVVGAGSSCDRKNVETQCLFDLFIMFINGAERDERQWKKIIFEAGFTSYKIIPVLGIRSIIEVCL

SEQ ID NO: 1510 - protein, 361 aa, Zea mays subsp. mays
  peptide (1)..(361): Ceres Seq. ID no. 12341435
  misc_feature (102)..(336): Pfam Name: O-methyltransferase Pfam Description: O-methyltransferase
  misc_feature (18)..(359): Homolog of NCBI NO: 453244 NR Description: flavonoid 7-O-methyltransferase [Hordeum vulgare
  misc_feature (18)..(359): Homolog of NCBI NO: 2130032 NR Description: catechol O-methyltransferase (EC 2.1.1.6) - barley
  misc_feature (7)..(359): Homolog of NCBI NO: 20514367 NR Description: orcinol O-methyltransferase [Rosa hybrid
  misc_feature (7)..(359): Homolog of NCBI NO: 20514369 NR Description: orcinol O-methyltransferase [Rosa hybrid
  misc_feature (19)..(359): Homolog of NCBI NO: 38175602 NR Description: putative catechol O-methyltransferase
  misc_feature (18)..(359): Homolog of NCBI NO: 4098238 NR Description: o-methyltransferase [Triticum aestivum]
  misc_feature (14)..(359): Homolog of NCBI NO: 22093735 NR Description: putative o-methyltransferase
  misc_feature (5)..(359): Homolog of NCBI NO: 37530600 NR Description: putative o-methyltransferase ZRP4
  misc_feature (18)..(359): Homolog of NCBI NO: 37530606 NR Description: putative o-methyltransferase ZRP4
  misc_feature (12)..(359): Homolog of NCBI NO: 1353193 NR Description: O-METHYLTRANSFERASE ZRP4 (OMT)
MAPIKEQKHTTSAEQQVMLDAELQLWNHTFGYVKSMALKAAIDLGIPEAIHQHGGTATLPQIVTRVTLHPSKTPCLRRLMRVLTLTGVFGAQEAHDDDGGCDDELVYTLTPASRLLVGSPGQNVGPFLTVMLGPIFMSSFLDLRGWFQHETPDPSPFKMTHGRDIWELAAHDAAFGRLFDAGMVADSSFIMDVVVRECGGVFEGISSLVDVAGGLGGATQTIAKAFPNLECSVLDLPNVVASAPTDTAVKYVAGDMFESVPAADAVFLKGDADCVKILKNCKKAIPAQGGKVIILDIVVGAGSSCDRKNVETQCLFDLFIMFINGAERDERQWKKIIFEAGFTSYKIIPVLGIRSIIEVCL

SEQ ID NO: 1511 - DNA, 1266 bp, Zea mays subsp. mays
  misc_feature (1)..(1266): Ceres Seq. ID no. 12405230
  misc_feature: MA Experiment ID: 108556 Result: Down-regulated in Transcription
  misc_feature: MA Experiment 108556 PARAMETER Experiment Name: Zm_Drought_P Parameter: Age (day) Value: 9
  misc_feature: MA Experiment 108556 PARAMETER Experiment Name: Zm_Drought_P Parameter: Organism Value: Zea mays
  misc_feature: MA Experiment 108556 PARAMETER Experiment Name: Zm_Drought_P Parameter: Plant Line Value: 35A19
  misc_feature: MA Experiment 108556 PARAMETER Experiment Name: Zm_Drought_P Parameter: Timepoint (hr) Value: 24
  misc_feature: MA Experiment 108556 PARAMETER Experiment Name: Zm_Drought_P Parameter: Tissue Value: Aerial
  misc_feature: MA Experiment 108556 PARAMETER Experiment Name: Zm_Drought_P Parameter: Treatment Value: Drought vs. No Drought
  misc_feature: MA Experiment ID: 20000477 Result: Down-regulated in Transcription
  misc_feature: MA Experiment 20000477 PARAMETER Experiment Name: Zm_5mM_SA_P Parameter: Age (day) Value: 10
  misc_feature: MA Experiment 20000477 PARAMETER Experiment Name: Zm_5mM_SA_P Parameter: Organism Value: Zea mays
  misc_feature: MA Experiment 20000477 PARAMETER Experiment Name: Zm_5mM_SA_P Parameter: Plant Line Value: 35A19
  misc_feature: MA Experiment 20000477 PARAMETER Experiment Name: Zm_5mM_SA_P Parameter: Timepoint (hr) Value: 48
  misc_feature: MA Experiment 20000477 PARAMETER Experiment Name: Zm_5mM_SA_P Parameter: Tissue Value: Aerial
  misc_feature: MA Experiment 20000477 PARAMETER Experiment Name: Zm_5mM_SA_P Parameter: Treatment Value: 5mM SA vs. No Treatment
  misc_feature: MA Experiment ID: 20000478 Result: Down-regulated in Transcription
  misc_feature: MA Experiment 20000478 PARAMETER Experiment Name: Zm_5mM_SA_P Parameter: Age (day) Value: 11
  misc_feature: MA Experiment 20000478 PARAMETER Experiment Name: Zm_5mM_SA_P Parameter: Organism Value: Zea mays
  misc_feature: MA Experiment 20000478 PARAMETER Experiment Name: Zm_5mM_SA_P Parameter: Plant Line Value: 35A19
  misc_feature: MA Experiment 20000478 PARAMETER Experiment Name: Zm_5mM_SA_P Parameter: Timepoint (hr) Value: 72
  misc_feature: MA Experiment 20000478 PARAMETER Experiment Name: Zm_5mM_SA_P Parameter: Tissue Value: Aerial
  misc_feature: MA Experiment 20000478 PARAMETER Experiment Name: Zm_5mM_SA_P Parameter: Treatment Value: 5mM SA vs. No Treatment
  misc_feature: MA Experiment ID: 20000479 Result: Down-regulated in Transcription
  misc_feature: MA Experiment 20000479 PARAMETER Experiment Name: Zm_Drought_P Parameter: Age (day) Value: 10
  misc_feature: MA Experiment 20000479 PARAMETER Experiment Name: Zm_Drought_P Parameter: Organism Value: Zea mays
  misc_feature: MA Experiment 20000479 PARAMETER Experiment Name: Zm_Drought_P Parameter: Plant Line Value: 35A19
  misc_feature: MA Experiment 20000479 PARAMETER Experiment Name: Zm_Drought_P Parameter: Timepoint (hr) Value: 48
  misc_feature: MA Experiment 20000479 PARAMETER Experiment Name: Zm_Drought_P Parameter: Tissue Value: Aerial
  misc_feature: MA Experiment 20000479 PARAMETER Experiment Name: Zm_Drought_P Parameter: Treatment Value: Drought vs. No Drought
  misc_feature: MA Experiment ID: 20000480 Result: Down-regulated in Transcription
  misc_feature: MA Experiment 20000480 PARAMETER Experiment Name: Zm_Drought_P Parameter: Age (day) Value: 11
  misc_feature: MA Experiment 20000480 PARAMETER Experiment Name: Zm_Drought_P Parameter: Organism Value: Zea mays
  misc_feature: MA Experiment 20000480 PARAMETER Experiment Name: Zm_Drought_P Parameter: Plant Line Value: 35A19
  misc_feature: MA Experiment 20000480 PARAMETER Experiment Name: Zm_Drought_P Parameter: Timepoint (hr) Value: 72
  misc_feature: MA Experiment 20000480 PARAMETER Experiment Name: Zm_Drought_P Parameter: Tissue Value: Aerial
  misc_feature: MA Experiment 20000480 PARAMETER Experiment Name: Zm_Drought_P Parameter: Treatment Value: Drought vs. No Drought
agttcctaccaactcccgttgttgcctacggcgattccaaattcccatctgccctcctgctgctccactccactccactccaggctcttttccctgctcctgtgggctgtggcgagcgcaaaccagcctcgcttcccaaaccctagctcctcgctctcccgcccgcgtggcctgccaggcaaccacccccggatcaactccgtacagcgtgcctccgcctcccggactccagcggcggcgggatgtggtctcactccaaggacttgctcgagatcgagcccctcgagctccgattcccattcgagacaaagaagcagatctcgtgctctatgcagttgacaaaccgaacagatgactacatcggctttaaggttaagacgacgagcccgaagaagtactgtgtccggcccaacagcggcatcgtgccacctcggtccaccagcgatgtcattgtgacaatgcaagcacaaaaggaggcgccaccggacatgcagtgcaaggacaagtttcttgtgcaaagtgtcgttgtggcggaagggaccttagtcaaggacatcactggcgatatgtttaccaaagaatcagctaatgtggtggatgaggttaagctgaaggtcgtctacatcccaccacccaaaccgccatccccagtgcatgaggaatctgaagaaggctcatcaccccgaccttcattgtccgatggaattaacttgaattatcaagagacaacgagggaatctgataagtcactgttgttctcggctgtaaaaactcatatagatcaaaaggactacacctccgagacatctgctttgatttcaaagttgacagaagagagaaactctgccattcagcagaacaataagcttcgagaggaactggaccttacgaggagggaagccaacaagcagaatggtggattctcctttgtggtcgtggtggccattgctctcctgggaatgctactgggatatatcatgaagagatagatgggctcataatgactcggcctcatgttagaccgttttcctcacagtattgaatattgtctaatgcacttatcacatgcacactgctactccatagcatattcatctggtgtcttacgtgatctgtttcgtgcttgggattgggatgactagtcaccagtcgcaacacaggctgtcaaacaatggtctgtgtgcttaatcttgttttagctgttatgttagtgtgtgcaactaaaactgggtaattaatgatgtcgttttggtcgaccgtttgtgc

SEQ ID NO: 1512 - protein, 248 aa, Zea mays subsp. mays
  peptide (1)..(248): Ceres Seq. ID no. 12405231
  misc_feature (5)..(142): Homolog of NCBI NO: 37535894 NR Description: putative vesicle-associated membrane protein
  misc_feature (7)..(248): Homolog of NCBI NO: 21592874 NR Description: putative proline-rich protein [Arabidopsis
  misc_feature (7)..(248): Homolog of NCBI NO: 18411240 NR Description: putative proline-rich protein
  misc_feature (1)..(248): Homolog of NCBI NO: 11288305 NR Description: hypothetical protein T4C21.10 - Arabidopsis
  misc_feature (5)..(248): Homolog of NCBI NO: 21554053 NR Description: putative VAMP-associated protein [Arabidopsis
  misc_feature (1)..(248): Homolog of NCBI NO: 18411661 NR Description: putative protein
  misc_feature (5)..(248): Homolog of NCBI NO: 15225415 NR Description: putative VAMP-associated protein
  misc_feature (1)..(248): Homolog of NCBI NO: 11288307 NR Description: 27k vesicle-associated membrane
  misc_feature (7)..(234): Homolog of NCBI NO: 7486542 NR Description: hypothetical protein F6N15.21 - Arabidopsis
  misc_feature (176)..(248): Homolog of NCBI NO: 37535894 NR Description: putative vesicle-associated membrane protein
MWSHSKDLLEIEPLELRFPFETKKQISCSMQLTNRTDDYIGFKVKTTSPKKYCVRPNSGIVPPRSTSDVIVTMQAQKEAPPDMQCKDKFLVQSVVVAEGTLVKDITGDMFTKESANVVDEVKLKVVYIPPPKPPSPVHEESEEGSSPRPSLSDGINLNYQETTRESDKSLLFSAVKTHIDQKDYTSETSALISKLTEERNSAIQQNNKLREELDLTRREANKQNGGFSFVVVVAIALLGMLLGYIMKR

SEQ ID NO: 1513 - protein, 219 aa, Zea mays subsp. mays
  peptide (1)..(219): Ceres Seq. ID no. 12405232
  misc_feature (1)..(205): Homolog of NCBI NO: 7486542 NR Description: hypothetical protein F6N15.21 - Arabidopsis
  misc_feature (147)..(219): Homolog of NCBI NO: 37535894 NR Description: putative vesicle-associated membrane protein
  misc_feature (1)..(113): Homolog of NCBI NO: 37535894 NR Description: putative vesicle-associated membrane protein
  misc_feature (1)..(219): Homolog of NCBI NO: 21592874 NR Description: putative proline-rich protein [Arabidopsis
  misc_feature (1)..(219): Homolog of NCBI NO: 18411240 NR Description: putative proline-rich protein
  misc_feature (1)..(219): Homolog of NCBI NO: 11288305 NR Description: hypothetical protein T4C21.10 - Arabidopsis
  misc_feature (1)..(219): Homolog of NCBI NO: 21554053 NR Description: putative VAMP-associated protein [Arabidopsis
  misc_feature (1)..(219): Homolog of NCBI NO: 18411661 NR Description: putative protein
  misc_feature (1)..(219): Homolog of NCBI NO: 15225415 NR Description: putative VAMP-associated protein
  misc_feature (1)..(219): Homolog of NCBI NO: 11288307 NR Description: 27k vesicle-associated membrane
MQLTNRTDDYIGFKVKTTSPKKYCVRPNSGIVPPRSTSDVIVTMQAQKEAPPDMQCKDKFLVQSVVVAEGTLVKDITGDMFTKESANVVDEVKLKVVYIPPPKPPSPVHEESEEGSSPRPSLSDGINLNYQETTRESDKSLLFSAVKTHIDQKDYTSETSALISKLTEERNSAIQQNNKLREELDLTRREANKQNGGFSFVVVVAIALLGMLLGYIMKR

SEQ ID NO: 1514 - protein, 176 aa, Zea mays subsp. mays
  peptide (1)..(176): Ceres Seq. ID no. 12405233
  misc_feature (1)..(162): Homolog of NCBI NO: 7486542 NR Description: hypothetical protein F6N15.21 - Arabidopsis
  misc_feature (104)..(176): Homolog of NCBI NO: 37535894 NR Description: putative vesicle-associated membrane protein
  misc_feature (1)..(70): Homolog of NCBI NO: 37535894 NR Description: putative vesicle-associated membrane protein
  misc_feature (1)..(176): Homolog of NCBI NO: 21592874 NR Description: putative proline-rich protein [Arabidopsis
  misc_feature (1)..(176): Homolog of NCBI NO: 18411240 NR Description: putative proline-rich protein
  misc_feature (1)..(176): Homolog of NCBI NO: 11288305 NR Description: hypothetical protein T4C21.10 - Arabidopsis
  misc_feature (1)..(176): Homolog of NCBI NO: 21554053 NR Description: putative VAMP-associated protein [Arabidopsis
  misc_feature (1)..(176): Homolog of NCBI NO: 18411661 NR Description: putative protein
  misc_feature (1)..(176): Homolog of NCBI NO: 15225415 NR Description: putative VAMP-associated protein
  misc_feature (1)..(176): Homolog of NCBI NO: 11288307 NR Description: 27k vesicle-associated membrane
MQAQKEAPPDMQCKDKFLVQSVVVAEGTLVKDITGDMFTKESANVVDEVKLKVVYIPPPKPPSPVHEESEEGSSPRPSLSDGINLNYQETTRESDKSLLFSAVKTHIDQKDYTSETSALISKLTEERNSAIQQNNKLREELDLTRREANKQNGGFSFVVVVAIALLGMLLGYIMKR

SEQ ID NO: 1515 - DNA, 1764 bp, Zea mays subsp. mays
  misc_feature (1)..(1764): Ceres Seq. ID no. 13636367
  misc_feature: MA Experiment ID: 108535 Result: Up-regulated in Transcription
  misc_feature: MA Experiment 108535 PARAMETER Experiment Name: Zm_Meristem_P Parameter: Age (day) Value: 8
  misc_feature: MA Experiment 108535 PARAMETER Experiment Name: Zm_Meristem_P Parameter: Organism Value: Zea mays
  misc_feature: MA Experiment 108535 PARAMETER Experiment Name: Zm_Meristem_P Parameter: Plant Line Value: 35A19
  misc_feature: MA Experiment 108535 PARAMETER Experiment Name: Zm_Meristem_P Parameter: Tissue Value: Root Meristem vs. Above Root Meristem
  misc_feature: MA Experiment ID: 108544 Result: Down-regulated in Transcription
  misc_feature: MA Experiment ID: 108556 Result: Down-regulated in Transcription
  misc_feature: MA Experiment 108556 PARAMETER Experiment Name: Zm_Drought_P Parameter: Age (day) Value: 9
  misc_feature: MA Experiment 108556 PARAMETER Experiment Name: Zm_Drought_P Parameter: Organism Value: Zea mays
  misc_feature: MA Experiment 108556 PARAMETER Experiment Name: Zm_Drought_P Parameter: Plant Line Value: 35A19
  misc_feature: MA Experiment 108556 PARAMETER Experiment Name: Zm_Drought_P Parameter: Timepoint (hr) Value: 24
  misc_feature: MA Experiment 108556 PARAMETER Experiment Name: Zm_Drought_P Parameter: Tissue Value: Aerial
  misc_feature: MA Experiment 108556 PARAMETER Experiment Name: Zm_Drought_P Parameter: Treatment Value: Drought vs. No Drought
  misc_feature: MA Experiment ID: 108689 Result: Up-regulated in Transcription
  misc_feature: MA Experiment 108689 PARAMETER Experiment Name: Zm_Drought_Roots_P Parameter: Age (day) Value: 9
  misc_feature: MA Experiment 108689 PARAMETER Experiment Name: Zm_Drought_Roots_P Parameter: Organism Value: Zea mays
  misc_feature: MA Experiment 108689 PARAMETER Experiment Name: Zm_Drought_Roots_P Parameter: Plant Line Value: 35A19
  misc_feature: MA Experiment 108689 PARAMETER Experiment Name: Zm_Drought_Roots_P Parameter: Timepoint (hr) Value: 24
  misc_feature: MA Experiment 108689 PARAMETER Experiment Name: Zm_Drought_Roots_P Parameter: Tissue Value: Roots
  misc_feature: MA Experiment 108689 PARAMETER Experiment Name: Zm_Drought_Roots_P Parameter: Treatment Value: Drought vs. No Drought
  misc_feature: MA Experiment ID: 20000477 Result: Down-regulated in Transcription
  misc_feature: MA Experiment 20000477 PARAMETER Experiment Name: Zm_5mM_SA_P Parameter: Age (day) Value: 10
  misc_feature: MA Experiment 20000477 PARAMETER Experiment Name: Zm_5mM_SA_P Parameter: Organism Value: Zea mays
  misc_feature: MA Experiment 20000477 PARAMETER Experiment Name: Zm_5mM_SA_P Parameter: Plant Line Value: 35A19
  misc_feature: MA Experiment 20000477 PARAMETER Experiment Name: Zm_5mM_SA_P Parameter: Timepoint (hr) Value: 48
  misc_feature: MA Experiment 20000477 PARAMETER Experiment Name: Zm_5mM_SA_P Parameter: Tissue Value: Aerial
  misc_feature: MA Experiment 20000477 PARAMETER Experiment Name: Zm_5mM_SA_P Parameter: Treatment Value: 5mM SA vs. No Treatment
  misc_feature: MA Experiment ID: 20000478 Result: Down-regulated in Transcription
  misc_feature: MA Experiment 20000478 PARAMETER Experiment Name: Zm_5mM_SA_P Parameter: Age (day) Value: 11
  misc_feature: MA Experiment 20000478 PARAMETER Experiment Name: Zm_5mM_SA_P Parameter: Organism Value: Zea mays
  misc_feature: MA Experiment 20000478 PARAMETER Experiment Name: Zm_5mM_SA_P Parameter: Plant Line Value: 35A19
  misc_feature: MA Experiment 20000478 PARAMETER Experiment Name: Zm_5mM_SA_P Parameter: Timepoint (hr) Value: 72
  misc_feature: MA Experiment 20000478 PARAMETER Experiment Name: Zm_5mM_SA_P Parameter: Tissue Value: Aerial
  misc_feature: MA Experiment 20000478 PARAMETER Experiment Name: Zm_5mM_SA_P Parameter: Treatment Value: 5mM SA vs. No Treatment
  misc_feature: MA Experiment ID: 20000479 Result: Down-regulated in Transcription
  misc_feature: MA Experiment 20000479 PARAMETER Experiment Name: Zm_Drought_P Parameter: Age (day) Value: 10
  misc_feature: MA Experiment 20000479 PARAMETER Experiment Name: Zm_Drought_P Parameter: Organism Value: Zea mays
  misc_feature: MA Experiment 20000479 PARAMETER Experiment Name: Zm_Drought_P Parameter: Plant Line Value: 35A19
  misc_feature: MA Experiment 20000479 PARAMETER Experiment Name: Zm_Drought_P Parameter: Timepoint (hr) Value: 48
  misc_feature: MA Experiment 20000479 PARAMETER Experiment Name: Zm_Drought_P Parameter: Tissue Value: Aerial
  misc_feature: MA Experiment 20000479 PARAMETER Experiment Name: Zm_Drought_P Parameter: Treatment Value: Drought vs. No Drought
  misc_feature: MA Experiment ID: 20000480 Result: Down-regulated in Transcription
  misc_feature: MA Experiment 20000480 PARAMETER Experiment Name: Zm_Drought_P Parameter: Age (day) Value: 11
  misc_feature: MA Experiment 20000480 PARAMETER Experiment Name: Zm_Drought_P Parameter: Organism Value: Zea mays
  misc_feature: MA Experiment 20000480 PARAMETER Experiment Name: Zm_Drought_P Parameter: Plant Line Value: 35A19
  misc_feature: MA Experiment 20000480 PARAMETER Experiment Name: Zm_Drought_P Parameter: Timepoint (hr) Value: 72
  misc_feature: MA Experiment 20000480 PARAMETER Experiment Name: Zm_Drought_P Parameter: Tissue Value: Aerial
  misc_feature: MA Experiment 20000480 PARAMETER Experiment Name: Zm_Drought_P Parameter: Treatment Value: Drought vs. No Drought
  misc_feature: MA Experiment ID: 20000535 Result: Up-regulated in Transcription
  misc_feature: MA Experiment 20000535 PARAMETER Experiment Name: Zm_Hybrid_Seed_Dev_P Parameter: DAP Value: 30 vs. 12
  misc_feature: MA Experiment 20000535 PARAMETER Experiment Name: Zm_Hybrid_Seed_Dev_P Parameter: Organism Value: Zea mays
  misc_feature: MA Experiment 20000535 PARAMETER Experiment Name: Zm_Hybrid_Seed_Dev_P Parameter: Plant Line Value: 35A19
  misc_feature: MA Experiment 20000535 PARAMETER Experiment Name: Zm_Hybrid_Seed_Dev_P Parameter: Tissue Value: Embryo vs. Unfert Floret
  misc_feature: MA Experiment ID: 20001610 Result: Up-regulated in Transcription
  misc_feature: MA Experiment 20001610 PARAMETER Experiment Name: Zm_50ppm_KNO3_L-to-H_P Parameter: Age (day) Value: 19
  misc_feature: MA Experiment 20001610 PARAMETER Experiment Name: Zm_50ppm_KNO3_L-to-H_P Parameter: Organism Value: Zea mays
  misc_feature: MA Experiment 20001610 PARAMETER Experiment Name: Zm_50ppm_KNO3_L-to-H_P Parameter: Plant Line Value: 35A19
  misc_feature: MA Experiment 20001610 PARAMETER Experiment Name: Zm_50ppm_KNO3_L-to-H_P Parameter: Timepoint (hr) Value: 2
  misc_feature: MA Experiment 20001610 PARAMETER Experiment Name: Zm_50ppm_KNO3_L-to-H_P Parameter: Tissue Value: Roots
  misc_feature: MA Experiment 20001610 PARAMETER Experiment Name: Zm_50ppm_KNO3_L-to-H_P Parameter: Treatment Value: 50ppm KNO3 vs. 50ppm KCl
aaccgaggcggtcaggctccctcctccttcctcctccctgcaaatcctgcaggcaccaccgctcgttttcctgtccgggggacaggagagaaggggagagaccgagagagggtgaggcgcggcgtccgcccgatctgctccgccccccgaagcagcctgtcacgtcgtcctcactctcagcaaccagcgaaaatgggtgccggaggcaggatgaccgagaaggagcgggagaagcatgagcaggagcaggtcgcccgtgctaccggcggtggcgcggcagtgcagcggtcgccggtggagaagccgccgttcacgttggggcagatcaagaaggcgatcccgccgcactgcttcgagcgctccgtgctgaggtccttctcgtacgtggcccacgacctgtcgctcgccgcggcgctcctctacctcgcggtggccgtgataccggcgctaccctgcccgctccgctacgcggcctggccgctgtactgggtggcccaggggtgcgtgtgcacgggcgtgtgggtgatcgcgcacgagtgcggccaccacgccttctccgaccacgcgctcctggacgacgccgtcggcctggcgctgcactcggcgctgctggtgccctacttctcgtggaagtacagccaccggcgccaccactccaacacggggtccctggagcgcgacgaggtgttcgtgccgaggaccaaggaggcgctgccgtggtacgccccgtacgtgcacggcagccccgcgggccggctggcgcacgtcgccgtgcagctcaccctgggctggccgctgtacctggccaccaacgcgtcggggcgcccgtacccgcgcttcgcctgccacttcgacccctacggcccgatctacggcgaccgggagcgcgcccagatcttcgtctcggacgccggcgtcgcggccgtggcgttcgggctgtacaagctggcggcggcgttcgggctctggtgggtggtgcgcgtgtacgccgtgccgctgctgatcgtcaacgcgtggctggtgctcatcacgtacctgcagcacacccacccggcgctgccccactacgactcgggcgagtgggactggctgcgcggcgcgctcgccaccgtcgaccgagactacggcgtcctcaaccgcgtgttccaccacatcacggacacgcacgtcgcgcaccacctcttctccaccatgccgcactaccacgccgtggaggccaccagggcgatcaggcccgtcctcggcgagtactaccagttcgacccgacccctgtcgccaaggccacctggcgcgaggccagggagtgcatctacgtcgagcctgagaaccgcaaccgcaagggcgtcttctggtacaacagcaagttctagccgccgcttgctttttccctaggaatgggaggagaaatcaggatgagaagatggtaatgtctgcatctacctgtctaatggttagtcaccagtctttagacaggaagagagcatttgggcttcagaaaaggaggcttactgcactactgcagtgccatcgctagatttaaggcaaattcagtgtgtctgtgcccatggctgtgagctttgggtactctcaagtagtcaagttctcttgtttttgtttttagtcgtcgctgttgtaggcttgccggcggcggtcgttgcgtggccgcgccttgtcgtgtgcgtcttgccatctcttcgtgctcccttcgtgttgttgtaaaacactagtctggtgtctttggcggaataacagatcgtcgaacg

SEQ ID NO: 1516 - protein, 456 aa, Zea mays subsp. mays
  peptide (1)..(456): Ceres Seq. ID no. 13636368
  misc_feature (162)..(414): Pfam Name: Fatty acid desaturase Pfam Description: Fatty acid desaturase
  misc_feature (162)..(414): Pfam Name: Fatty acid desaturase Pfam Description: Fatty acid desaturase
  misc_feature (65)..(452): Homolog of NCBI NO: 28371827 NR Description: delta-12 oleate desaturase [Punica granatum]
  misc_feature (65)..(452): Homolog of NCBI NO: 28564441 NR Description: delta 12-acyl-lipid-desaturase [Punica granatum]
  misc_feature (65)..(456): Homolog of NCBI NO: 27261181 NR Description: delta 12 oleic acid desaturase FAD2 [Vernicia
  misc_feature (65)..(456): Homolog of NCBI NO: 34903462 NR Description: putative omega-6 fatty acid desaturase [Oryza
  misc_feature (65)..(456): Homolog of NCBI NO: 8886726 NR Description: omega-6 fatty acid desaturase [Sesamum indicum]
  misc_feature (65)..(452): Homolog of NCBI NO: 28564441 NR Description: delta 12-acyl-lipid-desaturase [Punica granatum]
  misc_feature (65)..(456): Homolog of NCBI NO: 34903462 NR Description: putative omega-6 fatty acid desaturase [Oryza
  misc_feature (248)..(455): Homolog of NCBI NO: 32421083 NR Description: hypothetical protein [Neurospora crassa]
  misc_feature (65)..(455): Homolog of NCBI NO: 17225582 NR Description: delta-12 fatty acid desaturase [Gossypium
  misc_feature (65)..(455): Homolog of NCBI NO: 7433295 NR Description: omega-6 desaturase, microsomal - upland cotton
  misc_feature (65)..(455): Homolog of NCBI NO: 4378875 NR Description: delta-12 desaturase [Brassica carinata]
  misc_feature (65)..(455): Homolog of NCBI NO: 1345977 NR Description: Omega-6 fatty acid desaturase, endoplasmic
  misc_feature (65)..(456): Homolog of NCBI NO: 8886726 NR Description: omega-6 fatty acid desaturase [Sesamum indicum]
  misc_feature (65)..(456): Homolog of NCBI NO: 27261181 NR Description: delta 12 oleic acid desaturase FAD2 [Vernicia
  misc_feature (65)..(452): Homolog of NCBI NO: 28371827 NR Description: delta-12 oleate desaturase [Punica granatum]
  misc_feature (65)..(455): Homolog of NCBI NO: 1345977 NR Description: Omega-6 fatty acid desaturase, endoplasmic
  misc_feature (65)..(455): Homolog of NCBI NO: 4378875 NR Description: delta-12 desaturase [Brassica carinata]
  misc_feature (65)..(455): Homolog of NCBI NO: 7433295 NR Description: omega-6 desaturase, microsomal - upland cotton
  misc_feature (65)..(455): Homolog of NCBI NO: 17225582 NR Description: delta-12 fatty acid desaturase [Gossypium
  misc_feature (248)..(455): Homolog of NCBI NO: 32421083 NR Description: hypothetical protein [Neurospora crassa]
NRGGQAPSSFLLPANPAGTTARFPVRGTGEKGRDRERVRRGVRPICSAPRSSLSRRPHSQQPAKMGAGGRMTEKEREKHEQEQVARATGGGAAVQRSPVEKPPFTLGQIKKAIPPHCFERSVLRSFSYVAHDLSLAAALLYLAVAVIPALPCPLRYAAWPLYWVAQGCVCTGVWVIAHECGHHAFSDHALLDDAVGLALHSALLVPYFSWKYSHRRHHSNTGSLERDEVFVPRTKEALPWYAPYVHGSPAGRLAHVAVQLTLGWPLYLATNASGRPYPRFACHFDPYGPIYGDRERAQIFVSDAGVAAVAFGLYKLAAAFGLWWVVRVYAVPLLIVNAWLVLITYLQHTHPALPHYDSGEWDWLRGALATVDRDYGVLNRVFHHITDTHVAHHLFSTMPHYHAVEATRAIRPVLGEYYQFDPTPVAKATWREARECIYVEPENRNRKGVFWYNSKF

SEQ ID NO: 1517 - protein, 392 aa, Zea mays subsp. mays
  peptide (1)..(392): Ceres Seq. ID no. 13636369
  misc_feature (98)..(350): Pfam Name: Fatty acid desaturase Pfam Description: Fatty acid desaturase
  misc_feature (98)..(350): Pfam Name: Fatty acid desaturase Pfam Description: Fatty acid desaturase
  misc_feature (1)..(388): Homolog of NCBI NO: 28371827 NR Description: delta-12 oleate desaturase [Punica granatum]
  misc_feature (1)..(388): Homolog of NCBI NO: 28564441 NR Description: delta 12-acyl-lipid-desaturase [Punica granatum]
  misc_feature (1)..(392): Homolog of NCBI NO: 27261181 NR Description: delta 12 oleic acid desaturase FAD2 [Vernicia
  misc_feature (1)..(392): Homolog of NCBI NO: 34903462 NR Description: putative omega-6 fatty acid desaturase [Oryza
  misc_feature (1)..(392): Homolog of NCBI NO: 8886726 NR Description: omega-6 fatty acid desaturase [Sesamum indicum]
  misc_feature (1)..(388): Homolog of NCBI NO: 28564441 NR Description: delta 12-acyl-lipid-desaturase [Punica granatum]
  misc_feature (1)..(392): Homolog of NCBI NO: 34903462 NR Description: putative omega-6 fatty acid desaturase [Oryza
  misc_feature (184)..(391): Homolog of NCBI NO: 32421083 NR Description: hypothetical protein [Neurospora crassa]
  misc_feature (1)..(391): Homolog of NCBI NO: 17225582 NR Description: delta-12 fatty acid desaturase [Gossypium
  misc_feature (1)..(391): Homolog of NCBI NO: 7433295 NR Description: omega-6 desaturase, microsomal - upland cotton
  misc_feature (1)..(391): Homolog of NCBI NO: 4378875 NR Description: delta-12 desaturase [Brassica carinata]
  misc_feature (1)..(391): Homolog of NCBI NO: 1345977 NR Description: Omega-6 fatty acid desaturase, endoplasmic
  misc_feature (1)..(392): Homolog of NCBI NO: 8886726 NR Description: omega-6 fatty acid desaturase [Sesamum indicum]
  misc_feature (1)..(392): Homolog of NCBI NO: 27261181 NR Description: delta 12 oleic acid desaturase FAD2 [Vernicia
  misc_feature (1)..(388): Homolog of NCBI NO: 28371827 NR Description: delta-12 oleate desaturase [Punica granatum]
  misc_feature (1)..(391): Homolog of NCBI NO: 1345977 NR Description: Omega-6 fatty acid desaturase, endoplasmic
  misc_feature (1)..(391): Homolog of NCBI NO: 4378875 NR Description: delta-12 desaturase [Brassica carinata]
  misc_feature (1)..(391): Homolog of NCBI NO: 7433295 NR Description: omega-6 desaturase, microsomal - upland cotton
  misc_feature (1)..(391): Homolog of NCBI NO: 17225582 NR Description: delta-12 fatty acid desaturase [Gossypium
  misc_feature (184)..(391): Homolog of NCBI NO: 32421083 NR Description: hypothetical protein [Neurospora crassa]
MGAGGRMTEKEREKHEQEQVARATGGGAAVQRSPVEKPPFTLGQIKKAIPPHCFERSVLRSFSYVAHDLSLAAALLYLAVAVIPALPCPLRYAAWPLYWVAQGCVCTGVWVIAHECGHHAFSDHALLDDAVGLALHSALLVPYFSWKYSHRRHHSNTGSLERDEVFVPRTKEALPWYAPYVHGSPAGRLAHVAVQLTLGWPLYLATNASGRPYPRFACHFDPYGPIYGDRERAQIFVSDAGVAAVAFGLYKLAAAFGLWWVVRVYAVPLLIVNAWLVLITYLQHTHPALPHYDSGEWDWLRGALATVDRDYGVLNRVFHHITDTHVAHHLFSTMPHYHAVEATRAIRPVLGEYYQFDPTPVAKATWREARECIYVEPENRNRKGVFWYNSKF

SEQ ID NO: 1518 - protein, 386 aa, Zea mays subsp. mays
  peptide (1)..(386): Ceres Seq. ID no. 13636370
  misc_feature (92)..(344): Pfam Name: Fatty acid desaturase Pfam Description: Fatty acid desaturase
  misc_feature (92)..(344): Pfam Name: Fatty acid desaturase Pfam Description: Fatty acid desaturase
  misc_feature (1)..(382): Homolog of NCBI NO: 28371827 NR Description: delta-12 oleate desaturase [Punica granatum]
  misc_feature (1)..(382): Homolog of NCBI NO: 28564441 NR Description: delta 12-acyl-lipid-desaturase [Punica granatum]
  misc_feature (1)..(386): Homolog of NCBI NO: 27261181 NR Description: delta 12 oleic acid desaturase FAD2 [Vernicia
  misc_feature (1)..(386): Homolog of NCBI NO: 34903462 NR Description: putative omega-6 fatty acid desaturase [Oryza
  misc_feature (1)..(386): Homolog of NCBI NO: 8886726 NR Description: omega-6 fatty acid desaturase [Sesamum indicum]
  misc_feature (1)..(382): Homolog of NCBI NO: 28564441 NR Description: delta 12-acyl-lipid-desaturase [Punica granatum]
  misc_feature (1)..(386): Homolog of NCBI NO: 34903462 NR Description: putative omega-6 fatty acid desaturase [Oryza
  misc_feature (178)..(385): Homolog of NCBI NO: 32421083 NR Description: hypothetical protein [Neurospora crassa]
  misc_feature (1)..(385): Homolog of NCBI NO: 17225582 NR Description: delta-12 fatty acid desaturase [Gossypium
  misc_feature (1)..(385): Homolog of NCBI NO: 7433295 NR Description: omega-6 desaturase, microsomal - upland cotton
  misc_feature (1)..(385): Homolog of NCBI NO: 4378875 NR Description: delta-12 desaturase [Brassica carinata]
  misc_feature (1)..(385): Homolog of NCBI NO: 1345977 NR Description: Omega-6 fatty acid desaturase, endoplasmic
  misc_feature (1)..(386): Homolog of NCBI NO: 8886726 NR Description: omega-6 fatty acid desaturase [Sesamum indicum]
  misc_feature (1)..(386): Homolog of NCBI NO: 27261181 NR Description: delta 12 oleic acid desaturase FAD2 [Vernicia
  misc_feature (1)..(382): Homolog of NCBI NO: 28371827 NR Description: delta-12 oleate desaturase [Punica granatum]
  misc_feature (1)..(385): Homolog of NCBI NO: 1345977 NR Description: Omega-6 fatty acid desaturase, endoplasmic
  misc_feature (1)..(385): Homolog of NCBI NO: 4378875 NR Description: delta-12 desaturase [Brassica carinata]
  misc_feature (1)..(385): Homolog of NCBI NO: 7433295 NR Description: omega-6 desaturase, microsomal - upland cotton
  misc_feature (1)..(385): Homolog of NCBI NO: 17225582 NR Description: delta-12 fatty acid desaturase [Gossypium
  misc_feature (178)..(385): Homolog of NCBI NO: 32421083 NR Description: hypothetical protein [Neurospora crassa]
MTEKEREKHEQEQVARATGGGAAVQRSPVEKPPFTLGQIKKAIPPHCFERSVLRSFSYVAHDLSLAAALLYLAVAVIPALPCPLRYAAWPLYWVAQGCVCTGVWVIAHECGHHAFSDHALLDDAVGLALHSALLVPYFSWKYSHRRHHSNTGSLERDEVFVPRTKEALPWYAPYVHGSPAGRLAHVAVQLTLGWPLYLATNASGRPYPRFACHFDPYGPIYGDRERAQIFVSDAGVAAVAFGLYKLAAAFGLWWVVRVYAVPLLIVNAWLVLITYLQHTHPALPHYDSGEWDWLRGALATVDRDYGVLNRVFHHITDTHVAHHLFSTMPHYHAVEATRAIRPVLGEYYQFDPTPVAKATWREARECIYVEPENRNRKGVFWYNSKF

SEQ ID NO: 1519 - DNA, 1677 bp, Zea mays subsp. mays
  misc_feature (1)..(1677): Ceres Seq. ID no. 13498877
  misc_feature: MA Experiment ID: 108523 Result: Up-regulated in Transcription
  misc_feature: MA Experiment 108523 PARAMETER Experiment Name: Zm_42deg_Heat_P Parameter: Age (day) Value: 8
  misc_feature: MA Experiment 108523 PARAMETER Experiment Name: Zm_42deg_Heat_P Parameter: Organism Value: Zea mays
  misc_feature: MA Experiment 108523 PARAMETER Experiment Name: Zm_42deg_Heat_P Parameter: Plant Line Value: 35A19
  misc_feature: MA Experiment 108523 PARAMETER Experiment Name: Zm_42deg_Heat_P Parameter: Temperature (deg C) Value: 42 vs. 22
  misc_feature: MA Experiment 108523 PARAMETER Experiment Name: Zm_42deg_Heat_P Parameter: Timepoint (hr) Value: 6
  misc_feature: MA Experiment 108523 PARAMETER Experiment Name: Zm_42deg_Heat_P Parameter: Tissue Value: Aerial
  misc_feature: MA Experiment ID: 108527 Result: Up-regulated in Transcription
  misc_feature: MA Experiment 108527 PARAMETER Experiment Name: Zm_5mM_NO_P Parameter: Age (day) Value: 8
  misc_feature: MA Experiment 108527 PARAMETER Experiment Name: Zm_5mM_NO_P Parameter: Organism Value: Zea mays
  misc_feature: MA Experiment 108527 PARAMETER Experiment Name: Zm_5mM_NO_P Parameter: Plant Line Value: 35A19
  misc_feature: MA Experiment 108527 PARAMETER Experiment Name: Zm_5mM_NO_P Parameter: Timepoint (hr) Value: 6
  misc_feature: MA Experiment 108527 PARAMETER Experiment Name: Zm_5mM_NO_P Parameter: Tissue Value: Aerial
  misc_feature: MA Experiment 108527 PARAMETER Experiment Name: Zm_5mM_NO_P Parameter: Treatment Value: 5mM NO vs. No Treatment
  misc_feature: MA Experiment ID: 108534 Result: Up-regulated in Transcription
  misc_feature: MA Experiment 108534 PARAMETER Experiment Name: Zm_4deg_Cold_P Parameter: Age (hr) Value: 8
  misc_feature: MA Experiment 108534 PARAMETER Experiment Name: Zm_4deg_Cold_P Parameter: Organism Value: Zea mays
  misc_feature: MA Experiment 108534 PARAMETER Experiment Name: Zm_4deg_Cold_P Parameter: Plant Line Value: 35A19
  misc_feature: MA Experiment 108534 PARAMETER Experiment Name: Zm_4deg_Cold_P Parameter: Temperature (deg C) Value: 4 vs. 22
  misc_feature: MA Experiment 108534 PARAMETER Experiment Name: Zm_4deg_Cold_P Parameter: Timepoint (hr) Value: 6
  misc_feature: MA Experiment 108534 PARAMETER Experiment Name: Zm_4deg_Cold_P Parameter: Tissue Value: Aerial
  misc_feature: MA Experiment ID: 108556 Result: Up-regulated in Transcription
  misc_feature: MA Experiment 108556 PARAMETER Experiment Name: Zm_Drought_P Parameter: Age (day) Value: 9
  misc_feature: MA Experiment 108556 PARAMETER Experiment Name: Zm_Drought_P Parameter: Organism Value: Zea mays
  misc_feature: MA Experiment 108556 PARAMETER Experiment Name: Zm_Drought_P Parameter: Plant Line Value: 35A19
  misc_feature: MA Experiment 108556 PARAMETER Experiment Name: Zm_Drought_P Parameter: Timepoint (hr) Value: 24
  misc_feature: MA Experiment 108556 PARAMETER Experiment Name: Zm_Drought_P Parameter: Tissue Value: Aerial
  misc_feature: MA Experiment 108556 PARAMETER Experiment Name: Zm_Drought_P Parameter: Treatment Value: Drought vs. No Drought
  misc_feature: MA Experiment ID: 108559 Result: Up-regulated in Transcription
  misc_feature: MA Experiment 108559 PARAMETER Experiment Name: Zm_5mM_NO_P Parameter: Age (day) Value: 8
  misc_feature: MA Experiment 108559 PARAMETER Experiment Name: Zm_5mM_NO_P Parameter: Organism Value: Zea mays
  misc_feature: MA Experiment 108559 PARAMETER Experiment Name: Zm_5mM_NO_P Parameter: Plant Line Value: 35A19
  misc_feature: MA Experiment 108559 PARAMETER Experiment Name: Zm_5mM_NO_P Parameter: Timepoint (hr) Value: 12
  misc_feature: MA Experiment 108559 PARAMETER Experiment Name: Zm_5mM_NO_P Parameter: Tissue Value: Aerial
  misc_feature: MA Experiment 108559 PARAMETER Experiment Name: Zm_5mM_NO_P Parameter: Treatment Value: 5mM NO vs. No Treatment
  misc_feature: MA Experiment ID: 108597 Result: Up-regulated in Transcription
  misc_feature: MA Experiment 108597 PARAMETER Experiment Name: Zm_100uM_ABA_P Parameter: Age (day) Value: 9
  misc_feature: MA Experiment 108597 PARAMETER Experiment Name: Zm_100uM_ABA_P Parameter: Organism Value: Zea mays
  misc_feature: MA Experiment 108597 PARAMETER Experiment Name: Zm_100uM_ABA_P Parameter: Plant Line Value: 35A19
  misc_feature: MA Experiment 108597 PARAMETER Experiment Name: Zm_100uM_ABA_P Parameter: Timepoint (hr) Value: 24
  misc_feature: MA Experiment 108597 PARAMETER Experiment Name: Zm_100uM_ABA_P Parameter: Tissue Value: Aerial
  misc_feature: MA Experiment 108597 PARAMETER Experiment Name: Zm_100uM_ABA_P Parameter: Treatment Value: 100uM ABA vs. No Treatment
  misc_feature: MA Experiment ID: 20000532 Result: Up-regulated in Transcription
  misc_feature: MA Experiment 20000532 PARAMETER Experiment Name: Zm_0.001percent_MeJA_P Parameter: Age (day) Value: 10
  misc_feature: MA Experiment 20000532 PARAMETER Experiment Name: Zm_0.001percent_MeJA_P Parameter: Organism Value: Zea mays
  misc_feature: MA Experiment 20000532 PARAMETER Experiment Name: Zm_0.001percent_MeJA_P Parameter: Plant Line Value: 35A19
  misc_feature: MA Experiment 20000532 PARAMETER Experiment Name: Zm_0.001percent_MeJA_P Parameter: Timepoint (hr) Value: 48
  misc_feature: MA Experiment 20000532 PARAMETER Experiment Name: Zm_0.001percent_MeJA_P Parameter: Tissue Value: Aerial
  misc_feature: MA Experiment 20000532 PARAMETER Experiment Name: Zm_0.001percent_MeJA_P Parameter: Treatment Value: 0.001percent MeJA vs. No Treatment
  misc_feature: MA Experiment ID: 20000533 Result: Up-regulated in Transcription
  misc_feature: MA Experiment 20000533 PARAMETER Experiment Name: Zm_0.001percent_MeJA_P Parameter: Age (day) Value: 11
  misc_feature: MA Experiment 20000533 PARAMETER Experiment Name: Zm_0.001percent_MeJA_P Parameter: Organism Value: Zea mays
  misc_feature: MA Experiment 20000533 PARAMETER Experiment Name: Zm_0.001percent_MeJA_P Parameter: Plant Line Value: 35A19
  misc_feature: MA Experiment 20000533 PARAMETER Experiment Name: Zm_0.001percent_MeJA_P Parameter: Timepoint (hr) Value: 72
  misc_feature: MA Experiment 20000533 PARAMETER Experiment Name: Zm_0.001percent_MeJA_P Parameter: Tissue Value: Aerial
  misc_feature: MA Experiment 20000533 PARAMETER Experiment Name: Zm_0.001percent_MeJA_P Parameter: Treatment Value: 0.001percent MeJA vs. No Treatment
aacaacgcctcctccagtccttcttcgtaagccttcaaaccgacgaatttgagcaactgcacccagagcgcgatccattgccggggaagaagcaacttgttgcgagcctcctctatggcgagctccgaccatggttccaccaccgcccccaaggacgtgccgggcagctacggcctgccgctggtgggcgccgtgcgcgaccgcctcgacttctactacttccaggggcaggacaagtacttcgagtcccgcgtggagcgctacggctccaccgtggtgcgcatgaacgtgccgccgggccccttcatggcgcgcgacccgcgggtggtggcggtcctggacgccaagagcttccccgtgctcttcgacatggacaaggtggagaagaaggacctgttcacgggcacctacatgccgtccacctccctcaccggcggctaccgcgtctgctcgtacctggacccctccgagcccacccacaccaaggtgaagcagctgctcttctccctcctgctctcccgcaaggacgacgtgatccccaccttccgctccaacttctcctcgctcctcgccaccgtggaggcggagctggccaagggcggcaaggccgagttcaacaagctcaacgacgtcacctccttcgacttcatcggcgaggcctacttcggcgtgcgcccctcggcgaccgagctcggcaagggcgggccgagcaaggcggccaagtggctcatctggcagctccacccgctggtcacgctcggcctccccatggtcctggaggagccgctgctccacacgttccacctcccgcctttcctcgtcaagggcgactacagggcgctgtacaagtacttctccacggtggcgaagcaggcgctggacaccgccgagggcctgggcctgtcgcgcgaggaggcctgccacaacctcctcttcgccaccaccttcaacagctacggcggcctcaaggtgctgttcccgggcctgctggccaacgtggccagcggcggcgagaagctccacgagcggctggtggccgagatccgcggcgccgtggccgacgccggcggcaaggtcaccctcgcggcggtggagaggatggagctggccaagtcggtggtgtgggagtcgctgcgcctggacccgcccgtcaagttccagtacgggcacgccaagaaggacctgctggtggagagccacgacgcggtgttccaggtgaggaagggcgagatgctgttcggctaccagccgtgcgccaccaaggacccccgcgtgttcggcgacaccgcccggggacttcgtgcccgaccgcttcctcggcgaggagggcagcaagctgctgcagtacgtgtactggtccaacggccgtgagaccgagaaccccagcgtcgacaacaagcagtgccccgggaagaacttcgtggtgctggtcggcaggctcctcctcgtcgagctcttcctccgctacgacacattcaccgccgaggtcggcaaggagctgctcggcaccagcgtcatcttcaccggtgtcacgaaagctacctccggtccgggcagcgagtaaaccgccccggccggcgcgcgtcgttggatatatgatgagtggacgtgacagagtgtcccattatttcttaatttcgtcattttcctccttccttctaataagacttctctctc

SEQ ID NO: 1520 - protein, 558 aa, Zea mays subsp. mays
  peptide (1)..(558): Ceres Seq. ID no. 13498878
  misc_feature (436)..(508): Pfam Name: Equine herpesvirus glycoprotein gp2 Pfam Description: Equine herpesvirus glycoprotein gp2
  misc_feature (453)..(523): Homolog of NCBI NO: 7512967 NR Description: hypothetical protein KIAA0324 - human (fragment)
  misc_feature (453)..(523): Homolog of NCBI NO: 6634015 NR Description: KIAA0324 protein [Homo sapiens]
  misc_feature (453)..(523): Homolog of NCBI NO: 5821151 NR Description: RNA binding protein [Homo sapiens]
  misc_feature (453)..(523): Homolog of NCBI NO: 19923466 NR Description: splicing coactivator subunit SRm300
  misc_feature (415)..(500): Homolog of NCBI NO: 13592175 NR Description: ppg3 [Leishmania major]
  misc_feature (432)..(523): Homolog of NCBI NO: 13592175 NR Description: ppg3 [Leishmania major]
  misc_feature (415)..(549): Homolog of NCBI NO: 13592175 NR Description: ppg3 [Leishmania major]
  misc_feature (415)..(523): Homolog of NCBI NO: 13592175 NR Description: ppg3 [Leishmania major]
  misc_feature (415)..(523): Homolog of NCBI NO: 13592175 NR Description: ppg3 [Leishmania major]
  misc_feature (432)..(510): Homolog of NCBI NO: 28574039 NR Description: Salivary gland secretion 1 CG3047-PA [Drosophila
QRLLQSFFVSLQTDEFEQLHPERDPLPGKKQLVASLLYGELRPWFHHRPQGRAGQLRPAAGGRRARPPRLLLLPGAGQVLRVPRGALRLHRGAHERAAGPLHGARPAGGGGPGRQELPRALRHGQGGEEGPVHGHLHAVHLPHRRLPRLLVPGPLRAHPHQGEAAALLPPALPQGRRDPHLPLQLLLAPRHRGGGAGQGRQGRVQQAQRRHLLRLHRRGLLRRAPLGDRARQGRAEQGGQVAHLAAPPAGHARPPHGPGGAAAPHVPPPAFPRQGRLQGAVQVLLHGGEAGAGHRRGPGPVARGGLPQPPLRHHLQQLRRPQGAVPGPAGQRGQRRREAPRAAGGRDPRRRGRRRRQGHPRGGGEDGAGQVGGVGVAAPGPARQVPVRARQEGPAGGEPRRGVPGEEGRDAVRLPAVRHQGPPRVRRHRPGTSCPTASSARRAASCCSTCTGPTAVRPRTPASTTSSAPGRTSWCWSAGSSSSSSSSATTHSPPRSARSCSAPASSSPVSRKLPPVRAASKPPRPARVVGYMMSGRDRVSHYFLISSFSSFLLIRLLS

SEQ ID NO: 1521 - protein, 418 aa, Zea mays subsp. mays
  peptide (1)..(418): Ceres Seq. ID no. 13498879
  misc_feature (304)..(393): Pfam Name: Cytochrome P450 Pfam Description: Cytochrome P450
  misc_feature (83)..(390): Homolog of NCBI NO: 7488048 NR Description: probable allene oxide synthase - Arabidopsis
  misc_feature (1)..(388): Homolog of NCBI NO: 29373135 NR Description: allene oxide synthase [Citrus sinensis]
  misc_feature (1)..(388): Homolog of NCBI NO: 1352186 NR Description: Allene oxide synthase, chloroplast precursor
  misc_feature (9)..(388): Homolog of NCBI NO: 16973300 NR Description: allene oxide synthase [Nicotiana attenuata]
  misc_feature (13)..(388): Homolog of NCBI NO: 20160362 NR Description: allene oxide synthase [Solanum tuberosum]
  misc_feature (9)..(388): Homolog of NCBI NO: 23956572 NR Description: allene oxide synthase [Solanum tuberosum]
  misc_feature (1)..(418): Homolog of NCBI NO: 28569578 NR Description: allene oxide synthase [Triticum aestivum]
  misc_feature (13)..(393): Homolog of NCBI NO: 16506652 NR Description: allene oxide synthase [Oryza sativa]
  misc_feature (1)..(393): Homolog of NCBI NO: 7452981 NR Description: allene oxide synthase [Hordeum vulgare subsp.
  misc_feature (1)..(393): Homolog of NCBI NO: 7452979 NR Description: allene oxide synthase [Hordeum vulgare subsp.
MASSDHGSTTAPKDVPGSYGLPLVGAVRDRLDFYYFQGQDKYFESRVERYGSTVVRMNVPPGPFMARDPRVVAVLDAKSFPVLFDMDKVEKKDLFTGTYMPSTSLTGGYRVCSYLDPSEPTHTKVKQLLFSLLLSRKDDVIPTFRSNFSSLLATVEAELAKGGKAEFNKLNDVTSFDFIGEAYFGVRPSATELGKGGPSKAAKWLIWQLHPLVTLGLPMVLEEPLLHTFHLPPFLVKGDYRALYKYFSTVAKQALDTAEGLGLSREEACHNLLFATTFNSYGGLKVLFPGLLANVASGGEKLHERLVAEIRGAVADAGGKVTLAAVERMELAKSVVWESLRLDPPVKFQYGHAKKDLLVESHDAVFQVRKGEMLFGYQPCATKDPRVFGDTARGLRARPLPRRGGQQAAAVRVLVQRP

SEQ ID NO: 1522 - protein, 362 aa, Zea mays subsp. mays
  peptide (1)..(362): Ceres Seq. ID no. 13498880
  misc_feature (248)..(337): Pfam Name: Cytochrome P450 Pfam Description: Cytochrome P450
  misc_feature (27)..(334): Homolog of NCBI NO: 7488048 NR Description: probable allene oxide synthase - Arabidopsis
  misc_feature (1)..(332): Homolog of NCBI NO: 29373135 NR Description: allene oxide synthase [Citrus sinensis]
  misc_feature (1)..(332): Homolog of NCBI NO: 1352186 NR Description: Allene oxide synthase, chloroplast precursor
  misc_feature (1)..(332): Homolog of NCBI NO: 16973300 NR Description: allene oxide synthase [Nicotiana attenuata]
  misc_feature (1)..(332): Homolog of NCBI NO: 20160362 NR Description: allene oxide synthase [Solanum tuberosum]
  misc_feature (1)..(332): Homolog of NCBI NO: 23956572 NR Description: allene oxide synthase [Solanum tuberosum]
  misc_feature (1)..(362): Homolog of NCBI NO: 28569578 NR Description: allene oxide synthase [Triticum aestivum]
  misc_feature (1)..(337): Homolog of NCBI NO: 16506652 NR Description: allene oxide synthase [Oryza sativa]
  misc_feature (1)..(337): Homolog of NCBI NO: 7452981 NR Description: allene oxide synthase [Hordeum vulgare subsp.
  misc_feature (1)..(337): Homolog of NCBI NO: 7452979 NR Description: allene oxide synthase [Hordeum vulgare subsp.
MNVPPGPFMARDPRVVAVLDAKSFPVLFDMDKVEKKDLFTGTYMPSTSLTGGYRVCSYLDPSEPTHTKVKQLLFSLLLSRKDDVIPTFRSNFSSLLATVEAELAKGGKAEFNKLNDVTSFDFIGEAYFGVRPSATELGKGGPSKAAKWLIWQLHPLVTLGLPMVLEEPLLHTFHLPPFLVKGDYRALYKYFSTVAKQALDTAEGLGLSREEACHNLLFATTFNSYGGLKVLFPGLLANVASGGEKLHERLVAEIRGAVADAGGKVTLAAVERMELAKSVVWESLRLDPPVKFQYGHAKKDLLVESHDAVFQVRKGEMLFGYQPCATKDPRVFGDTARGLRARPLPRRGGQQAAAVRVLVQRP

SEQ ID NO: 1523 - DNA, 1596 bp, Zea mays subsp. mays
  misc_feature (1)..(1596): Ceres Seq. ID no. 13498873
  misc_feature: MA Experiment ID: 108522 Result: Up-regulated in Transcription
  misc_feature: MA Experiment 108522 PARAMETER Experiment Name: Zm_42deg_Heat_P Parameter: Age (day) Value: 8
  misc_feature: MA Experiment 108522 PARAMETER Experiment Name: Zm_42deg_Heat_P Parameter: Organism Value: Zea mays
  misc_feature: MA Experiment 108522 PARAMETER Experiment Name: Zm_42deg_Heat_P Parameter: Plant Line Value: 35A19
  misc_feature: MA Experiment 108522 PARAMETER Experiment Name: Zm_42deg_Heat_P Parameter: Temperature (deg C) Value: 42 vs. 22
  misc_feature: MA Experiment 108522 PARAMETER Experiment Name: Zm_42deg_Heat_P Parameter: Timepoint (hr) Value: 1
  misc_feature: MA Experiment 108522 PARAMETER Experiment Name: Zm_42deg_Heat_P Parameter: Tissue Value: Aerial
aatttttcgcgaagtttgtgttgtgattgcgccgttacgttacgtgaagaagacggatcttctacaagctgacggaagggcggatcgtgaaattgcgagttgcgacgccgtcattacaaatacgttatctgttcatccgtcaagccgtcagatctcccggcctgaggattcgattattctttcgctctcgcccaagtcatcgtctggtcgtcgcccgcagaggcgcagacgcccaaaaccggaaggggcgccatggccgcgtcggatctggagagcaaggccaaggaggccttcgtcgacgacgacttcgagctggccaccgagctctacagccaggccatcgacgccgggcccgccaccgccgacctctatgccgaccgcgcccaggcgcacatcaagctcggcaactacactgaggctgtggcggatgctaacaaagcaattgagcttgatcctatgatgcataaagcttactaccggaaaggtgctgcatgcattaagcttgaagaataccaaactgcaaaggctgctcttgagttgggttcttcttatgcatcaggcgattcaaggtttgctcgtctattgaaggaatgtgatgagcgcatcgctgaggaatctagccaggcaccagtaaagaatgttgaggctactgtggctgctactattgaggacaaggaggatttcacaaatatggagaatacaccaccagtgatagaacccccaagcaaaccaaaatacaggcatgactactacaacagtgccacagaagtggtactgacaatatttgctaacggtgttcctgctgatagtgtagtcattgattttggtgaacagatgttgagtgtatccattgaagttcctggtgaagaaccataccattttcagccccgtctgttttctaagattatccctgagaaatgcaaatatcaagtcttatccaccaaggtcgaaatacgccttgcaaaagctgagcaggtgacatggacaaccctggattatagtggaagaccaaagactgttccccagaagataagcacgccagctgaaacagccccaagaccttcatacccatcttcaaaggcgaaaaaagactgggataaactggaagctgaagtcaaaaaggaggagaaggaagaaaaacttgatggtgatgctgcattgaacaaattcttccgtgacatctacaaggatgctgatgaagatatgcggagggccatgatgaagtcattcgtggaatcaaatggcactgttctctcaaccaattggaaagatgttggagcaaagaaggtagaagggagcccccctgatggtatggagctcaagaagtgggaatactaaagtttggactgcccatcttttgtaaatccaggtcttggaaactatgacctaattccgtccacccatagtgccatgagcttgcttggttaagtctctgcttttgtaagctttctgtatgacagtctagcgtgtgtctgagtgctacttgccgtagcttttgatggacataggtatgctattatgtggtatcgaccgggaaccatctgtggtatcaaagacagcaaactataatgtatggaatgcctattctttttggcc

SEQ ID NO: 1524 - protein, 361 aa, Zea mays subsp. mays
  peptide (1)..(361): Ceres Seq. ID no. 13498874
  misc_feature (278)..(359): Pfam Name: SGS domain Pfam Description: SGS domain
  misc_feature (3)..(360): Homolog of NCBI NO: 15236528 NR Description: phosphatase - related [Arabidopsis thaliana]
  misc_feature (3)..(361): Homolog of NCBI NO: 40974915 NR Description: SGT1-like protein [Brassica oleracea]
  misc_feature (3)..(360): Homolog of NCBI NO: 17017308 NR Description: SGT1a [Arabidopsis thaliana]
  misc_feature (3)..(361): Homolog of NCBI NO: 15237122 NR Description: phosphatase - related [Arabidopsis thaliana]
  misc_feature (34)..(360): Homolog of NCBI NO: 6468695 NR Description: putative protein phosphatase [Rubus idaeus]
  misc_feature (3)..(361): Homolog of NCBI NO: 40974917 NR Description: SGT1-like protein [Brassica oleracea]
  misc_feature (3)..(360): Homolog of NCBI NO: 29468339 NR Description: SGT1 [Nicotiana benthamiana]
  misc_feature (2)..(361): Homolog of NCBI NO: 6581058 NR Description: Sgt1 [Oryza sativa]
  misc_feature (1)..(361): Homolog of NCBI NO: 17017306 NR Description: SGT1 [Hordeum vulgare]
  misc_feature (2)..(361): Homolog of NCBI NO: 34912836 NR Description: Sgt1 [Oryza sativa (japonica cultivar-group)]
MAASDLESKAKEAFVDDDFELATELYSQAIDAGPATADLYADRAQAHIKLGNYTEAVADANKAIELDPMMHKAYYRKGAACIKLEEYQTAKAALELGSSYASGDSRFARLLKECDERIAEESSQAPVKNVEATVAATIEDKEDFTNMENTPPVIEPPSKPKYRHDYYNSATEVVLTIFANGVPADSVVIDFGEQMLSVSIEVPGEEPYHFQPRLFSKIIPEKCKYQVLSTKVEIRLAKAEQVTWTTLDYSGRPKTVPQKISTPAETAPRPSYPSSKAKKDWDKLEAEVKKEEKEEKLDGDAALNKFFRDIYKDADEDMRRAMMKSFVESNGTVLSTNWKDVGAKKVEGSPPDGMELKKWEY

SEQ ID NO: 1525 - protein, 293 aa, Zea mays subsp. mays
  peptide (1)..(293): Ceres Seq. ID no. 13498875
  misc_feature (210)..(291): Pfam Name: SGS domain Pfam Description: SGS domain
  misc_feature (1)..(292): Homolog of NCBI NO: 15236528 NR Description: phosphatase - related [Arabidopsis thaliana]
  misc_feature (1)..(293): Homolog of NCBI NO: 40974915 NR Description: SGT1-like protein [Brassica oleracea]
  misc_feature (1)..(292): Homolog of NCBI NO: 17017308 NR Description: SGT1a [Arabidopsis thaliana]
  misc_feature (1)..(293): Homolog of NCBI NO: 15237122 NR Description: phosphatase - related [Arabidopsis thaliana]
  misc_feature (1)..(292): Homolog of NCBI NO: 6468695 NR Description: putative protein phosphatase [Rubus idaeus]
  misc_feature (1)..(293): Homolog of NCBI NO: 40974917 NR Description: SGT1-like protein [Brassica oleracea]
  misc_feature (1)..(292): Homolog of NCBI NO: 29468339 NR Description: SGT1 [Nicotiana benthamiana]
  misc_feature (1)..(293): Homolog of NCBI NO: 6581058 NR Description: Sgt1 [Oryza sativa]
  misc_feature (1)..(293): Homolog of NCBI NO: 17017306 NR Description: SGT1 [Hordeum vulgare]
  misc_feature (1)..(293): Homolog of NCBI NO: 34912836 NR Description: Sgt1 [Oryza sativa (japonica cultivar-group)]
MMHKAYYRKGAACIKLEEYQTAKAALELGSSYASGDSRFARLLKECDERIAEESSQAPVKNVEATVAATIEDKEDFTNMENTPPVIEPPSKPKYRHDYYNSATEVVLTIFANGVPADSVVIDFGEQMLSVSIEVPGEEPYHFQPRLFSKIIPEKCKYQVLSTKVEIRLAKAEQVTWTTLDYSGRPKTVPQKISTPAETAPRPSYPSSKAKKDWDKLEAEVKKEEKEEKLDGDAALNKFFRDIYKDADEDMRRAMMKSFVESNGTVLSTNWKDVGAKKVEGSPPDGMELKKWEY

SEQ ID NO: 1526 - protein, 292 aa, Zea mays subsp. mays
  peptide (1)..(292): Ceres Seq. ID no. 13498876
  misc_feature (209)..(290): Pfam Name: SGS domain Pfam Description: SGS domain
  misc_feature (1)..(292): Homolog of NCBI NO: 17017306 NR Description: SGT1 [Hordeum vulgare]
  misc_feature (1)..(291): Homolog of NCBI NO: 15236528 NR Description: phosphatase - related [Arabidopsis thaliana]
  misc_feature (1)..(291): Homolog of NCBI NO: 17017308 NR Description: SGT1a [Arabidopsis thaliana]
  misc_feature (1)..(291): Homolog of NCBI NO: 6468695 NR Description: putative protein phosphatase [Rubus idaeus]
  misc_feature (1)..(291): Homolog of NCBI NO: 29468339 NR Description: SGT1 [Nicotiana benthamiana]
  misc_feature (1)..(292): Homolog of NCBI NO: 6581058 NR Description: Sgt1 [Oryza sativa]
  misc_feature (1)..(292): Homolog of NCBI NO: 40974917 NR Description: SGT1-like protein [Brassica oleracea]
  misc_feature (1)..(292): Homolog of NCBI NO: 15237122 NR Description: phosphatase - related [Arabidopsis thaliana]
  misc_feature (1)..(292): Homolog of NCBI NO: 40974915 NR Description: SGT1-like protein [Brassica oleracea]
  misc_feature (1)..(292): Homolog of NCBI NO: 34912836 NR Description: Sgt1 [Oryza sativa (japonica cultivar-group)]
MHKAYYRKGAACIKLEEYQTAKAALELGSSYASGDSRFARLLKECDERIAEESSQAPVKNVEATVAATIEDKEDFTNMENTPPVIEPPSKPKYRHDYYNSATEVVLTIFANGVPADSVVIDFGEQMLSVSIEVPGEEPYHFQPRLFSKIIPEKCKYQVLSTKVEIRLAKAEQVTWTTLDYSGRPKTVPQKISTPAETAPRPSYPSSKAKKDWDKLEAEVKKEEKEEKLDGDAALNKFFRDIYKDADEDMRRAMMKSFVESNGTVLSTNWKDVGAKKVEGSPPDGMELKKWEY

SEQ ID NO: 1527 - DNA, 1814 bp, Zea mays subsp. mays
  misc_feature (1)..(1814): Ceres Seq. ID no. 12373981
  misc_feature: MA Experiment ID: 20000479 Result: Down-regulated in Transcription
  misc_feature: MA Experiment 20000479 PARAMETER Experiment Name: Zm_Drought_P Parameter: Age (day) Value: 10
  misc_feature: MA Experiment 20000479 PARAMETER Experiment Name: Zm_Drought_P Parameter: Organism Value: Zea mays
  misc_feature: MA Experiment 20000479 PARAMETER Experiment Name: Zm_Drought_P Parameter: Plant Line Value: 35A19
  misc_feature: MA Experiment 20000479 PARAMETER Experiment Name: Zm_Drought_P Parameter: Timepoint (hr) Value: 48
  misc_feature: MA Experiment 20000479 PARAMETER Experiment Name: Zm_Drought_P Parameter: Tissue Value: Aerial
  misc_feature: MA Experiment 20000479 PARAMETER Experiment Name: Zm_Drought_P Parameter: Treatment Value: Drought vs. No Drought
  misc_feature: MA Experiment ID: 20000535 Result: Down-regulated in Transcription
  misc_feature: MA Experiment 20000535 PARAMETER Experiment Name: Zm_Hybrid_Seed_Dev_P Parameter: DAP Value: 30 vs. 12
  misc_feature: MA Experiment 20000535 PARAMETER Experiment Name: Zm_Hybrid_Seed_Dev_P Parameter: Organism Value: Zea mays
  misc_feature: MA Experiment 20000535 PARAMETER Experiment Name: Zm_Hybrid_Seed_Dev_P Parameter: Plant Line Value: 35A19
  misc_feature: MA Experiment 20000535 PARAMETER Experiment Name: Zm_Hybrid_Seed_Dev_P Parameter: Tissue Value: Embryo vs. Unfert Floret
cccgtgatgttttaaatttcggatcctgtgttgcagctttgaagtgcatgaacgagacatgcagagccgcgtgacgtgagttctccccataccgcccgatctcggagatgtgcgcgtaccacatgaggctcaccggcggcgcggcctttgtgctccttatggttctcctcttgctgctgtatgcggtgcacaggtggaggaaccctcgatgcagcggccgcctgccgccgggctccatgggcctgccgctcgtcggagagacggctgcagttcttctcccctgaagcttccttggacgtcccgcgtttcgtccgacacagactgcaaaggtacggcccgatcttcaagacgagcctggtgggccacccggtcgtcgtctccgcggacgaggagctgaactacatggtgttccagcaggaggggcagctgttccagagctggtacccggactccttcgtggagatcctaggcagggacaacgtcggggagcagcagggcgccatgttcaagtacctcaagaacatggtgctccgctacttcggcccggagagcctcagggagtccatgctccgcgacgtcgagcacgccgtcagcagctcgctctgtacctggtcaaccttgccgtcggtcgagctgaaagaggccgtctccacgatggtgttcgatctttcagcgaacaagcttctcagcttggagccgtcgaggtccaagattctgaggaggagcttcttcgacttcgttcgagggctcatctcgttccctctgtatttgccaggaacagcatactactcatgcatgaagggccggcagagcgcaatggaggtgctgcaggaagtgctagcggagaggaagagactggtacaggtgcccggagcaggaggaggcgccatggaaacgatacgtcgccatggcggcgacttcttggacctcgtcatccaggaagtcacgaaggagaagccgctcgtgacggacagaatggcgctcgacctgatgttcgtgctcctgttcgccagcttccacacgacgtcgctagcgctcactctggctgtcaagctgcttgcagaccaccctcgcgtcctggaagagctcacggtggagcatgaagcgattctgaatgaacgtaacgcgcgccatggatctgatggaatcacatggatggagtacaagtctatgacgttcacatcccaggtcatcaacgagactgtccgattagccaatattgcgcctggcatcttcagaaaggcactgaaagatatacagttcagagggttcacaattccagcaggatggggagtgatggtctgtcctccagcagtgcacttgaacccagtcatttacccagatcccctcatctttaaccctacaaggttcaaggataaaccggagataaaccgtgggtcaagacacttcatggcattcggaggaggcctccgatcctgtgttggagcagacttcagcaagttgcaaatgtctattttcctccatttccttgtcactagatacaggtggagaagtcttgggggtggcaaggtagtccgaaatccggggctagaattccctgatggctaccacattcaaatacggcactggaattaattctgctaatactacagagtcaatctcgttgtgcattcaagccaagaaacggacggagggaaagaattactgttaggctctatttggatcttttgaattgaatttcattctaataattataattcaaacacagattaattagaataatataattttatgtgagatatatttttatagtactgttggtcaccatataaatttattataagcttatatcc

SEQ ID NO: 1528 - protein, 471 aa, Zea mays subsp. mays
  peptide (1)..(471): Ceres Seq. ID no. 12373982
  misc_feature (193)..(467): Pfam Name: Cytochrome P450 Pfam Description: Cytochrome P450
  misc_feature (31)..(467): Homolog of NCBI NO: 30695347 NR Description: cytochrome p450 family [Arabidopsis thaliana]
  misc_feature (29)..(467): Homolog of NCBI NO: 15222806 NR Description: cytochrome P450, putative; protein id:
  misc_feature (30)..(398): Homolog of NCBI NO: 38567917 NR Description: OSJNBa0088I22.13 [Oryza sativa (japonica
  misc_feature (59)..(467): Homolog of NCBI NO: 27764671 NR Description: putative hydroxylase [Oryza sativa (japonica
  misc_feature (29)..(467): Homolog of NCBI NO: 18483228 NR Description: putative cytochrome P450-like protein [Sorghum
  misc_feature (29)..(467): Homolog of NCBI NO: 9502380 NR Description: T12C24.27 [Arabidopsis thaliana]
  misc_feature (29)..(467): Homolog of NCBI NO: 30682922 NR Description: cytochrome P450, putative [Arabidopsis thaliana]
  misc_feature (29)..(467): Homolog of NCBI NO: 38567920 NR Description: OSJNBa0088I22.16 [Oryza sativa (japonica
  misc_feature (29)..(467): Homolog of NCBI NO: 20520627 NR Description: putative cytochrome P450 [Oryza sativa (japonica
  misc_feature (30)..(469): Homolog of NCBI NO: 38567916 NR Description: OSJNBa0088I22.12 [Oryza sativa (japonica
MRCTGGGTLDAAAACRRAPWACRSSERRLQFFSPEASLDVPRFVRHRLQRYGPIFKTSLVGHPVVVSADEELNYMVFQQEGQLFQSWYPDSFVEILGRDNVGEQQGAMFKYLKNMVLRYFGPESLRESMLRDVEHAVSSSLCTWSTLPSVELKEAVSTMVFDLSANKLLSLEPSRSKILRRSFFDFVRGLISFPLYLPGTAYYSCMKGRQSAMEVLQEVLAERKRLVQVPGAGGGAMETIRRHGGDFLDLVIQEVTKEKPLVTDRMALDLMFVLLFASFHTTSLALTLAVKLLADHPRVLEELTVEHEAILNERNARHGSDGITWMEYKSMTFTSQVINETVRLANIAPGIFRKALKDIQFRGFTIPAGWGVMVCPPAVHLNPVIYPDPLIFNPTRFKDKPEINRGSRHFMAFGGGLRSCVGADFSKLQMSIFLHFLVTRYRWRSLGGGKVVRNPGLEFPDGYHIQIRHWN

SEQ ID NO: 1529 - protein, 397 aa, Zea mays subsp. mays
  peptide (1)..(397): Ceres Seq. ID no. 12373983
  misc_feature (119)..(393): Pfam Name: Cytochrome P450 Pfam Description: Cytochrome P450
  misc_feature (1)..(393): Homolog of NCBI NO: 30695347 NR Description: cytochrome p450 family [Arabidopsis thaliana]
  misc_feature (1)..(393): Homolog of NCBI NO: 15222806 NR Description: cytochrome P450, putative; protein id:
  misc_feature (1)..(324): Homolog of NCBI NO: 38567917 NR Description: OSJNBa0088I22.13 [Oryza sativa (japonica
  misc_feature (1)..(393): Homolog of NCBI NO: 27764671 NR Description: putative hydroxylase [Oryza sativa (japonica
  misc_feature (1)..(393): Homolog of NCBI NO: 18483228 NR Description: putative cytochrome P450-like protein [Sorghum
  misc_feature (1)..(393): Homolog of NCBI NO: 9502380 NR Description: T12C24.27 [Arabidopsis thaliana]
  misc_feature (1)..(393): Homolog of NCBI NO: 30682922 NR Description: cytochrome P450, putative [Arabidopsis thaliana]
  misc_feature (1)..(393): Homolog of NCBI NO: 38567920 NR Description: OSJNBa0088I22.16 [Oryza sativa (japonica
  misc_feature (1)..(393): Homolog of NCBI NO: 20520627 NR Description: putative cytochrome P450 [Oryza sativa (japonica
  misc_feature (1)..(395): Homolog of NCBI NO: 38567916 NR Description: OSJNBa0088I22.12 [Oryza sativa (japonica
MVFQQEGQLFQSWYPDSFVEILGRDNVGEQQGAMFKYLKNMVLRYFGPESLRESMLRDVEHAVSSSLCTWSTLPSVELKEAVSTMVFDLSANKLLSLEPSRSKILRRSFFDFVRGLISFPLYLPGTAYYSCMKGRQSAMEVLQEVLAERKRLVQVPGAGGGAMETIRRHGGDFLDLVIQEVTKEKPLVTDRMALDLMFVLLFASFHTTSLALTLAVKLLADHPRVLEELTVEHEAILNERNARHGSDGITWMEYKSMTFTSQVINETVRLANIAPGIFRKALKDIQFRGFTIPAGWGVMVCPPAVHLNPVIYPDPLIFNPTRFKDKPEINRGSRHFMAFGGGLRSCVGADFSKLQMSIFLHFLVTRYRWRSLGGGKVVRNPGLEFPDGYHIQIRHWN

SEQ ID NO: 1530 - protein, 364 aa, Zea mays subsp. mays
  peptide (1)..(364): Ceres Seq. ID no. 12373984
  misc_feature (86)..(360): Pfam Name: Cytochrome P450 Pfam Description: Cytochrome P450
  misc_feature (1)..(360): Homolog of NCBI NO: 30695347 NR Description: cytochrome p450 family [Arabidopsis thaliana]
  misc_feature (1)..(360): Homolog of NCBI NO: 15222806 NR Description: cytochrome P450, putative; protein id:
  misc_feature (1)..(291): Homolog of NCBI NO: 38567917 NR Description: OSJNBa0088I22.13 [Oryza sativa (japonica
  misc_feature (1)..(360): Homolog of NCBI NO: 27764671 NR Description: putative hydroxylase [Oryza sativa (japonica
  misc_feature (1)..(360): Homolog of NCBI NO: 18483228 NR Description: putative cytochrome P450-like protein [Sorghum
  misc_feature (1)..(360): Homolog of NCBI NO: 9502380 NR Description: T12C24.27 [Arabidopsis thaliana]
  misc_feature (1)..(360): Homolog of NCBI NO: 30682922 NR Description: cytochrome P450, putative [Arabidopsis thaliana]
  misc_feature (1)..(360): Homolog of NCBI NO: 38567920 NR Description: OSJNBa0088I22.16 [Oryza sativa (japonica
  misc_feature (1)..(360): Homolog of NCBI NO: 20520627 NR Description: putative cytochrome P450 [Oryza sativa (japonica
  misc_feature (1)..(362): Homolog of NCBI NO: 38567916 NR Description: OSJNBa0088I22.12 [Oryza sativa (japonica
MFKYLKNMVLRYFGPESLRESMLRDVEHAVSSSLCTWSTLPSVELKEAVSTMVFDLSANKLLSLEPSRSKILRRSFFDFVRGLISFPLYLPGTAYYSCMKGRQSAMEVLQEVLAERKRLVQVPGAGGGAMETIRRHGGDFLDLVIQEVTKEKPLVTDRMALDLMFVLLFASFHTTSLALTLAVKLLADHPRVLEELTVEHEAILNERNARHGSDGITWMEYKSMTFTSQVINETVRLANIAPGIFRKALKDIQFRGFTIPAGWGVMVCPPAVHLNPVIYPDPLIFNPTRFKDKPEINRGSRHFMAFGGGLRSCVGADFSKLQMSIFLHFLVTRYRWRSLGGGKVVRNPGLEFPDGYHIQIRHWN

SEQ ID NO: 1531 - DNA, 1475 bp, Zea mays subsp. mays
  misc_feature (1)..(1475): Ceres Seq. ID no. 12348910
  misc_feature: MA Experiment ID: 108523 Result: Up-regulated in Transcription
  misc_feature: MA Experiment 108523 PARAMETER Experiment Name: Zm_42deg_Heat_P Parameter: Age (day) Value: 8
  misc_feature: MA Experiment 108523 PARAMETER Experiment Name: Zm_42deg_Heat_P Parameter: Organism Value: Zea mays
  misc_feature: MA Experiment 108523 PARAMETER Experiment Name: Zm_42deg_Heat_P Parameter: Plant Line Value: 35A19
  misc_feature: MA Experiment 108523 PARAMETER Experiment Name: Zm_42deg_Heat_P Parameter: Temperature (deg C) Value: 42 vs. 22
  misc_feature: MA Experiment 108523 PARAMETER Experiment Name: Zm_42deg_Heat_P Parameter: Timepoint (hr) Value: 6
  misc_feature: MA Experiment 108523 PARAMETER Experiment Name: Zm_42deg_Heat_P Parameter: Tissue Value: Aerial
gcgaattgcaattgcagaacggaattccattccagaaccatccttcgctcgcccccgccgccgcgctgccgcggccatatacggcgaaagccctattcgtgcccgcggccgtggatagataggtcagtgacgattgagaaacccgtagtcggagcagaggaggggtagaagatggtgttcggtcaggtggtgatcggcccgccgggctccggcaagaccacctactgcaacggcatgtcgcagttcctctccctcctcggcaggaaggttgcggttgtcaatttggaccctgcaaatgacgcattgccatatgagtgtgccataaacatcgaggacctcataaaactcagtgatgtcatgtctgagcattcgcttggccctaatggagggcttgtgtattgcatggattacttggagaagaatattgattggcttgaagaaaaactgaagccttttattgaagatcactatctgttatttgatttttctggtcaagtggaattgttcttccttcactcaaatgcaagaagtgttattaataaactcatcaaaaagatggacttgaggcttactgctgttcaccttattgatgcccatttatgctgtgatcctggaaagtatgtcattgctttgcttctttcactatcaacgatgctacacttggaattgccacatatcaatgtcttgtcaaagattgacctcattgagaactatggaaatttagcattcaaccttgacttctacactgatgtccaagatctttcttatttgcaatatcatcttgagcaggatccccgctcagccaagtacaggaaactgactaaggagctctgtgatgtgattgatgattttggtttagtcaatttttcaactttggacatccaggacaaggaaagtgttggcaatcttgtgaagctgattgacaagagcaacggatatatattttcttctattgacagtagtgctgttgagttcagcaaaattgcagcggcgcctcttgattgggactactacagaacagcggaagtgcaggagaagtacatgaaagatgatgagttcgcgcaactgacaagcaggatgcaatgaggctggcggtgccgtcccgcacccccactttggtagcacaacgggtgaacggtgaaccacgacagtgtggcacgtcgaacttcggttgccagaacgatgtgaaacctgtctaaattcatgtagctcagttgtaggtgtttactgaagctaattgctatagttgcctgatcttctgggagtaccctttgggcagtaaaaaaatgcacttgtcacctgtgaccaaccggtcaggtcctgttttgtttgttcgcttcaacttcgaactgcatcagctacaatctttagagacaaaatattgtagtgtttggactactgcagttgtaatctttaaagacaacattgtagaagcagtagaaatcagtatggattaaagccaaacgaataagctt

SEQ ID NO: 1532 - protein, 304 aa, Zea mays subsp. mays
  peptide (1)..(304): Ceres Seq. ID no. 12348911
  misc_feature (7)..(256): Pfam Name: Conserved hypothetical ATP binding protein Pfam Description: Conserved hypothetical ATP binding protein
  misc_feature (1)..(294): Homolog of NCBI NO: 27735409 NR Description: Similar to expressed sequence AI838661 [Xenopus
  misc_feature (1)..(295): Homolog of NCBI NO: 6324836 NR Description: Protein required for cell viability; Yor262wp
  misc_feature (3)..(291): Homolog of NCBI NO: 7022323 NR Description: unnamed protein product [Homo sapiens]
  misc_feature (3)..(291): Homolog of NCBI NO: 14250403 NR Description: Unknown (protein for MGC:9656) [Homo sapiens]
  misc_feature (3)..(291): Homolog of NCBI NO: 7981259 NR Description: dJ50O24.2.1 (novel protein (translation of cDNA
  misc_feature (3)..(291): Homolog of NCBI NO: 40254895 NR Description: hypothetical protein FLJ10349 [Homo sapiens]
  misc_feature (3)..(291): Homolog of NCBI NO: 33303753 NR Description: hypothetical protein FLJ10349 [synthetic
  misc_feature (3)..(304): Homolog of NCBI NO: 19527098 NR Description: expressed sequence AI838661 [Mus musculus]
  misc_feature (3)..(298): Homolog of NCBI NO: 34871770 NR Description: similar to expressed sequence AI838661 [Rattus
  misc_feature (1)..(282): Homolog of NCBI NO: 15242226 NR Description: putative protein; protein id: At5g22370.1
MVFGQVVIGPPGSGKTTYCNGMSQFLSLLGRKVAVVNLDPANDALPYECAINIEDLIKLSDVMSEHSLGPNGGLVYCMDYLEKNIDWLEEKLKPFIEDHYLLFDFSGQVELFFLHSNARSVINKLIKKMDLRLTAVHLIDAHLCCDPGKYVIALLLSLSTMLHLELPHINVLSKIDLIENYGNLAFNLDFYTDVQDLSYLQYHLEQDPRSAKYRKLTKELCDVIDDFGLVNFSTLDIQDKESVGNLVKLIDKSNGYIFSSIDSSAVEFSKIAAAPLDWDYYRTAEVQEKYMKDDEFAQLTSRMQ

SEQ ID NO: 1533 - protein, 283 aa, Zea mays subsp. mays
  peptide (1)..(283): Ceres Seq. ID no. 12348912
  misc_feature (1)..(235): Pfam Name: Conserved hypothetical ATP binding protein Pfam Description: Conserved hypothetical ATP binding protein
  misc_feature (1)..(273): Homolog of NCBI NO: 27735409 NR Description: Similar to expressed sequence AI838661 [Xenopus
  misc_feature (1)..(274): Homolog of NCBI NO: 6324836 NR Description: Protein required for cell viability; Yor262wp
  misc_feature (1)..(270): Homolog of NCBI NO: 7022323 NR Description: unnamed protein product [Homo sapiens]
  misc_feature (1)..(270): Homolog of NCBI NO: 14250403 NR Description: Unknown (protein for MGC:9656) [Homo sapiens]
  misc_feature (1)..(270): Homolog of NCBI NO: 7981259 NR Description: dJ50O24.2.1 (novel protein (translation of cDNA
  misc_feature (1)..(270): Homolog of NCBI NO: 40254895 NR Description: hypothetical protein FLJ10349 [Homo sapiens]
  misc_feature (1)..(270): Homolog of NCBI NO: 33303753 NR Description: hypothetical protein FLJ10349 [synthetic
  misc_feature (1)..(283): Homolog of NCBI NO: 19527098 NR Description: expressed sequence AI838661 [Mus musculus]
  misc_feature (1)..(277): Homolog of NCBI NO: 34871770 NR Description: similar to expressed sequence AI838661 [Rattus
  misc_feature (1)..(261): Homolog of NCBI NO: 15242226 NR Description: putative protein; protein id: At5g22370.1
MSQFLSLLGRKVAVVNLDPANDALPYECAINIEDLIKLSDVMSEHSLGPNGGLVYCMDYLEKNIDWLEEKLKPFIEDHYLLFDFSGQVELFFLHSNARSVINKLIKKMDLRLTAVHLIDAHLCCDPGKYVIALLLSLSTMLHLELPHINVLSKIDLIENYGNLAFNLDFYTDVQDLSYLQYHLEQDPRSAKYRKLTKELCDVIDDFGLVNFSTLDIQDKESVGNLVKLIDKSNGYIFSSIDSSAVEFSKIAAAPLDWDYYRTAEVQEKYMKDDEFAQLTSRMQ

SEQ ID NO: 1534 - protein, 242 aa, Zea mays subsp. mays
  peptide (1)..(242): Ceres Seq. ID no. 12348913
  misc_feature (1)..(194): Pfam Name: Conserved hypothetical ATP binding protein Pfam Description: Conserved hypothetical ATP binding protein
  misc_feature (1)..(232): Homolog of NCBI NO: 27735409 NR Description: Similar to expressed sequence AI838661 [Xenopus
  misc_feature (1)..(233): Homolog of NCBI NO: 6324836 NR Description: Protein required for cell viability; Yor262wp
  misc_feature (1)..(229): Homolog of NCBI NO: 7022323 NR Description: unnamed protein product [Homo sapiens]
  misc_feature (1)..(229): Homolog of NCBI NO: 14250403 NR Description: Unknown (protein for MGC:9656) [Homo sapiens]
  misc_feature (1)..(229): Homolog of NCBI NO: 7981259 NR Description: dJ50O24.2.1 (novel protein (translation of cDNA
  misc_feature (1)..(229): Homolog of NCBI NO: 40254895 NR Description: hypothetical protein FLJ10349 [Homo sapiens]
  misc_feature (1)..(229): Homolog of NCBI NO: 33303753 NR Description: hypothetical protein FLJ10349 [synthetic
  misc_feature (1)..(242): Homolog of NCBI NO: 19527098 NR Description: expressed sequence AI838661 [Mus musculus]
  misc_feature (1)..(236): Homolog of NCBI NO: 34871770 NR Description: similar to expressed sequence AI838661 [Rattus
  misc_feature (1)..(220): Homolog of NCBI NO: 15242226 NR Description: putative protein; protein id: At5g22370.1
MSEHSLGPNGGLVYCMDYLEKNIDWLEEKLKPFIEDHYLLFDFSGQVELFFLHSNARSVINKLIKKMDLRLTAVHLIDAHLCCDPGKYVIALLLSLSTMLHLELPHINVLSKIDLIENYGNLAFNLDFYTDVQDLSYLQYHLEQDPRSAKYRKLTKELCDVIDDFGLVNFSTLDIQDKESVGNLVKLIDKSNGYIFSSIDSSAVEFSKIAAAPLDWDYYRTAEVQEKYMKDDEFAQLTSRMQ

SEQ ID NO: 1535 - DNA, 1469 bp, Zea mays subsp. mays
  misc_feature (1)..(1469): Ceres Seq. ID no. 12411125
  misc_feature: MA Experiment ID: 108522 Result: Down-regulated in Transcription
  misc_feature: MA Experiment 108522 PARAMETER Experiment Name: Zm_42deg_Heat_P Parameter: Age (day) Value: 8
  misc_feature: MA Experiment 108522 PARAMETER Experiment Name: Zm_42deg_Heat_P Parameter: Organism Value: Zea mays
  misc_feature: MA Experiment 108522 PARAMETER Experiment Name: Zm_42deg_Heat_P Parameter: Plant Line Value: 35A19
  misc_feature: MA Experiment 108522 PARAMETER Experiment Name: Zm_42deg_Heat_P Parameter: Temperature (deg C) Value: 42 vs. 22
  misc_feature: MA Experiment 108522 PARAMETER Experiment Name: Zm_42deg_Heat_P Parameter: Timepoint (hr) Value: 1
  misc_feature: MA Experiment 108522 PARAMETER Experiment Name: Zm_42deg_Heat_P Parameter: Tissue Value: Aerial
  misc_feature: MA Experiment ID: 108597 Result: Up-regulated in Transcription
  misc_feature: MA Experiment 108597 PARAMETER Experiment Name: Zm_100uM_ABA_P Parameter: Age (day) Value: 9
  misc_feature: MA Experiment 108597 PARAMETER Experiment Name: Zm_100uM_ABA_P Parameter: Organism Value: Zea mays
  misc_feature: MA Experiment 108597 PARAMETER Experiment Name: Zm_100uM_ABA_P Parameter: Plant Line Value: 35A19
  misc_feature: MA Experiment 108597 PARAMETER Experiment Name: Zm_100uM_ABA_P Parameter: Timepoint (hr) Value: 24
  misc_feature: MA Experiment 108597 PARAMETER Experiment Name: Zm_100uM_ABA_P Parameter: Tissue Value: Aerial
  misc_feature: MA Experiment 108597 PARAMETER Experiment Name: Zm_100uM_ABA_P Parameter: Treatment Value: 100uM ABA vs. No Treatment
  misc_feature: MA Experiment ID: 108689 Result: Up-regulated in Transcription
  misc_feature: MA Experiment 108689 PARAMETER Experiment Name: Zm_Drought_Roots_P Parameter: Age (day) Value: 9
  misc_feature: MA Experiment 108689 PARAMETER Experiment Name: Zm_Drought_Roots_P Parameter: Organism Value: Zea mays
  misc_feature: MA Experiment 108689 PARAMETER Experiment Name: Zm_Drought_Roots_P Parameter: Plant Line Value: 35A19
  misc_feature: MA Experiment 108689 PARAMETER Experiment Name: Zm_Drought_Roots_P Parameter: Timepoint (hr) Value: 24
  misc_feature: MA Experiment 108689 PARAMETER Experiment Name: Zm_Drought_Roots_P Parameter: Tissue Value: Roots
  misc_feature: MA Experiment 108689 PARAMETER Experiment Name: Zm_Drought_Roots_P Parameter: Treatment Value: Drought vs. No Drought
  misc_feature: MA Experiment ID: 20000479 Result: Up-regulated in Transcription
  misc_feature: MA Experiment 20000479 PARAMETER Experiment Name: Zm_Drought_P Parameter: Age (day) Value: 10
  misc_feature: MA Experiment 20000479 PARAMETER Experiment Name: Zm_Drought_P Parameter: Organism Value: Zea mays
  misc_feature: MA Experiment 20000479 PARAMETER Experiment Name: Zm_Drought_P Parameter: Plant Line Value: 35A19
  misc_feature: MA Experiment 20000479 PARAMETER Experiment Name: Zm_Drought_P Parameter: Timepoint (hr) Value: 48
  misc_feature: MA Experiment 20000479 PARAMETER Experiment Name: Zm_Drought_P Parameter: Tissue Value: Aerial
  misc_feature: MA Experiment 20000479 PARAMETER Experiment Name: Zm_Drought_P Parameter: Treatment Value: Drought vs. No Drought
  misc_feature: MA Experiment ID: 20000480 Result: Up-regulated in Transcription
  misc_feature: MA Experiment 20000480 PARAMETER Experiment Name: Zm_Drought_P Parameter: Age (day) Value: 11
  misc_feature: MA Experiment 20000480 PARAMETER Experiment Name: Zm_Drought_P Parameter: Organism Value: Zea mays
  misc_feature: MA Experiment 20000480 PARAMETER Experiment Name: Zm_Drought_P Parameter: Plant Line Value: 35A19
  misc_feature: MA Experiment 20000480 PARAMETER Experiment Name: Zm_Drought_P Parameter: Timepoint (hr) Value: 72
  misc_feature: MA Experiment 20000480 PARAMETER Experiment Name: Zm_Drought_P Parameter: Tissue Value: Aerial
  misc_feature: MA Experiment 20000480 PARAMETER Experiment Name: Zm_Drought_P Parameter: Treatment Value: Drought vs. No Drought
gcacgagaccattacctagaacatcctaatcgaaaaaaaaagagcgggcagtactggtggcccgtggccctggtggggcaccactaggctgctacgtgttcttccccaaatcggcctcacagccctcactgttgcaaagtagggactagggagtacctgctctctcgctctcgcccatcccattgccttcatcatcaaatcgccaccgaaaattccccccaaaaaacaataagcacttgttcatcatcatcagagtaaacacagcagaaccctagcgcgccgttcctccgacgactcacatcccacccactcacccaccccatggcggccaagctctccaccagcgccgacgccccggcctcggtgcggctctccgcagcagcgcaggcggctgcgatccagccctcctctccgcgcttcttcttctcctcgctggccgggaccaacccggcctccccgcatcgccgcatcgccattgccgtcgatctctccgacgagtccgccttcgccgtcaagtgggccgtgcagaactacctccgccccggggacgccgtcgtgctgctccacgtgcgccccacctccgttctctacggcgccgactggggttccatcccggtctccgtcgctgacgaggccgacgctgccgaggacgccgccgccgccgccgagggcggcccctccgaggaggagctgcagaagaagcgggaggaggaatacgacgccttcacctctaccaaggcgcaggacctcgcgcagccgcttgtcgatgcccagatccccttcaagatccatgtcgtcaaggaccacgacatgaaggagcgcctctgcctcgaggctgagcgccttggcctgtccgctatgatcatggggagccgcggttttggggcctctcggaaaggcggcaaggggaggcttgggagtgttagtgattactgtgtacaccactgtgtatgccccgttgtggttgttcgctaccctgatgatgctgcagatgccagtggagatgcatcaggggcgacagatgagttgcacactgtaccagaggacgaacctgtttatcacgatgcgcctgaggtgcagaaagaaaactgaggcaatggccgcaagcagctgaagaacgaaggaaaacatggggcctgtagtgactagtgaggcgattctgtgtatctgaaagatgggactggctgtttatcttcgcttctgtatatcaactgcgtgtcatgatcagtggctgcttcgcgtttgagtttcatatcggagtcctagatcatcgaagtctttgttggtttgcttgtgagatgtttatgttgtgaacaccatgtagagtactcttctcgtaggtagaagctgccttgaagatgcttatgcagttatgctggggtctgggctctcttgtcttgttttgcggagccggtgatgagctttattttctcaaatggtagttatctacacggtattatgtgctctgt

SEQ ID NO: 1536 - protein, 256 aa, Zea mays subsp. mays
  peptide (1)..(256): Ceres Seq. ID no. 12411126
  misc_feature (46)..(217): Pfam Name: Universal stress protein family Pfam Description: Universal stress protein family
  misc_feature (138)..(227): Homolog of NCBI NO: 15232490 NR Description: CHP-rich zinc finger protein, putative; protein
  misc_feature (36)..(221): Homolog of NCBI NO: 18423628 NR Description: putative protein
  misc_feature (36)..(221): Homolog of NCBI NO: 8885586 NR Description: gene_id:F24B18.5~pir||T05756~similar to unknown
  misc_feature (28)..(235): Homolog of NCBI NO: 18416966 NR Description: putative protein
  misc_feature (28)..(235): Homolog of NCBI NO: 7486798 NR Description: hypothetical protein M4I22.130 - Arabidopsis
  misc_feature (41)..(253): Homolog of NCBI NO: 30682187 NR Description: expressed protein [Arabidopsis thaliana]
  misc_feature (41)..(253): Homolog of NCBI NO: 25402657 NR Description: protein T23J18.3 [imported] - Arabidopsis
  misc_feature (1)..(255): Homolog of NCBI NO: 33146953 NR Description: CHP-rich zinc finger protein-like
  misc_feature (1)..(256): Homolog of NCBI NO: 28971968 NR Description: OSJNBb0041B22.10 [Oryza sativa (japonica
  misc_feature (8)..(254): Homolog of NCBI NO: 34910112 NR Description: B1100D10.31 [Oryza sativa (japonica
MAAKLSTSADAPASVRLSAAAQAAAIQPSSPRFFFSSLAGTNPASPHRRIAIAVDLSDESAFAVKWAVQNYLRPGDAVVLLHVRPTSVLYGADWGSIPVSVADEADAAEDAAAAAEGGPSEEELQKKREEEYDAFTSTKAQDLAQPLVDAQIPFKIHVVKDHDMKERLCLEAERLGLSAMIMGSRGFGASRKGGKGRLGSVSDYCVHHCVCPVVVVRYPDDAADASGDASGATDELHTVPEDEPVYHDAPEVQKEN

SEQ ID NO: 1537 - DNA, 1211 bp, Zea mays subsp. mays
  misc_feature (1)..(1211): Ceres Seq. ID no. 12411121
  misc_feature: MA Experiment ID: 108504 Result: Up-regulated in Transcription
  misc_feature: MA Experiment 108504 PARAMETER Experiment Name: Zm_Drought_P Parameter: Age (day) Value: 8
  misc_feature: MA Experiment 108504 PARAMETER Experiment Name: Zm_Drought_P Parameter: Organism Value: Zea mays
  misc_feature: MA Experiment 108504 PARAMETER Experiment Name: Zm_Drought_P Parameter: Plant Line Value: 35A19
  misc_feature: MA Experiment 108504 PARAMETER Experiment Name: Zm_Drought_P Parameter: Timepoint (hr) Value: 12
  misc_feature: MA Experiment 108504 PARAMETER Experiment Name: Zm_Drought_P Parameter: Tissue Value: Aerial
  misc_feature: MA Experiment 108504 PARAMETER Experiment Name: Zm_Drought_P Parameter: Treatment Value: Drought vs. No Drought
  misc_feature: MA Experiment ID: 108515 Result: Up-regulated in Transcription
  misc_feature: MA Experiment 108515 PARAMETER Experiment Name: Zm_2mM_SA_P Parameter: Age (day) Value: 8
  misc_feature: MA Experiment 108515 PARAMETER Experiment Name: Zm_2mM_SA_P Parameter: Organism Value: Zea mays
  misc_feature: MA Experiment 108515 PARAMETER Experiment Name: Zm_2mM_SA_P Parameter: Plant Line Value: 35A19
  misc_feature: MA Experiment 108515 PARAMETER Experiment Name: Zm_2mM_SA_P Parameter: Timepoint (hr) Value: 12
  misc_feature: MA Experiment 108515 PARAMETER Experiment Name: Zm_2mM_SA_P Parameter: Tissue Value: Aerial
  misc_feature: MA Experiment 108515 PARAMETER Experiment Name: Zm_2mM_SA_P Parameter: Treatment Value: 2mM SA vs. No Treatment
  misc_feature: MA Experiment ID: 108527 Result: Up-regulated in Transcription
  misc_feature: MA Experiment 108527 PARAMETER Experiment Name: Zm_5mM_NO_P Parameter: Age (day) Value: 8
  misc_feature: MA Experiment 108527 PARAMETER Experiment Name: Zm_5mM_NO_P Parameter: Organism Value: Zea mays
  misc_feature: MA Experiment 108527 PARAMETER Experiment Name: Zm_5mM_NO_P Parameter: Plant Line Value: 35A19
  misc_feature: MA Experiment 108527 PARAMETER Experiment Name: Zm_5mM_NO_P Parameter: Timepoint (hr) Value: 6
  misc_feature: MA Experiment 108527 PARAMETER Experiment Name: Zm_5mM_NO_P Parameter: Tissue Value: Aerial
  misc_feature: MA Experiment 108527 PARAMETER Experiment Name: Zm_5mM_NO_P Parameter: Treatment Value: 5mM NO vs. No Treatment
  misc_feature: MA Experiment ID: 108535 Result: Down-regulated in Transcription
  misc_feature: MA Experiment 108535 PARAMETER Experiment Name: Zm_Meristem_P Parameter: Age (day) Value: 8
  misc_feature: MA Experiment 108535 PARAMETER Experiment Name: Zm_Meristem_P Parameter: Organism Value: Zea mays
  misc_feature: MA Experiment 108535 PARAMETER Experiment Name: Zm_Meristem_P Parameter: Plant Line Value: 35A19
  misc_feature: MA Experiment 108535 PARAMETER Experiment Name: Zm_Meristem_P Parameter: Tissue Value: Root Meristem vs. Above Root Meristem
  misc_feature: MA Experiment ID: 108536 Result: Down-regulated in Transcription
  misc_feature: MA Experiment 108536 PARAMETER Experiment Name: Zm_Meristem_P Parameter: Age (day) Value: 8
  misc_feature: MA Experiment 108536 PARAMETER Experiment Name: Zm_Meristem_P Parameter: Organism Value: Zea mays
  misc_feature: MA Experiment 108536 PARAMETER Experiment Name: Zm_Meristem_P Parameter: Plant Line Value: 35A19
  misc_feature: MA Experiment 108536 PARAMETER Experiment Name: Zm_Meristem_P Parameter: Tissue Value: Shoot Meristem vs. Above Shoot Meristem
  misc_feature: MA Experiment ID: 108544 Result: Up-regulated in Transcription
  misc_feature: MA Experiment ID: 108556 Result: Up-regulated in Transcription
  misc_feature: MA Experiment 108556 PARAMETER Experiment Name: Zm_Drought_P Parameter: Age (day) Value: 9
  misc_feature: MA Experiment 108556 PARAMETER Experiment Name: Zm_Drought_P Parameter: Organism Value: Zea mays
  misc_feature: MA Experiment 108556 PARAMETER Experiment Name: Zm_Drought_P Parameter: Plant Line Value: 35A19
  misc_feature: MA Experiment 108556 PARAMETER Experiment Name: Zm_Drought_P Parameter: Timepoint (hr) Value: 24
  misc_feature: MA Experiment 108556 PARAMETER Experiment Name: Zm_Drought_P Parameter: Tissue Value: Aerial
  misc_feature: MA Experiment 108556 PARAMETER Experiment Name: Zm_Drought_P Parameter: Treatment Value: Drought vs. No Drought
  misc_feature: MA Experiment ID: 108597 Result: Up-regulated in Transcription
  misc_feature: MA Experiment 108597 PARAMETER Experiment Name: Zm_100uM_ABA_P Parameter: Age (day) Value: 9
  misc_feature: MA Experiment 108597 PARAMETER Experiment Name: Zm_100uM_ABA_P Parameter: Organism Value: Zea mays
  misc_feature: MA Experiment 108597 PARAMETER Experiment Name: Zm_100uM_ABA_P Parameter: Plant Line Value: 35A19
  misc_feature: MA Experiment 108597 PARAMETER Experiment Name: Zm_100uM_ABA_P Parameter: Timepoint (hr) Value: 24
  misc_feature: MA Experiment 108597 PARAMETER Experiment Name: Zm_100uM_ABA_P Parameter: Tissue Value: Aerial
  misc_feature: MA Experiment 108597 PARAMETER Experiment Name: Zm_100uM_ABA_P Parameter: Treatment Value: 100uM ABA vs. No Treatment
  misc_feature: MA Experiment ID: 20000477 Result: Up-regulated in Transcription
  misc_feature: MA Experiment 20000477 PARAMETER Experiment Name: Zm_5mM_SA_P Parameter: Age (day) Value: 10
  misc_feature: MA Experiment 20000477 PARAMETER Experiment Name: Zm_5mM_SA_P Parameter: Organism Value: Zea mays
  misc_feature: MA Experiment 20000477 PARAMETER Experiment Name: Zm_5mM_SA_P Parameter: Plant Line Value: 35A19
  misc_feature: MA Experiment 20000477 PARAMETER Experiment Name: Zm_5mM_SA_P Parameter: Timepoint (hr) Value: 48
  misc_feature: MA Experiment 20000477 PARAMETER Experiment Name: Zm_5mM_SA_P Parameter: Tissue Value: Aerial
  misc_feature: MA Experiment 20000477 PARAMETER Experiment Name: Zm_5mM_SA_P Parameter: Treatment Value: 5mM SA vs. No Treatment
  misc_feature: MA Experiment ID: 20000480 Result: Up-regulated in Transcription
  misc_feature: MA Experiment 20000480 PARAMETER Experiment Name: Zm_Drought_P Parameter: Age (day) Value: 11
  misc_feature: MA Experiment 20000480 PARAMETER Experiment Name: Zm_Drought_P Parameter: Organism Value: Zea mays
  misc_feature: MA Experiment 20000480 PARAMETER Experiment Name: Zm_Drought_P Parameter: Plant Line Value: 35A19
  misc_feature: MA Experiment 20000480 PARAMETER Experiment Name: Zm_Drought_P Parameter: Timepoint (hr) Value: 72
  misc_feature: MA Experiment 20000480 PARAMETER Experiment Name: Zm_Drought_P Parameter: Tissue Value: Aerial
  misc_feature: MA Experiment 20000480 PARAMETER Experiment Name: Zm_Drought_P Parameter: Treatment Value: Drought vs. No Drought
  misc_feature: MA Experiment ID: 20000535 Result: Down-regulated in Transcription
  misc_feature: MA Experiment 20000535 PARAMETER Experiment Name: Zm_Hybrid_Seed_Dev_P Parameter: DAP Value: 30 vs. 12
  misc_feature: MA Experiment 20000535 PARAMETER Experiment Name: Zm_Hybrid_Seed_Dev_P Parameter: Organism Value: Zea mays
  misc_feature: MA Experiment 20000535 PARAMETER Experiment Name: Zm_Hybrid_Seed_Dev_P Parameter: Plant Line Value: 35A19
  misc_feature: MA Experiment 20000535 PARAMETER Experiment Name: Zm_Hybrid_Seed_Dev_P Parameter: Tissue Value: Embryo vs. Unfert Floret
  misc_feature: MA Experiment ID: 20001606 Result: Down-regulated in Transcription
  misc_feature: MA Experiment 20001606 PARAMETER Experiment Name: Zm_50ppm_KNO3_L-to-H_P Parameter: Age (day) Value: 19
  misc_feature: MA Experiment 20001606 PARAMETER Experiment Name: Zm_50ppm_KNO3_L-to-H_P Parameter: Organism Value: Zea mays
  misc_feature: MA Experiment 20001606 PARAMETER Experiment Name: Zm_50ppm_KNO3_L-to-H_P Parameter: Plant Line Value: 35A19
  misc_feature: MA Experiment 20001606 PARAMETER Experiment Name: Zm_50ppm_KNO3_L-to-H_P Parameter: Timepoint (hr) Value: 8
  misc_feature: MA Experiment 20001606 PARAMETER Experiment Name: Zm_50ppm_KNO3_L-to-H_P Parameter: Tissue Value: Shoots
  misc_feature: MA Experiment 20001606 PARAMETER Experiment Name: Zm_50ppm_KNO3_L-to-H_P Parameter: Treatment Value: 50ppm KNO3 vs. 50ppm KCl
acacatttcaatcactcgcttcccatgaattcgctcgctttccctagctgcccgtcagcattgacgcccgcctccaccaccgcccccgcgtcctctccctttccctcgccgcgtataaagattcgctgcccgcgacaagaagatgcagctcattaccacctccgcctccgcgatcgaagctcctcacaaaccgttatcgtcgccatggcagccgccgcgcctgcaagctccgtgaaggaagtgctgccatctcccctgacctccgcctccgagccccctcccctcttcgatggcaccaccaggctgtacgttgcctatcattgcccgtacgcgcagcgcgcttggattgccaggaactacaagggtttgcaggacaagattaagatagtcgccatcgatcttgctgacaggccaacatggtacaaggagaaggtttatccagaaaacaaggtgccttctctggagcacaacaaccaggtgaaaggtgagagtttggatctggtcaagtacattgacagcaactttgaaggcccatcgttgctcccagaggatccttcaaaaaagcagttcgctgaggagctgcttgcatatactgatgcatttaacaaagcattatacttttgtatagtctccaaggaagatgtgtctgaggaagctgtcgctgctttggataaaatagaagacgccctcgggaaattcaacgagggtccattctcccttggtcagttcagtctggtggacattgcgtatgtaccattcatcgagaggtttcagatattctattccaacataaagaactatgatattacaaagggcagacccaaccttcagaagttcattgaggaagtggacaagattgatgcatacacacagactaaacaggacccacagtttttacttgagcagacaaagaagcggcttgggattgcttaaagcttgcggccgaggatgactctcgacagaaataccagcatagtagatcgacacttgtttagtcatttgtgtgcttgaataatgaatactacatatatggttttcaataagacatggtcctctatactgggttgtacttctgaaaacaaactagttgtcctgatattatagctttcgtggtgtgtttacgtcactgtatatgaaagggtggggagagagaatgatatgccatgtattctgtcaaatgtttttttataatgtcaagagctctgactttt

SEQ ID NO: 1538 - protein, 310 aa, Zea mays subsp. mays
  peptide (1)..(310): Ceres Seq. ID no. 12411122
  misc_feature (70)..(310): Homolog of NCBI NO: 1352460 NR Description: IN2-1 PROTEIN
  misc_feature (70)..(310): Homolog of NCBI NO: 7489703 NR Description: safener-induced In2.1-like protein - wheat
  misc_feature (70)..(307): Homolog of NCBI NO: 24796810 NR Description: putative glutathione S-transferase
  misc_feature (70)..(310): Homolog of NCBI NO: 7939638 NR Description: XIG [Oryza sativa]
  misc_feature (67)..(310): Homolog of NCBI NO: 24796806 NR Description: putative glutathione S-transferase
THFNHSLPMNSLAFPSCPSALTPASTTAPASSPFPSPRIKIRCPRQEDAAHYHLRLRDRSSSQTVIVAMAAAAPASSVKEVLPSPLTSASEPPPLFDGTTRLYVAYHCPYAQRAWIARNYKGLQDKIKIVAIDLADRPTWYKEKVYPENKVPSLEHNNQVKGESLDLVKYIDSNFEGPSLLPEDPSKKQFAEELLAYTDAFNKALYFCIVSKEDVSEEAVAALDKIEDALGKFNEGPFSLGQFSLVDIAYVPFIERFQIFYSNIKNYDITKGRPNLQKFIEEVDKIDAYTQTKQDPQFLLEQTKKRLGIA

SEQ ID NO: 1539 - protein, 302 aa, Zea mays subsp. mays
  peptide (1)..(302): Ceres Seq. ID no. 12411123
  misc_feature (62)..(302): Homolog of NCBI NO: 1352460 NR Description: IN2-1 PROTEIN
  misc_feature (62)..(302): Homolog of NCBI NO: 7489703 NR Description: safener-induced In2.1-like protein - wheat
  misc_feature (62)..(299): Homolog of NCBI NO: 24796810 NR Description: putative glutathione S-transferase
  misc_feature (62)..(302): Homolog of NCBI NO: 7939638 NR Description: XIG [Oryza sativa]
  misc_feature (59)..(302): Homolog of NCBI NO: 24796806 NR Description: putative glutathione S-transferase
MNSLAFPSCPSALTPASTTAPASSPFPSPRIKIRCPRQEDAAHYHLRLRDRSSSQTVIVAMAAAAPASSVKEVLPSPLTSASEPPPLFDGTTRLYVAYHCPYAQRAWIARNYKGLQDKIKIVAIDLADRPTWYKEKVYPENKVPSLEHNNQVKGESLDLVKYIDSNFEGPSLLPEDPSKKQFAEELLAYTDAFNKALYFCIVSKEDVSEEAVAALDKIEDALGKFNEGPFSLGQFSLVDIAYVPFIERFQIFYSNIKNYDITKGRPNLQKFIEEVDKIDAYTQTKQDPQFLLEQTKKRLGIA

SEQ ID NO: 1540 - protein, 242 aa, Zea mays subsp. mays
  peptide (1)..(242): Ceres Seq. ID no. 12411124
  misc_feature (2)..(242): Homolog of NCBI NO: 1352460 NR Description: IN2-1 PROTEIN
  misc_feature (2)..(242): Homolog of NCBI NO: 7489703 NR Description: safener-induced In2.1-like protein - wheat
  misc_feature (2)..(239): Homolog of NCBI NO: 24796810 NR Description: putative glutathione S-transferase
  misc_feature (2)..(242): Homolog of NCBI NO: 7939638 NR Description: XIG [Oryza sativa]
  misc_feature (1)..(242): Homolog of NCBI NO: 24796806 NR Description: putative glutathione S-transferase
MAAAAPASSVKEVLPSPLTSASEPPPLFDGTTRLYVAYHCPYAQRAWIARNYKGLQDKIKIVAIDLADRPTWYKEKVYPENKVPSLEHNNQVKGESLDLVKYIDSNFEGPSLLPEDPSKKQFAEELLAYTDAFNKALYFCIVSKEDVSEEAVAALDKIEDALGKFNEGPFSLGQFSLVDIAYVPFIERFQIFYSNIKNYDITKGRPNLQKFIEEVDKIDAYTQTKQDPQFLLEQTKKRLGIA

SEQ ID NO: 1541 - DNA, 1877 bp, Zea mays subsp. mays
  misc_feature (1)..(1877): Ceres Seq. ID no. 12411117
  misc_feature: MA Experiment ID: 108504 Result: Up-regulated in Transcription
  misc_feature: MA Experiment 108504 PARAMETER Experiment Name: Zm_Drought_P Parameter: Age (day) Value: 8
  misc_feature: MA Experiment 108504 PARAMETER Experiment Name: Zm_Drought_P Parameter: Organism Value: Zea mays
  misc_feature: MA Experiment 108504 PARAMETER Experiment Name: Zm_Drought_P Parameter: Plant Line Value: 35A19
  misc_feature: MA Experiment 108504 PARAMETER Experiment Name: Zm_Drought_P Parameter: Timepoint (hr) Value: 12
  misc_feature: MA Experiment 108504 PARAMETER Experiment Name: Zm_Drought_P Parameter: Tissue Value: Aerial
  misc_feature: MA Experiment 108504 PARAMETER Experiment Name: Zm_Drought_P Parameter: Treatment Value: Drought vs. No Drought
  misc_feature: MA Experiment ID: 108530 Result: Down-regulated in Transcription
  misc_feature: MA Experiment 108530 PARAMETER Experiment Name: Zm_Imbibed_Seeds_P Parameter: Age (day) Value: 6 vs. 2
  misc_feature: MA Experiment 108530 PARAMETER Experiment Name: Zm_Imbibed_Seeds_P Parameter: Organism Value: Zea mays
  misc_feature: MA Experiment 108530 PARAMETER Experiment Name: Zm_Imbibed_Seeds_P Parameter: Plant Line Value: 35A19
  misc_feature: MA Experiment 108530 PARAMETER Experiment Name: Zm_Imbibed_Seeds_P Parameter: Tissue Value: Aerial vs. Embryo
  misc_feature: MA Experiment ID: 108534 Result: Down-regulated in Transcription
  misc_feature: MA Experiment 108534 PARAMETER Experiment Name: Zm_4deg_Cold_P Parameter: Age (hr) Value: 8
  misc_feature: MA Experiment 108534 PARAMETER Experiment Name: Zm_4deg_Cold_P Parameter: Organism Value: Zea mays
  misc_feature: MA Experiment 108534 PARAMETER Experiment Name: Zm_4deg_Cold_P Parameter: Plant Line Value: 35A19
  misc_feature: MA Experiment 108534 PARAMETER Experiment Name: Zm_4deg_Cold_P Parameter: Temperature (deg C) Value: 4 vs. 22
  misc_feature: MA Experiment 108534 PARAMETER Experiment Name: Zm_4deg_Cold_P Parameter: Timepoint (hr) Value: 6
  misc_feature: MA Experiment 108534 PARAMETER Experiment Name: Zm_4deg_Cold_P Parameter: Tissue Value: Aerial
  misc_feature: MA Experiment ID: 108540 Result: Up-regulated in Transcription
  misc_feature: MA Experiment 108540 PARAMETER Experiment Name: Zm_20percent_PEG_P Parameter: Age (day) Value: 8
  misc_feature: MA Experiment 108540 PARAMETER Experiment Name: Zm_20percent_PEG_P Parameter: Organism Value: Zea mays
  misc_feature: MA Experiment 108540 PARAMETER Experiment Name: Zm_20percent_PEG_P Parameter: Plant Line Value: 35A19
  misc_feature: MA Experiment 108540 PARAMETER Experiment Name: Zm_20percent_PEG_P Parameter: Timepoint (hr) Value: 6
  misc_feature: MA Experiment 108540 PARAMETER Experiment Name: Zm_20percent_PEG_P Parameter: Tissue Value: Aerial
  misc_feature: MA Experiment 108540 PARAMETER Experiment Name: Zm_20percent_PEG_P Parameter: Treatment Value: 20percent PEG vs. No Treatment
  misc_feature: MA Experiment ID: 108543 Result: Up-regulated in Transcription
  misc_feature: MA Experiment ID: 108544 Result: Up-regulated in Transcription
  misc_feature: MA Experiment ID: 108556 Result: Up-regulated in Transcription
  misc_feature: MA Experiment 108556 PARAMETER Experiment Name: Zm_Drought_P Parameter: Age (day) Value: 9
  misc_feature: MA Experiment 108556 PARAMETER Experiment Name: Zm_Drought_P Parameter: Organism Value: Zea mays
  misc_feature: MA Experiment 108556 PARAMETER Experiment Name: Zm_Drought_P Parameter: Plant Line Value: 35A19
  misc_feature: MA Experiment 108556 PARAMETER Experiment Name: Zm_Drought_P Parameter: Timepoint (hr) Value: 24
  misc_feature: MA Experiment 108556 PARAMETER Experiment Name: Zm_Drought_P Parameter: Tissue Value: Aerial
  misc_feature: MA Experiment 108556 PARAMETER Experiment Name: Zm_Drought_P Parameter: Treatment Value: Drought vs. No Drought
  misc_feature: MA Experiment ID: 20000477 Result: Up-regulated in Transcription
  misc_feature: MA Experiment 20000477 PARAMETER Experiment Name: Zm_5mM_SA_P Parameter: Age (day) Value: 10
  misc_feature: MA Experiment 20000477 PARAMETER Experiment Name: Zm_5mM_SA_P Parameter: Organism Value: Zea mays
  misc_feature: MA Experiment 20000477 PARAMETER Experiment Name: Zm_5mM_SA_P Parameter: Plant Line Value: 35A19
  misc_feature: MA Experiment 20000477 PARAMETER Experiment Name: Zm_5mM_SA_P Parameter: Timepoint (hr) Value: 48
  misc_feature: MA Experiment 20000477 PARAMETER Experiment Name: Zm_5mM_SA_P Parameter: Tissue Value: Aerial
  misc_feature: MA Experiment 20000477 PARAMETER Experiment Name: Zm_5mM_SA_P Parameter: Treatment Value: 5mM SA vs. No Treatment
  misc_feature: MA Experiment ID: 20000478 Result: Up-regulated in Transcription
  misc_feature: MA Experiment 20000478 PARAMETER Experiment Name: Zm_5mM_SA_P Parameter: Age (day) Value: 11
  misc_feature: MA Experiment 20000478 PARAMETER Experiment Name: Zm_5mM_SA_P Parameter: Organism Value: Zea mays
  misc_feature: MA Experiment 20000478 PARAMETER Experiment Name: Zm_5mM_SA_P Parameter: Plant Line Value: 35A19
  misc_feature: MA Experiment 20000478 PARAMETER Experiment Name: Zm_5mM_SA_P Parameter: Timepoint (hr) Value: 72
  misc_feature: MA Experiment 20000478 PARAMETER Experiment Name: Zm_5mM_SA_P Parameter: Tissue Value: Aerial
  misc_feature: MA Experiment 20000478 PARAMETER Experiment Name: Zm_5mM_SA_P Parameter: Treatment Value: 5mM SA vs. No Treatment
  misc_feature: MA Experiment ID: 20000479 Result: Up-regulated in Transcription
  misc_feature: MA Experiment 20000479 PARAMETER Experiment Name: Zm_Drought_P Parameter: Age (day) Value: 10
  misc_feature: MA Experiment 20000479 PARAMETER Experiment Name: Zm_Drought_P Parameter: Organism Value: Zea mays
  misc_feature: MA Experiment 20000479 PARAMETER Experiment Name: Zm_Drought_P Parameter: Plant Line Value: 35A19
  misc_feature: MA Experiment 20000479 PARAMETER Experiment Name: Zm_Drought_P Parameter: Timepoint (hr) Value: 48
  misc_feature: MA Experiment 20000479 PARAMETER Experiment Name: Zm_Drought_P Parameter: Tissue Value: Aerial
  misc_feature: MA Experiment 20000479 PARAMETER Experiment Name: Zm_Drought_P Parameter: Treatment Value: Drought vs. No Drought
  misc_feature: MA Experiment ID: 20000480 Result: Up-regulated in Transcription
  misc_feature: MA Experiment 20000480 PARAMETER Experiment Name: Zm_Drought_P Parameter: Age (day) Value: 11
  misc_feature: MA Experiment 20000480 PARAMETER Experiment Name: Zm_Drought_P Parameter: Organism Value: Zea mays
  misc_feature: MA Experiment 20000480 PARAMETER Experiment Name: Zm_Drought_P Parameter: Plant Line Value: 35A19
  misc_feature: MA Experiment 20000480 PARAMETER Experiment Name: Zm_Drought_P Parameter: Timepoint (hr) Value: 72
  misc_feature: MA Experiment 20000480 PARAMETER Experiment Name: Zm_Drought_P Parameter: Tissue Value: Aerial
  misc_feature: MA Experiment 20000480 PARAMETER Experiment Name: Zm_Drought_P Parameter: Treatment Value: Drought vs. No Drought
  misc_feature: MA Experiment ID: 20000488 Result: Down-regulated in Transcription
  misc_feature: MA Experiment 20000488 PARAMETER Experiment Name: Zm_50mM_NH4NO3_L_to_H_P Parameter: Organism Value: Zea mays
  misc_feature: MA Experiment 20000488 PARAMETER Experiment Name: Zm_50mM_NH4NO3_L_to_H_P Parameter: Timepoint (hr) Value: 8
  misc_feature: MA Experiment 20000488 PARAMETER Experiment Name: Zm_50mM_NH4NO3_L_to_H_P Parameter: Tissue Value: Leaves
  misc_feature: MA Experiment 20000488 PARAMETER Experiment Name: Zm_50mM_NH4NO3_L_to_H_P Parameter: Treatment Value: 50mM NH4NO3 vs. 100mM Mannitol
  misc_feature: MA Experiment ID: 20000534 Result: Down-regulated in Transcription
  misc_feature: MA Experiment 20000534 PARAMETER Experiment Name: Zm_Hybrid_Pollen_P Parameter: Age (day) Value: 8
  misc_feature: MA Experiment 20000534 PARAMETER Experiment Name: Zm_Hybrid_Pollen_P Parameter: Organism Value: Zea mays
  misc_feature: MA Experiment 20000534 PARAMETER Experiment Name: Zm_Hybrid_Pollen_P Parameter: Plant Line Value: 35A19
  misc_feature: MA Experiment 20000534 PARAMETER Experiment Name: Zm_Hybrid_Pollen_P Parameter: Tissue Value: Pollen vs. Aerial
aaaatacaactcagtctcagtcccccaccacatccgctccccgccttccgcttccctaccccccgcatcacctaccaacgccgacaccatgggggccttcgcgaaggaggagcaccagttcctcgccgagctcggcctcgcgcagcgcaacccgggcgcgttcgcatgcggtgcgtggggcggctcaggtcccaccgtcacctccacgagcccgaccaacaatcaggtcatcgcagaggtcgtggaggcgtccgtgcacgactacgaggagggcatgcgcgcctgcttcgacgccgctaagacatggatggcgattcctgctccaaagcgaggagagatcgttaggcaaatcggtgatgcactgagagcaaagctccatcaccttggcaggcttgtgtcacttgagatggggaaaattcttcctgaagggatcggtgaggttcaggaaatcattgacatgtgtgattatgctgtgggactaagtcgccaactaaatggatccattataccatctgaacgaccaaaccatatgatgatggaggtgtggaatccccttggagttgtgggtgttataacggcatttaatttcccttgtgctgtgcttggttggaatgcttgcattgctttggtctgtggaaattgtgtcgtctggaaaggtgctccaacaactccactgatcactattgcaatgacaaaaatagtggctagtgtattggagaagaacaacttaccaggcgcaatttttacatctttttgtgggggcactgaaattggtcaagcaattgcccttgacattaggatacctttggtttcattcactggaagtacaagggctggtctaatggttcagcaacaagttagtgcaagatttggtaaatgccttcttgaacttagcggaaacaatgccatcattgttatggatgatgcagatatccagctagctgtgcgatctgtcttgttcgctgctgttggtacagcaggacaacgctgcactacatgtcgtaggctgattcttcatgagaacatatatcaaaccttccttgatcagcttgttgaggtatacaaacaagtccgaattggggatccgttggagaaaggcaccttactgggaccactgcacactcctgcttcaaaagagaactttttgaaaggcattcagactatcaaatctcagggagggaaaatcctttttggaggatctgccattgaatcagaaggaaactttgtgcaaccaacaattgtggaaattacaccttctgcaccagttgtgaaagaagaactctttggtcctgtcctttatgctatgaaatttcagaccttgaaggaagcaattgaaatcaataactctgttcctcaaggattgagcagttctatatttacaaagaggccagatattatttttaagtggctcgggccccatggtagtgattgtggcatagtgaatgtgaacatacctactaatggtgctgaaattggtggagcatttggtggagaaaaagcaactggtggtggacgagaagcagggagtgattcctggaagcagtacatgaggagggcgacttgtacaatcaactatgggagcgagctacctctagcccagggaatcaattttggttaatcctgcagaaatgttgcccgtggatctcggtgttttctgcagacgtggatgccgtacggaaagaactgatgcaaccgcatttgagatctcagcagacttgagcagcatttattggcgtcagttgtgaaacttaaactgcaggagcatcttgtacataaataaaataagatgtttgttgctcgtgggccgtggcacattttggtaccggtgtccagtctactaataaaatctaatgcaaaacggtcataactacattctc

SEQ ID NO: 1542 - protein, 538 aa, Zea mays subsp. mays
  peptide (1)..(538): Ceres Seq. ID no. 12411118
  misc_feature (30)..(538): Homolog of NCBI NO: 15221042 NR Description: aldehyde dehydrogenase homolog, putative
  misc_feature (30)..(538): Homolog of NCBI NO: 25090068 NR Description: Aldehyde dehydrogenase family 7 member A1
  misc_feature (30)..(538): Homolog of NCBI NO: 11995457 NR Description: aldehyde dehydrogenase [Oryza sativa]
KYNSVSVPHHIRSPPSASLPPASPTNADTMGAFAKEEHQFLAELGLAQRNPGAFACGAWGGSGPTVTSTSPTNNQVIAEVVEASVHDYEEGMRACFDAAKTWMAIPAPKRGEIVRQIGDALRAKLHHLGRLVSLEMGKILPEGIGEVQEIIDMCDYAVGLSRQLNGSIIPSERPNHMMMEVWNPLGVVGVITAFNFPCAVLGWNACIALVCGNCVVWKGAPTTPLITIAMTKIVASVLEKNNLPGAIFTSFCGGTEIGQAIALDIRIPLVSFTGSTRAGLMVQQQVSARFGKCLLELSGNNAIIVMDDADIQLAVRSVLFAAVGTAGQRCTTCRRLILHENIYQTFLDQLVEVYKQVRIGDPLEKGTLLGPLHTPASKENFLKGIQTIKSQGGKILFGGSAIESEGNFVQPTIVEITPSAPVVKEELFGPVLYAMKFQTLKEAIEINNSVPQGLSSSIFTKRPDIIFKWLGPHGSDCGIVNVNIPTNGAEIGGAFGGEKATGGGREAGSDSWKQYMRRATCTINYGSELPLAQGINFG

SEQ ID NO: 1543 - protein, 509 aa, Zea mays subsp. mays
  peptide (1)..(509): Ceres Seq. ID no. 12411119
  misc_feature (1)..(509): Homolog of NCBI NO: 15221042 NR Description: aldehyde dehydrogenase homolog, putative
  misc_feature (1)..(509): Homolog of NCBI NO: 25090068 NR Description: Aldehyde dehydrogenase family 7 member A1
  misc_feature (1)..(509): Homolog of NCBI NO: 11995457 NR Description: aldehyde dehydrogenase [Oryza sativa]
MGAFAKEEHQFLAELGLAQRNPGAFACGAWGGSGPTVTSTSPTNNQVIAEVVEASVHDYEEGMRACFDAAKTWMAIPAPKRGEIVRQIGDALRAKLHHLGRLVSLEMGKILPEGIGEVQEIIDMCDYAVGLSRQLNGSIIPSERPNHMMMEVWNPLGVVGVITAFNFPCAVLGWNACIALVCGNCVVWKGAPTTPLITIAMTKIVASVLEKNNLPGAIFTSFCGGTEIGQAIALDIRIPLVSFTGSTRAGLMVQQQVSARFGKCLLELSGNNAIIVMDDADIQLAVRSVLFAAVGTAGQRCTTCRRLILHENIYQTFLDQLVEVYKQVRIGDPLEKGTLLGPLHTPASKENFLKGIQTIKSQGGKILFGGSAIESEGNFVQPTIVEITPSAPVVKEELFGPVLYAMKFQTLKEAIEINNSVPQGLSSSIFTKRPDIIFKWLGPHGSDCGIVNVNIPTNGAEIGGAFGGEKATGGGREAGSDSWKQYMRRATCTINYGSELPLAQGINFG

SEQ ID NO: 1544 - protein, 447 aa, Zea mays subsp. mays
  peptide (1)..(447): Ceres Seq. ID no. 12411120
  misc_feature (1)..(447): Homolog of NCBI NO: 15221042 NR Description: aldehyde dehydrogenase homolog, putative
  misc_feature (1)..(447): Homolog of NCBI NO: 25090068 NR Description: Aldehyde dehydrogenase family 7 member A1
  misc_feature (1)..(447): Homolog of NCBI NO: 11995457 NR Description: aldehyde dehydrogenase [Oryza sativa]
MRACFDAAKTWMAIPAPKRGEIVRQIGDALRAKLHHLGRLVSLEMGKILPEGIGEVQEIIDMCDYAVGLSRQLNGSIIPSERPNHMMMEVWNPLGVVGVITAFNFPCAVLGWNACIALVCGNCVVWKGAPTTPLITIAMTKIVASVLEKNNLPGAIFTSFCGGTEIGQAIALDIRIPLVSFTGSTRAGLMVQQQVSARFGKCLLELSGNNAIIVMDDADIQLAVRSVLFAAVGTAGQRCTTCRRLILHENIYQTFLDQLVEVYKQVRIGDPLEKGTLLGPLHTPASKENFLKGIQTIKSQGGKILFGGSAIESEGNFVQPTIVEITPSAPVVKEELFGPVLYAMKFQTLKEAIEINNSVPQGLSSSIFTKRPDIIFKWLGPHGSDCGIVNVNIPTNGAEIGGAFGGEKATGGGREAGSDSWKQYMRRATCTINYGSELPLAQGINFG

SEQ ID NO: 1545 - DNA, 1660 bp, Zea mays subsp. mays
  misc_feature (1)..(1660): Ceres Seq. ID no. 12407366
  misc_feature: MA Experiment ID: 108504 Result: Down-regulated in Transcription
  misc_feature: MA Experiment 108504 PARAMETER Experiment Name: Zm_Drought_P Parameter: Age (day) Value: 8
  misc_feature: MA Experiment 108504 PARAMETER Experiment Name: Zm_Drought_P Parameter: Organism Value: Zea mays
  misc_feature: MA Experiment 108504 PARAMETER Experiment Name: Zm_Drought_P Parameter: Plant Line Value: 35A19
  misc_feature: MA Experiment 108504 PARAMETER Experiment Name: Zm_Drought_P Parameter: Timepoint (hr) Value: 12
  misc_feature: MA Experiment 108504 PARAMETER Experiment Name: Zm_Drought_P Parameter: Tissue Value: Aerial
  misc_feature: MA Experiment 108504 PARAMETER Experiment Name: Zm_Drought_P Parameter: Treatment Value: Drought vs. No Drought
  misc_feature: MA Experiment ID: 108522 Result: Down-regulated in Transcription
  misc_feature: MA Experiment 108522 PARAMETER Experiment Name: Zm_42deg_Heat_P Parameter: Age (day) Value: 8
  misc_feature: MA Experiment 108522 PARAMETER Experiment Name: Zm_42deg_Heat_P Parameter: Organism Value: Zea mays
  misc_feature: MA Experiment 108522 PARAMETER Experiment Name: Zm_42deg_Heat_P Parameter: Plant Line Value: 35A19
  misc_feature: MA Experiment 108522 PARAMETER Experiment Name: Zm_42deg_Heat_P Parameter: Temperature (deg C) Value: 42 vs. 22
  misc_feature: MA Experiment 108522 PARAMETER Experiment Name: Zm_42deg_Heat_P Parameter: Timepoint (hr) Value: 1
  misc_feature: MA Experiment 108522 PARAMETER Experiment Name: Zm_42deg_Heat_P Parameter: Tissue Value: Aerial
  misc_feature: MA Experiment ID: 108527 Result: Down-regulated in Transcription
  misc_feature: MA Experiment 108527 PARAMETER Experiment Name: Zm_5mM_NO_P Parameter: Age (day) Value: 8
  misc_feature: MA Experiment 108527 PARAMETER Experiment Name: Zm_5mM_NO_P Parameter: Organism Value: Zea mays
  misc_feature: MA Experiment 108527 PARAMETER Experiment Name: Zm_5mM_NO_P Parameter: Plant Line Value: 35A19
  misc_feature: MA Experiment 108527 PARAMETER Experiment Name: Zm_5mM_NO_P Parameter: Timepoint (hr) Value: 6
  misc_feature: MA Experiment 108527 PARAMETER Experiment Name: Zm_5mM_NO_P Parameter: Tissue Value: Aerial
  misc_feature: MA Experiment 108527 PARAMETER Experiment Name: Zm_5mM_NO_P Parameter: Treatment Value: 5mM NO vs. No Treatment
  misc_feature: MA Experiment ID: 108528 Result: Up-regulated in Transcription
  misc_feature: MA Experiment 108528 PARAMETER Experiment Name: Zm_Imbibed_Seeds_P Parameter: Age (day) Value: 5 vs. 2
  misc_feature: MA Experiment 108528 PARAMETER Experiment Name: Zm_Imbibed_Seeds_P Parameter: Organism Value: Zea mays
  misc_feature: MA Experiment 108528 PARAMETER Experiment Name: Zm_Imbibed_Seeds_P Parameter: Plant Line Value: 35A19
  misc_feature: MA Experiment 108528 PARAMETER Experiment Name: Zm_Imbibed_Seeds_P Parameter: Tissue Value: Aerial vs. Embryo
  misc_feature: MA Experiment ID: 108530 Result: Up-regulated in Transcription
  misc_feature: MA Experiment 108530 PARAMETER Experiment Name: Zm_Imbibed_Seeds_P Parameter: Age (day) Value: 6 vs. 2
  misc_feature: MA Experiment 108530 PARAMETER Experiment Name: Zm_Imbibed_Seeds_P Parameter: Organism Value: Zea mays
  misc_feature: MA Experiment 108530 PARAMETER Experiment Name: Zm_Imbibed_Seeds_P Parameter: Plant Line Value: 35A19
  misc_feature: MA Experiment 108530 PARAMETER Experiment Name: Zm_Imbibed_Seeds_P Parameter: Tissue Value: Aerial vs. Embryo
  misc_feature: MA Experiment ID: 108535 Result: Down-regulated in Transcription
  misc_feature: MA Experiment 108535 PARAMETER Experiment Name: Zm_Meristem_P Parameter: Age (day) Value: 8
  misc_feature: MA Experiment 108535 PARAMETER Experiment Name: Zm_Meristem_P Parameter: Organism Value: Zea mays
  misc_feature: MA Experiment 108535 PARAMETER Experiment Name: Zm_Meristem_P Parameter: Plant Line Value: 35A19
  misc_feature: MA Experiment 108535 PARAMETER Experiment Name: Zm_Meristem_P Parameter: Tissue Value: Root Meristem vs. Above Root Meristem
  misc_feature: MA Experiment ID: 20000478 Result: Down-regulated in Transcription
  misc_feature: MA Experiment 20000478 PARAMETER Experiment Name: Zm_5mM_SA_P Parameter: Age (day) Value: 11
  misc_feature: MA Experiment 20000478 PARAMETER Experiment Name: Zm_5mM_SA_P Parameter: Organism Value: Zea mays
  misc_feature: MA Experiment 20000478 PARAMETER Experiment Name: Zm_5mM_SA_P Parameter: Plant Line Value: 35A19
  misc_feature: MA Experiment 20000478 PARAMETER Experiment Name: Zm_5mM_SA_P Parameter: Timepoint (hr) Value: 72
  misc_feature: MA Experiment 20000478 PARAMETER Experiment Name: Zm_5mM_SA_P Parameter: Tissue Value: Aerial
  misc_feature: MA Experiment 20000478 PARAMETER Experiment Name: Zm_5mM_SA_P Parameter: Treatment Value: 5mM SA vs. No Treatment
  misc_feature: MA Experiment ID: 20000479 Result: Down-regulated in Transcription
  misc_feature: MA Experiment 20000479 PARAMETER Experiment Name: Zm_Drought_P Parameter: Age (day) Value: 10
  misc_feature: MA Experiment 20000479 PARAMETER Experiment Name: Zm_Drought_P Parameter: Organism Value: Zea mays
  misc_feature: MA Experiment 20000479 PARAMETER Experiment Name: Zm_Drought_P Parameter: Plant Line Value: 35A19
  misc_feature: MA Experiment 20000479 PARAMETER Experiment Name: Zm_Drought_P Parameter: Timepoint (hr) Value: 48
  misc_feature: MA Experiment 20000479 PARAMETER Experiment Name: Zm_Drought_P Parameter: Tissue Value: Aerial
  misc_feature: MA Experiment 20000479 PARAMETER Experiment Name: Zm_Drought_P Parameter: Treatment Value: Drought vs. No Drought
  misc_feature: MA Experiment ID: 20000480 Result: Down-regulated in Transcription
  misc_feature: MA Experiment 20000480 PARAMETER Experiment Name: Zm_Drought_P Parameter: Age (day) Value: 11
  misc_feature: MA Experiment 20000480 PARAMETER Experiment Name: Zm_Drought_P Parameter: Organism Value: Zea mays
  misc_feature: MA Experiment 20000480 PARAMETER Experiment Name: Zm_Drought_P Parameter: Plant Line Value: 35A19
  misc_feature: MA Experiment 20000480 PARAMETER Experiment Name: Zm_Drought_P Parameter: Timepoint (hr) Value: 72
  misc_feature: MA Experiment 20000480 PARAMETER Experiment Name: Zm_Drought_P Parameter: Tissue Value: Aerial
  misc_feature: MA Experiment 20000480 PARAMETER Experiment Name: Zm_Drought_P Parameter: Treatment Value: Drought vs. No Drought
  misc_feature: MA Experiment ID: 20000535 Result: Down-regulated in Transcription
  misc_feature: MA Experiment 20000535 PARAMETER Experiment Name: Zm_Hybrid_Seed_Dev_P Parameter: DAP Value: 30 vs. 12
  misc_feature: MA Experiment 20000535 PARAMETER Experiment Name: Zm_Hybrid_Seed_Dev_P Parameter: Organism Value: Zea mays
  misc_feature: MA Experiment 20000535 PARAMETER Experiment Name: Zm_Hybrid_Seed_Dev_P Parameter: Plant Line Value: 35A19
  misc_feature: MA Experiment 20000535 PARAMETER Experiment Name: Zm_Hybrid_Seed_Dev_P Parameter: Tissue Value: Embryo vs. Unfert Floret
gcacgagaccattacctagaacatcctaatcgaaaagcagaaccatggccggcgaggaacaccagcagcacagcagccactacggccaccacttcctggtggtggcctacggcatgcagggccacgtcaacccagcgcgcgctctggctcaccgcctcgccaagctcagcgacgtcgtaggcggctgccccatcctcgccacgctctccctgcacgtcgccgcccaccgccgcatgttcccggcacagctggacccggacgccgccggcgaggaggatgaggaggaggccagcgacggcgtcatctcctacgtgccccactcggacagcttcgacgacggctccttgcccagaacccccgaggactgggcccgcagacgccgcgcgagccgcgagagcctctccgccatgctcgcccgcttcgccggcggcgggcggcccgtcacctgcgtggtgtgcacgctgctggtgcccgcggcggtggacgccgcgacgcgccacggcgtccccttcgccgtgtactggatccagccggccaccgtcctcgccgccgcgtaccactacttccacggctacggcgagaccgtcgccgccgccgacccggcgcacgaggtgagcctgcctgggctacgccgccctctccgggtccgggacttcccgtcctacctggtggacacgacgggcagcccgctggccaggtccgtcgtcgggatgttccgagagctgttcgagagcgtggaccggtggcggcctaaagtcctcgtgaacacgttcgacgagctggaggcgggcgtgctctcggagatgaagcgacacctcgacgtgttcgccgtcggtcccatggtcgccggcgccggtggtggctcgggctcctctggcgcgtcaaacgacgaaggacggatccatctgtacaggcacgacgacgccgacaggaagaggtacatggagtggctcggagcgcagccggagagctcggtggtgtacgtgtcgttcgggagcatagcgacgcacaccttgcagcagatggaggaggttgtccaagggctgctgcaggctggacggccgtacttgctggccgcgcgcagctggcacgggctcgaggacgacggtgcgcgccgcgtcctggacaacgccgcccagagcagcggcggccgtgggacggtcgtggactggtgcgaccagccggaggtcctggcgcacccggccgtcgggtgcttcgtctcgcactgcggctggaactcgacgttggaggccgtggcggccggcgtgccgctcgtcggcgtgcccagcctgtttgaccagccaacgaacacgtacttggtggtggaggagtggggggtcggcgtcagaggggagcgtgacggtgagggcgtgttagctgcgacggagctggcgagatgcgttgagctggtcatgggtcaaggtacaaaagcaacggcgataagggagagagtaaaggctttgagagagatggcgcagcaggcggcacgagcaggtgggccggcggagagaaaccttgaggactttgttaactctgtcggtgatagcttccgtcctgtcggaatttcagttgcggaaaaaactgatgaatctcgtacatgttcatcagaatgacttccgtacagatattatttttatctacattctacaaggagtacctg

SEQ ID NO: 1546 - protein, 522 aa, Zea mays subsp. mays
  peptide (1)..(522): Ceres Seq. ID no. 12407367
  misc_feature (35)..(498): Pfam Name: UDP-glucoronosyl and UDP-glucosyl transferase Pfam Description: UDP-glucoronosyl and UDP-glucosyl transferase
  misc_feature (1)..(498): Homolog of NCBI NO: 34906162 NR Description: putative anthocyanin 5-O-glucosyltransferase
  misc_feature (87)..(498): Homolog of NCBI NO: 4115559 NR Description: UDP-glucose:anthocysnin 5-O-glucosyltransferase
  misc_feature (71)..(495): Homolog of NCBI NO: 40714353 NR Description: anthocyanin 5-O-glucosyltransferase [Iris
  misc_feature (50)..(499): Homolog of NCBI NO: 20146093 NR Description: glucosyltransferase NTGT2 [Nicotiana tabacum]
  misc_feature (50)..(501): Homolog of NCBI NO: 14192682 NR Description: cold-induced glucosyl transferase [Solanum
  misc_feature (10)..(267): Homolog of NCBI NO: 18414478 NR Description: glucosyltransferase like protein
  misc_feature (224)..(496): Homolog of NCBI NO: 18414478 NR Description: glucosyltransferase like protein
  misc_feature (87)..(502): Homolog of NCBI NO: 6683052 NR Description: anthocyanin 5-O-glucosyltransferase [Petunia x
  misc_feature (10)..(267): Homolog of NCBI NO: 2149127 NR Description: UDP-glucose:indole-3-acetate
  misc_feature (224)..(496): Homolog of NCBI NO: 2149127 NR Description: UDP-glucose:indole-3-acetate
MAGEEHQQHSSHYGHHFLVVAYGMQGHVNPARALAHRLAKLSDVVGGCPILATLSLHVAAHRRMFPAQLDPDAAGEEDEEEASDGVISYVPHSDSFDDGSLPRTPEDWARRRRASRESLSAMLARFAGGGRPVTCVVCTLLVPAAVDAATRHGVPFAVYWIQPATVLAAAYHYFHGYGETVAAADPAHEVSLPGLRRPLRVRDFPSYLVDTTGSPLARSVVGMFRELFESVDRWRPKVLVNTFDELEAGVLSEMKRHLDVFAVGPMVAGAGGGSGSSGASNDEGRIHLYRHDDADRKRYMEWLGAQPESSVVYVSFGSIATHTLQQMEEVVQGLLQAGRPYLLAARSWHGLEDDGARRVLDNAAQSSGGRGTVVDWCDQPEVLAHPAVGCFVSHCGWNSTLEAVAAGVPLVGVPSLFDQPTNTYLVVEEWGVGVRGERDGEGVLAATELARCVELVMGQGTKATAIRERVKALREMAQQAARAGGPAERNLEDFVNSVGDSFRPVGISVAEKTDESRTCSSE

SEQ ID NO: 1547 - protein, 499 aa, Zea mays subsp. mays
  peptide (1)..(499): Ceres Seq. ID no. 12407368
  misc_feature (12)..(475): Pfam Name: UDP-glucoronosyl and UDP-glucosyl transferase Pfam Description: UDP-glucoronosyl and UDP-glucosyl transferase
  misc_feature (64)..(475): Homolog of NCBI NO: 4115559 NR Description: UDP-glucose:anthocysnin 5-O-glucosyltransferase
  misc_feature (48)..(472): Homolog of NCBI NO: 40714353 NR Description: anthocyanin 5-O-glucosyltransferase [Iris
  misc_feature (27)..(476): Homolog of NCBI NO: 20146093 NR Description: glucosyltransferase NTGT2 [Nicotiana tabacum]
  misc_feature (27)..(478): Homolog of NCBI NO: 14192682 NR Description: cold-induced glucosyl transferase [Solanum
  misc_feature (1)..(244): Homolog of NCBI NO: 18414478 NR Description: glucosyltransferase like protein
  misc_feature (201)..(473): Homolog of NCBI NO: 18414478 NR Description: glucosyltransferase like protein
  misc_feature (64)..(479): Homolog of NCBI NO: 6683052 NR Description: anthocyanin 5-O-glucosyltransferase [Petunia x
  misc_feature (1)..(244): Homolog of NCBI NO: 2149127 NR Description: UDP-glucose:indole-3-acetate
  misc_feature (201)..(473): Homolog of NCBI NO: 2149127 NR Description: UDP-glucose:indole-3-acetate
  misc_feature (1)..(475): Homolog of NCBI NO: 34906162 NR Description: putative anthocyanin 5-O-glucosyltransferase
MQGHVNPARALAHRLAKLSDVVGGCPILATLSLHVAAHRRMFPAQLDPDAAGEEDEEEASDGVISYVPHSDSFDDGSLPRTPEDWARRRRASRESLSAMLARFAGGGRPVTCVVCTLLVPAAVDAATRHGVPFAVYWIQPATVLAAAYHYFHGYGETVAAADPAHEVSLPGLRRPLRVRDFPSYLVDTTGSPLARSVVGMFRELFESVDRWRPKVLVNTFDELEAGVLSEMKRHLDVFAVGPMVAGAGGGSGSSGASNDEGRIHLYRHDDADRKRYMEWLGAQPESSVVYVSFGSIATHTLQQMEEVVQGLLQAGRPYLLAARSWHGLEDDGARRVLDNAAQSSGGRGTVVDWCDQPEVLAHPAVGCFVSHCGWNSTLEAVAAGVPLVGVPSLFDQPTNTYLVVEEWGVGVRGERDGEGVLAATELARCVELVMGQGTKATAIRERVKALREMAQQAARAGGPAERNLEDFVNSVGDSFRPVGISVAEKTDESRTCSSE

SEQ ID NO: 1548 - protein, 459 aa, Zea mays subsp. mays
  peptide (1)..(459): Ceres Seq. ID no. 12407369
  misc_feature (1)..(435): Pfam Name: UDP-glucoronosyl and UDP-glucosyl transferase Pfam Description: UDP-glucoronosyl and UDP-glucosyl transferase
  misc_feature (24)..(435): Homolog of NCBI NO: 4115559 NR Description: UDP-glucose:anthocysnin 5-O-glucosyltransferase
  misc_feature (8)..(432): Homolog of NCBI NO: 40714353 NR Description: anthocyanin 5-O-glucosyltransferase [Iris
  misc_feature (1)..(436): Homolog of NCBI NO: 20146093 NR Description: glucosyltransferase NTGT2 [Nicotiana tabacum]
  misc_feature (1)..(438): Homolog of NCBI NO: 14192682 NR Description: cold-induced glucosyl transferase [Solanum
  misc_feature (1)..(204): Homolog of NCBI NO: 18414478 NR Description: glucosyltransferase like protein
  misc_feature (161)..(433): Homolog of NCBI NO: 18414478 NR Description: glucosyltransferase like protein
  misc_feature (24)..(439): Homolog of NCBI NO: 6683052 NR Description: anthocyanin 5-O-glucosyltransferase [Petunia x
  misc_feature (1)..(204): Homolog of NCBI NO: 2149127 NR Description: UDP-glucose:indole-3-acetate
  misc_feature (161)..(433): Homolog of NCBI NO: 2149127 NR Description: UDP-glucose:indole-3-acetate
  misc_feature (1)..(435): Homolog of NCBI NO: 34906162 NR Description: putative anthocyanin 5-O-glucosyltransferase
MFPAQLDPDAAGEEDEEEASDGVISYVPHSDSFDDGSLPRTPEDWARRRRASRESLSAMLARFAGGGRPVTCVVCTLLVPAAVDAATRHGVPFAVYWIQPATVLAAAYHYFHGYGETVAAADPAHEVSLPGLRRPLRVRDFPSYLVDTTGSPLARSVVGMFRELFESVDRWRPKVLVNTFDELEAGVLSEMKRHLDVFAVGPMVAGAGGGSGSSGASNDEGRIHLYRHDDADRKRYMEWLGAQPESSVVYVSFGSIATHTLQQMEEVVQGLLQAGRPYLLAARSWHGLEDDGARRVLDNAAQSSGGRGTVVDWCDQPEVLAHPAVGCFVSHCGWNSTLEAVAAGVPLVGVPSLFDQPTNTYLVVEEWGVGVRGERDGEGVLAATELARCVELVMGQGTKATAIRERVKALREMAQQAARAGGPAERNLEDFVNSVGDSFRPVGISVAEKTDESRTCSSE

SEQ ID NO: 1549 - DNA, 1144 bp, Zea mays subsp. mays
  misc_feature (1)..(1144): Ceres Seq. ID no. 12412127
  misc_feature: MA Experiment ID: 108528 Result: Up-regulated in Transcription
  misc_feature: MA Experiment 108528 PARAMETER Experiment Name: Zm_Imbibed_Seeds_P Parameter: Age (day) Value: 5 vs. 2
  misc_feature: MA Experiment 108528 PARAMETER Experiment Name: Zm_Imbibed_Seeds_P Parameter: Organism Value: Zea mays
  misc_feature: MA Experiment 108528 PARAMETER Experiment Name: Zm_Imbibed_Seeds_P Parameter: Plant Line Value: 35A19
  misc_feature: MA Experiment 108528 PARAMETER Experiment Name: Zm_Imbibed_Seeds_P Parameter: Tissue Value: Aerial vs. Embryo
  misc_feature: MA Experiment ID: 108529 Result: Down-regulated in Transcription
  misc_feature: MA Experiment 108529 PARAMETER Experiment Name: Zm_Imbibed_Seeds_P Parameter: Age (day) Value: 5 vs. 2
  misc_feature: MA Experiment 108529 PARAMETER Experiment Name: Zm_Imbibed_Seeds_P Parameter: Organism Value: Zea mays
  misc_feature: MA Experiment 108529 PARAMETER Experiment Name: Zm_Imbibed_Seeds_P Parameter: Plant Line Value: 35A19
  misc_feature: MA Experiment 108529 PARAMETER Experiment Name: Zm_Imbibed_Seeds_P Parameter: Tissue Value: Roots vs. Embryo
  misc_feature: MA Experiment ID: 108530 Result: Up-regulated in Transcription
  misc_feature: MA Experiment 108530 PARAMETER Experiment Name: Zm_Imbibed_Seeds_P Parameter: Age (day) Value: 6 vs. 2
  misc_feature: MA Experiment 108530 PARAMETER Experiment Name: Zm_Imbibed_Seeds_P Parameter: Organism Value: Zea mays
  misc_feature: MA Experiment 108530 PARAMETER Experiment Name: Zm_Imbibed_Seeds_P Parameter: Plant Line Value: 35A19
  misc_feature: MA Experiment 108530 PARAMETER Experiment Name: Zm_Imbibed_Seeds_P Parameter: Tissue Value: Aerial vs. Embryo
  misc_feature: MA Experiment ID: 108536 Result: Down-regulated in Transcription
  misc_feature: MA Experiment 108536 PARAMETER Experiment Name: Zm_Meristem_P Parameter: Age (day) Value: 8
  misc_feature: MA Experiment 108536 PARAMETER Experiment Name: Zm_Meristem_P Parameter: Organism Value: Zea mays
  misc_feature: MA Experiment 108536 PARAMETER Experiment Name: Zm_Meristem_P Parameter: Plant Line Value: 35A19
  misc_feature: MA Experiment 108536 PARAMETER Experiment Name: Zm_Meristem_P Parameter: Tissue Value: Shoot Meristem vs. Above Shoot Meristem
  misc_feature: MA Experiment ID: 108545 Result: Up-regulated in Transcription
  misc_feature: MA Experiment 108545 PARAMETER Experiment Name: Zm_Imbibed_Seeds_P Parameter: Age (day) Value: 3 vs. 2
  misc_feature: MA Experiment 108545 PARAMETER Experiment Name: Zm_Imbibed_Seeds_P Parameter: Organism Value: Zea mays
  misc_feature: MA Experiment 108545 PARAMETER Experiment Name: Zm_Imbibed_Seeds_P Parameter: Plant Line Value: 35A19
  misc_feature: MA Experiment 108545 PARAMETER Experiment Name: Zm_Imbibed_Seeds_P Parameter: Tissue Value: Aerial vs. Embryo
  misc_feature: MA Experiment ID: 108546 Result: Down-regulated in Transcription
  misc_feature: MA Experiment 108546 PARAMETER Experiment Name: Zm_Imbibed_Seeds_P Parameter: Age (day) Value: 3 vs. 2
  misc_feature: MA Experiment 108546 PARAMETER Experiment Name: Zm_Imbibed_Seeds_P Parameter: Organism Value: Zea mays
  misc_feature: MA Experiment 108546 PARAMETER Experiment Name: Zm_Imbibed_Seeds_P Parameter: Plant Line Value: 35A19
  misc_feature: MA Experiment 108546 PARAMETER Experiment Name: Zm_Imbibed_Seeds_P Parameter: Tissue Value: Roots vs. Embryo
  misc_feature: MA Experiment ID: 108547 Result: Up-regulated in Transcription
  misc_feature: MA Experiment 108547 PARAMETER Experiment Name: Zm_Imbibed_Seeds_P Parameter: Age (day) Value: 4 vs. 2
  misc_feature: MA Experiment 108547 PARAMETER Experiment Name: Zm_Imbibed_Seeds_P Parameter: Organism Value: Zea mays
  misc_feature: MA Experiment 108547 PARAMETER Experiment Name: Zm_Imbibed_Seeds_P Parameter: Plant Line Value: 35A19
  misc_feature: MA Experiment 108547 PARAMETER Experiment Name: Zm_Imbibed_Seeds_P Parameter: Tissue Value: Aerial vs. Embryo
  misc_feature: MA Experiment ID: 108687 Result: Down-regulated in Transcription
  misc_feature: MA Experiment 108687 PARAMETER Experiment Name: Zm_Embryos-Flowers__P Parameter: Tissue Value: Embryo vs. Aerial+
  misc_feature: MA Experiment ID: 108688 Result: Down-regulated in Transcription
  misc_feature: MA Experiment 108688 PARAMETER Experiment Name: Zm_Embryos-Flowers__P Parameter: Tissue Value: Immature Flowers vs. Aerial+
  misc_feature: MA Experiment ID: 108689 Result: Up-regulated in Transcription
  misc_feature: MA Experiment 108689 PARAMETER Experiment Name: Zm_Drought_Roots_P Parameter: Age (day) Value: 9
  misc_feature: MA Experiment 108689 PARAMETER Experiment Name: Zm_Drought_Roots_P Parameter: Organism Value: Zea mays
  misc_feature: MA Experiment 108689 PARAMETER Experiment Name: Zm_Drought_Roots_P Parameter: Plant Line Value: 35A19
  misc_feature: MA Experiment 108689 PARAMETER Experiment Name: Zm_Drought_Roots_P Parameter: Timepoint (hr) Value: 24
  misc_feature: MA Experiment 108689 PARAMETER Experiment Name: Zm_Drought_Roots_P Parameter: Tissue Value: Roots
  misc_feature: MA Experiment 108689 PARAMETER Experiment Name: Zm_Drought_Roots_P Parameter: Treatment Value: Drought vs. No Drought
  misc_feature: MA Experiment ID: 20000535 Result: Down-regulated in Transcription
  misc_feature: MA Experiment 20000535 PARAMETER Experiment Name: Zm_Hybrid_Seed_Dev_P Parameter: DAP Value: 30 vs. 12
  misc_feature: MA Experiment 20000535 PARAMETER Experiment Name: Zm_Hybrid_Seed_Dev_P Parameter: Organism Value: Zea mays
  misc_feature: MA Experiment 20000535 PARAMETER Experiment Name: Zm_Hybrid_Seed_Dev_P Parameter: Plant Line Value: 35A19
  misc_feature: MA Experiment 20000535 PARAMETER Experiment Name: Zm_Hybrid_Seed_Dev_P Parameter: Tissue Value: Embryo vs. Unfert Floret
ctcggaaggatggcggcggcggtttccagggccatctgcgtccagaaaccgggctccaaatgcagcagggacagggaagcgacctccttcgcccgccgaacggtcgcggcgccgaggcccccgcgcgccaaagccgccggcgtcatccgctccgactccggcgcgggacggggccagcagtgctcgccgctgagggccgtcgttgacgccgcgtcgatacagacgaccaaaaagagcaaatggcgcctcagtctcccgcgcgcaagctacaacggttcagggtccggtgctgcggcggctgagccgtctaccgtgggagacaccttggaacgggaggagggcggcggcacagaggcaggcgcttcggctgatgagtcatccaaccggaagcagccgccccctgttgaccccaagattgagaaggacctcaagaaggtagttcaaaagactgcggcaacctttgcaccaagggcgtccacgaaaacaaagaaccctgctgtccctggaagtaccctgtacaccgtctttgaagtccagggctatgtttccatgctgttgggcggagcactttccttcaatctcatattcccatcgaatgagccagacatctggaggttaatgggaatgtggtccatttggatgttcactataccttcgcttcgggctcgtgactgctccaataaagagaaagaagctctcaactacttatttctcctgattcctctgatcaacgttatgattccattcttcgtgaagtcctttgctgttgtttggtcagcagatacagttgctttcttcgtgatgtatgcatggaagcttggatggctgcaaaggttgaaatgaagatttttggtgtgctctcttggtgatgtgtgtatgaaagcttggatatttggtttgaaaaggtggagtcggtagcttttttgctgagagaaacatttgtcctcaaaattttcacatcttttggagggagctgcatgattagtttattccaagatttagttcatatagccttttatatcttgtgtatatgcagggagtatgaaaaaacagcctttcacatttaagtgataaatatatgtacctgaagtctgaacatttttgttgactacgaactgaacagctctaaatggttcttgatttc

SEQ ID NO: 1550 - protein, 280 aa, Zea mays subsp. mays
  peptide (1)..(280): Ceres Seq. ID no. 12412128
  misc_feature (4)..(106): Homolog of NCBI NO: 30385668 NR Description: pyruvate phosphate dikinase [Sorghum bicolor]
  misc_feature (4)..(106): Homolog of NCBI NO: 6274486 NR Description: pyruvate orthophosphate dikinase [Saccharum
  misc_feature (4)..(106): Homolog of NCBI NO: 130385 NR Description: Pyruvate,phosphate dikinase, chloroplast
  misc_feature (4)..(106): Homolog of NCBI NO: 168586 NR Description: pyruvate,orthophosphate dikinase
  misc_feature (4)..(78): Homolog of NCBI NO: 22450 NR Description: pyruvate,orthophosphate dikinase precursor
  misc_feature (4)..(106): Homolog of NCBI NO: 67155 NR Description: pyruvate, phosphate dikinase (EC 2.7.9.1)
  misc_feature (4)..(106): Homolog of NCBI NO: 257805 NR Description: orthophosphate dikinase; PPDK [Zea mays]
  misc_feature (130)..(276): Homolog of NCBI NO: 25370849 NR Description: hypothetical protein At2g48070 [imported] -
  misc_feature (130)..(278): Homolog of NCBI NO: 18407519 NR Description: expressed protein
LGRMAAAVSRAICVQKPGSKCSRDREATSFARRTVAAPRPPRAKAAGVIRSDSGAGRGQQCSPLRAVVDAASIQTTKKSKWRLSLPRASYNGSGSGAAAAEPSTVGDTLEREEGGGTEAGASADESSNRKQPPPVDPKIEKDLKKVVQKTAATFAPRASTKTKNPAVPGSTLYTVFEVQGYVSMLLGGALSFNLIFPSNEPDIWRLMGMWSIWMFTIPSLRARDCSNKEKEALNYLFLLIPLINVMIPFFVKSFAVVWSADTVAFFVMYAWKLGWLQRLK

SEQ ID NO: 1551 - protein, 277 aa, Zea mays subsp. mays
  peptide (1)..(277): Ceres Seq. ID no. 12412129
  misc_feature (1)..(103): Homolog of NCBI NO: 30385668 NR Description: pyruvate phosphate dikinase [Sorghum bicolor]
  misc_feature (1)..(103): Homolog of NCBI NO: 6274486 NR Description: pyruvate orthophosphate dikinase [Saccharum
  misc_feature (1)..(103): Homolog of NCBI NO: 130385 NR Description: Pyruvate,phosphate dikinase, chloroplast
  misc_feature (1)..(103): Homolog of NCBI NO: 168586 NR Description: pyruvate,orthophosphate dikinase
  misc_feature (1)..(75): Homolog of NCBI NO: 22450 NR Description: pyruvate,orthophosphate dikinase precursor
  misc_feature (1)..(103): Homolog of NCBI NO: 67155 NR Description: pyruvate, phosphate dikinase (EC 2.7.9.1)
  misc_feature (1)..(103): Homolog of NCBI NO: 257805 NR Description: orthophosphate dikinase; PPDK [Zea mays]
  misc_feature (127)..(273): Homolog of NCBI NO: 25370849 NR Description: hypothetical protein At2g48070 [imported] -
  misc_feature (127)..(275): Homolog of NCBI NO: 18407519 NR Description: expressed protein
MAAAVSRAICVQKPGSKCSRDREATSFARRTVAAPRPPRAKAAGVIRSDSGAGRGQQCSPLRAVVDAASIQTTKKSKWRLSLPRASYNGSGSGAAAAEPSTVGDTLEREEGGGTEAGASADESSNRKQPPPVDPKIEKDLKKVVQKTAATFAPRASTKTKNPAVPGSTLYTVFEVQGYVSMLLGGALSFNLIFPSNEPDIWRLMGMWSIWMFTIPSLRARDCSNKEKEALNYLFLLIPLINVMIPFFVKSFAVVWSADTVAFFVMYAWKLGWLQRLK

SEQ ID NO: 1552 - DNA, 1389 bp, Zea mays subsp. mays
  misc_feature (1)..(1389): Ceres Seq. ID no. 12411109
  misc_feature: MA Experiment ID: 108528 Result: Up-regulated in Transcription
  misc_feature: MA Experiment 108528 PARAMETER Experiment Name: Zm_Imbibed_Seeds_P Parameter: Age (day) Value: 5 vs. 2
  misc_feature: MA Experiment 108528 PARAMETER Experiment Name: Zm_Imbibed_Seeds_P Parameter: Organism Value: Zea mays
  misc_feature: MA Experiment 108528 PARAMETER Experiment Name: Zm_Imbibed_Seeds_P Parameter: Plant Line Value: 35A19
  misc_feature: MA Experiment 108528 PARAMETER Experiment Name: Zm_Imbibed_Seeds_P Parameter: Tissue Value: Aerial vs. Embryo
  misc_feature: MA Experiment ID: 108545 Result: Up-regulated in Transcription
  misc_feature: MA Experiment 108545 PARAMETER Experiment Name: Zm_Imbibed_Seeds_P Parameter: Age (day) Value: 3 vs. 2
  misc_feature: MA Experiment 108545 PARAMETER Experiment Name: Zm_Imbibed_Seeds_P Parameter: Organism Value: Zea mays
  misc_feature: MA Experiment 108545 PARAMETER Experiment Name: Zm_Imbibed_Seeds_P Parameter: Plant Line Value: 35A19
  misc_feature: MA Experiment 108545 PARAMETER Experiment Name: Zm_Imbibed_Seeds_P Parameter: Tissue Value: Aerial vs. Embryo
  misc_feature: MA Experiment ID: 108547 Result: Up-regulated in Transcription
  misc_feature: MA Experiment 108547 PARAMETER Experiment Name: Zm_Imbibed_Seeds_P Parameter: Age (day) Value: 4 vs. 2
  misc_feature: MA Experiment 108547 PARAMETER Experiment Name: Zm_Imbibed_Seeds_P Parameter: Organism Value: Zea mays
  misc_feature: MA Experiment 108547 PARAMETER Experiment Name: Zm_Imbibed_Seeds_P Parameter: Plant Line Value: 35A19
  misc_feature: MA Experiment 108547 PARAMETER Experiment Name: Zm_Imbibed_Seeds_P Parameter: Tissue Value: Aerial vs. Embryo
actcgtccacacgcgaaggcacccagcagcagccgctcccgaactgaggaaccctaccacgcgggcgacggcggtgcgcgaccggtgacgggacagcggcagcgccccctcctccatctgctggtcccaccgcctcctgacgttatccgatactgccaatccccctcttcgccgttgacggagcttaccgaggaaagaagggcagggccatggcgggagccttcgctttccgcctcgtgcctcgcctcgccgcagagccggcggcgagggggaagggtggcggaggaggagccaaccgcgacgccggcagcagggcgctggtgtcaaagaaaccaaacaagcagcagcatttgtggatcaggaaggagacagctgggtcagggaagaaggctctccgtcttattgatgctgtttcgaagttaccaaatgaaagagaagctatttatggtgcattggacaagtggagtgctttcgaacctgaatttcctattatagcagcagcaaaagctttggggatgttgaaaaggcgacgacaatggttaagaataatccaggtaaccaagtggttgatgagcaaaggacaggtgctgacatggacaacatatgatacacttctgctcgcacttcttatggataaacgggtagacgaagctgagtcagtttggaacactgtaatacagactcatacccgctcagtgcccaagaggttgttctctcggatgatcttgatctacgacattcaccagcgcccagataaagttttggagatattcgcggatatggaggagttaggtgtgcgtccggacgaggatacagcgagacggatcggaaaggcattcgtggcttctggccaagaagaaaaggagaagcatgtcctcgagaaatacttgaagaagtggaagtacatccatttcaacggcgagcgcgttcgcgtgcggagggacggaccattggcgtagtgcccgttttctgaaaaatgctcgaacctatcagagtatcgtgccggtaggcggtagggcaggggagatgctgttactgccgctgtgacagtcaggcacatggatatcggcactagtccctatcctatgtatgtggaatggaacggaaactggagattggttccatggctctagcctgtggaggagacgagcggatggggggtggctggctactaccggcgagatagtgatttaataggcactacataggcgtccagtgattgcgatggctttaacttgcgtatgtgtctgcggaatggtcccgtgctatttcggtgacttgtgcttgtggaattgtgaacacccactggaaagtgtatatcatgagagggacgatacctgacgtctgggcccatggcttgctgatttcacgcaacgaaccattttctgc

SEQ ID NO: 1553 - protein, 249 aa, Zea mays subsp. mays
  peptide (1)..(249): Ceres Seq. ID no. 12411110
  misc_feature (166)..(200): Pfam Name: PPR repeat Pfam Description: PPR repeat
  misc_feature (71)..(226): Homolog of NCBI NO: 25406795 NR Description: hypothetical protein [imported] - Arabidopsis
  misc_feature (29)..(226): Homolog of NCBI NO: 18390413 NR Description: expressed protein
  misc_feature (29)..(226): Homolog of NCBI NO: 30678929 NR Description: expressed protein [Arabidopsis thaliana]
  misc_feature (68)..(243): Homolog of NCBI NO: 34909686 NR Description: B1131G08.1 [Oryza sativa (japonica
  misc_feature (44)..(243): Homolog of NCBI NO: 7486589 NR Description: hypothetical protein F7J7.130 - Arabidopsis
  misc_feature (44)..(243): Homolog of NCBI NO: 18415645 NR Description: putative protein
  misc_feature (38)..(238): Homolog of NCBI NO: 7485419 NR Description: hypothetical protein F13C5.140 - Arabidopsis
  misc_feature (38)..(244): Homolog of NCBI NO: 18415213 NR Description: putative protein; protein id: At4g18975.1
  misc_feature (1)..(248): Homolog of NCBI NO: 34393638 NR Description: pentatricopeptide (PPR) repeat-containing
MAGAFAFRLVPRLAAEPAARGKGGGGGANRDAGSRALVSKKPNKQQHLWIRKETAGSGKKALRLIDAVSKLPNEREAIYGALDKWSAFEPEFPIIAAAKALGMLKRRRQWLRIIQVTKWLMSKGQVLTWTTYDTLLLALLMDKRVDEAESVWNTVIQTHTRSVPKRLFSRMILIYDIHQRPDKVLEIFADMEELGVRPDEDTARRIGKAFVASGQEEKEKHVLEKYLKKWKYIHFNGERVRVRRDGPLA

SEQ ID NO: 1554 - protein, 164 aa, Zea mays subsp. mays
  peptide (1)..(164): Ceres Seq. ID no. 12411111
TRPHAKAPSSSRSRTEEPYHAGDGGARPVTGQRQRPLLHLLVPPPPDVIRYCQSPSSPLTELTEERRAGPWREPSLSASCLASPQSRRRGGRVAEEEPTATPAAGRWCQRNQTSSSICGSGRRQLGQGRRLSVLLMLFRSYQMKEKLFMVHWTSGVLSNLNFLL

SEQ ID NO: 1555 - protein, 147 aa, Zea mays subsp. mays
  peptide (1)..(147): Ceres Seq. ID no. 12411112
  misc_feature (64)..(98): Pfam Name: PPR repeat Pfam Description: PPR repeat
  misc_feature (1)..(124): Homolog of NCBI NO: 25406795 NR Description: hypothetical protein [imported] - Arabidopsis
  misc_feature (1)..(124): Homolog of NCBI NO: 18390413 NR Description: expressed protein
  misc_feature (1)..(124): Homolog of NCBI NO: 30678929 NR Description: expressed protein [Arabidopsis thaliana]
  misc_feature (1)..(141): Homolog of NCBI NO: 34909686 NR Description: B1131G08.1 [Oryza sativa (japonica
  misc_feature (1)..(141): Homolog of NCBI NO: 7486589 NR Description: hypothetical protein F7J7.130 - Arabidopsis
  misc_feature (1)..(141): Homolog of NCBI NO: 18415645 NR Description: putative protein
  misc_feature (1)..(136): Homolog of NCBI NO: 7485419 NR Description: hypothetical protein F13C5.140 - Arabidopsis
  misc_feature (1)..(142): Homolog of NCBI NO: 18415213 NR Description: putative protein; protein id: At4g18975.1
  misc_feature (1)..(146): Homolog of NCBI NO: 34393638 NR Description: pentatricopeptide (PPR) repeat-containing
MLKRRRQWLRIIQVTKWLMSKGQVLTWTTYDTLLLALLMDKRVDEAESVWNTVIQTHTRSVPKRLFSRMILIYDIHQRPDKVLEIFADMEELGVRPDEDTARRIGKAFVASGQEEKEKHVLEKYLKKWKYIHFNGERVRVRRDGPLA

SEQ ID NO: 1556 - DNA, 895 bp, Zea mays subsp. mays
  misc_feature (1)..(895): Ceres Seq. ID no. 12351296
  misc_feature: MA Experiment ID: 108515 Result: Up-regulated in Transcription
  misc_feature: MA Experiment 108515 PARAMETER Experiment Name: Zm_2mM_SA_P Parameter: Age (day) Value: 8
  misc_feature: MA Experiment 108515 PARAMETER Experiment Name: Zm_2mM_SA_P Parameter: Organism Value: Zea mays
  misc_feature: MA Experiment 108515 PARAMETER Experiment Name: Zm_2mM_SA_P Parameter: Plant Line Value: 35A19
  misc_feature: MA Experiment 108515 PARAMETER Experiment Name: Zm_2mM_SA_P Parameter: Timepoint (hr) Value: 12
  misc_feature: MA Experiment 108515 PARAMETER Experiment Name: Zm_2mM_SA_P Parameter: Tissue Value: Aerial
  misc_feature: MA Experiment 108515 PARAMETER Experiment Name: Zm_2mM_SA_P Parameter: Treatment Value: 2mM SA vs. No Treatment
  misc_feature: MA Experiment ID: 108529 Result: Up-regulated in Transcription
  misc_feature: MA Experiment 108529 PARAMETER Experiment Name: Zm_Imbibed_Seeds_P Parameter: Age (day) Value: 5 vs. 2
  misc_feature: MA Experiment 108529 PARAMETER Experiment Name: Zm_Imbibed_Seeds_P Parameter: Organism Value: Zea mays
  misc_feature: MA Experiment 108529 PARAMETER Experiment Name: Zm_Imbibed_Seeds_P Parameter: Plant Line Value: 35A19
  misc_feature: MA Experiment 108529 PARAMETER Experiment Name: Zm_Imbibed_Seeds_P Parameter: Tissue Value: Roots vs. Embryo
  misc_feature: MA Experiment ID: 108535 Result: Down-regulated in Transcription
  misc_feature: MA Experiment 108535 PARAMETER Experiment Name: Zm_Meristem_P Parameter: Age (day) Value: 8
  misc_feature: MA Experiment 108535 PARAMETER Experiment Name: Zm_Meristem_P Parameter: Organism Value: Zea mays
  misc_feature: MA Experiment 108535 PARAMETER Experiment Name: Zm_Meristem_P Parameter: Plant Line Value: 35A19
  misc_feature: MA Experiment 108535 PARAMETER Experiment Name: Zm_Meristem_P Parameter: Tissue Value: Root Meristem vs. Above Root Meristem
  misc_feature: MA Experiment ID: 108536 Result: Up-regulated in Transcription
  misc_feature: MA Experiment 108536 PARAMETER Experiment Name: Zm_Meristem_P Parameter: Age (day) Value: 8
  misc_feature: MA Experiment 108536 PARAMETER Experiment Name: Zm_Meristem_P Parameter: Organism Value: Zea mays
  misc_feature: MA Experiment 108536 PARAMETER Experiment Name: Zm_Meristem_P Parameter: Plant Line Value: 35A19
  misc_feature: MA Experiment 108536 PARAMETER Experiment Name: Zm_Meristem_P Parameter: Tissue Value: Shoot Meristem vs. Above Shoot Meristem
  misc_feature: MA Experiment ID: 108546 Result: Up-regulated in Transcription
  misc_feature: MA Experiment 108546 PARAMETER Experiment Name: Zm_Imbibed_Seeds_P Parameter: Age (day) Value: 3 vs. 2
  misc_feature: MA Experiment 108546 PARAMETER Experiment Name: Zm_Imbibed_Seeds_P Parameter: Organism Value: Zea mays
  misc_feature: MA Experiment 108546 PARAMETER Experiment Name: Zm_Imbibed_Seeds_P Parameter: Plant Line Value: 35A19
  misc_feature: MA Experiment 108546 PARAMETER Experiment Name: Zm_Imbibed_Seeds_P Parameter: Tissue Value: Roots vs. Embryo
  misc_feature: MA Experiment ID: 108559 Result: Down-regulated in Transcription
  misc_feature: MA Experiment 108559 PARAMETER Experiment Name: Zm_5mM_NO_P Parameter: Age (day) Value: 8
  misc_feature: MA Experiment 108559 PARAMETER Experiment Name: Zm_5mM_NO_P Parameter: Organism Value: Zea mays
  misc_feature: MA Experiment 108559 PARAMETER Experiment Name: Zm_5mM_NO_P Parameter: Plant Line Value: 35A19
  misc_feature: MA Experiment 108559 PARAMETER Experiment Name: Zm_5mM_NO_P Parameter: Timepoint (hr) Value: 12
  misc_feature: MA Experiment 108559 PARAMETER Experiment Name: Zm_5mM_NO_P Parameter: Tissue Value: Aerial
  misc_feature: MA Experiment 108559 PARAMETER Experiment Name: Zm_5mM_NO_P Parameter: Treatment Value: 5mM NO vs. No Treatment
  misc_feature: MA Experiment ID: 108597 Result: Up-regulated in Transcription
  misc_feature: MA Experiment 108597 PARAMETER Experiment Name: Zm_100uM_ABA_P Parameter: Age (day) Value: 9
  misc_feature: MA Experiment 108597 PARAMETER Experiment Name: Zm_100uM_ABA_P Parameter: Organism Value: Zea mays
  misc_feature: MA Experiment 108597 PARAMETER Experiment Name: Zm_100uM_ABA_P Parameter: Plant Line Value: 35A19
  misc_feature: MA Experiment 108597 PARAMETER Experiment Name: Zm_100uM_ABA_P Parameter: Timepoint (hr) Value: 24
  misc_feature: MA Experiment 108597 PARAMETER Experiment Name: Zm_100uM_ABA_P Parameter: Tissue Value: Aerial
  misc_feature: MA Experiment 108597 PARAMETER Experiment Name: Zm_100uM_ABA_P Parameter: Treatment Value: 100uM ABA vs. No Treatment
  misc_feature: MA Experiment ID: 20000478 Result: Up-regulated in Transcription
  misc_feature: MA Experiment 20000478 PARAMETER Experiment Name: Zm_5mM_SA_P Parameter: Age (day) Value: 11
  misc_feature: MA Experiment 20000478 PARAMETER Experiment Name: Zm_5mM_SA_P Parameter: Organism Value: Zea mays
  misc_feature: MA Experiment 20000478 PARAMETER Experiment Name: Zm_5mM_SA_P Parameter: Plant Line Value: 35A19
  misc_feature: MA Experiment 20000478 PARAMETER Experiment Name: Zm_5mM_SA_P Parameter: Timepoint (hr) Value: 72
  misc_feature: MA Experiment 20000478 PARAMETER Experiment Name: Zm_5mM_SA_P Parameter: Tissue Value: Aerial
  misc_feature: MA Experiment 20000478 PARAMETER Experiment Name: Zm_5mM_SA_P Parameter: Treatment Value: 5mM SA vs. No Treatment
  misc_feature: MA Experiment ID: 20000479 Result: Up-regulated in Transcription
  misc_feature: MA Experiment 20000479 PARAMETER Experiment Name: Zm_Drought_P Parameter: Age (day) Value: 10
  misc_feature: MA Experiment 20000479 PARAMETER Experiment Name: Zm_Drought_P Parameter: Organism Value: Zea mays
  misc_feature: MA Experiment 20000479 PARAMETER Experiment Name: Zm_Drought_P Parameter: Plant Line Value: 35A19
  misc_feature: MA Experiment 20000479 PARAMETER Experiment Name: Zm_Drought_P Parameter: Timepoint (hr) Value: 48
  misc_feature: MA Experiment 20000479 PARAMETER Experiment Name: Zm_Drought_P Parameter: Tissue Value: Aerial
  misc_feature: MA Experiment 20000479 PARAMETER Experiment Name: Zm_Drought_P Parameter: Treatment Value: Drought vs. No Drought
  misc_feature: MA Experiment ID: 20000480 Result: Up-regulated in Transcription
  misc_feature: MA Experiment 20000480 PARAMETER Experiment Name: Zm_Drought_P Parameter: Age (day) Value: 11
  misc_feature: MA Experiment 20000480 PARAMETER Experiment Name: Zm_Drought_P Parameter: Organism Value: Zea mays
  misc_feature: MA Experiment 20000480 PARAMETER Experiment Name: Zm_Drought_P Parameter: Plant Line Value: 35A19
  misc_feature: MA Experiment 20000480 PARAMETER Experiment Name: Zm_Drought_P Parameter: Timepoint (hr) Value: 72
  misc_feature: MA Experiment 20000480 PARAMETER Experiment Name: Zm_Drought_P Parameter: Tissue Value: Aerial
  misc_feature: MA Experiment 20000480 PARAMETER Experiment Name: Zm_Drought_P Parameter: Treatment Value: Drought vs. No Drought
  misc_feature: MA Experiment ID: 20000532 Result: Up-regulated in Transcription
  misc_feature: MA Experiment 20000532 PARAMETER Experiment Name: Zm_0.001percent_MeJA_P Parameter: Age (day) Value: 10
  misc_feature: MA Experiment 20000532 PARAMETER Experiment Name: Zm_0.001percent_MeJA_P Parameter: Organism Value: Zea mays
  misc_feature: MA Experiment 20000532 PARAMETER Experiment Name: Zm_0.001percent_MeJA_P Parameter: Plant Line Value: 35A19
  misc_feature: MA Experiment 20000532 PARAMETER Experiment Name: Zm_0.001percent_MeJA_P Parameter: Timepoint (hr) Value: 48
  misc_feature: MA Experiment 20000532 PARAMETER Experiment Name: Zm_0.001percent_MeJA_P Parameter: Tissue Value: Aerial
  misc_feature: MA Experiment 20000532 PARAMETER Experiment Name: Zm_0.001percent_MeJA_P Parameter: Treatment Value: 0.001percent MeJA vs. No Treatment
  misc_feature: MA Experiment ID: 20000533 Result: Up-regulated in Transcription
  misc_feature: MA Experiment 20000533 PARAMETER Experiment Name: Zm_0.001percent_MeJA_P Parameter: Age (day) Value: 11
  misc_feature: MA Experiment 20000533 PARAMETER Experiment Name: Zm_0.001percent_MeJA_P Parameter: Organism Value: Zea mays
  misc_feature: MA Experiment 20000533 PARAMETER Experiment Name: Zm_0.001percent_MeJA_P Parameter: Plant Line Value: 35A19
  misc_feature: MA Experiment 20000533 PARAMETER Experiment Name: Zm_0.001percent_MeJA_P Parameter: Timepoint (hr) Value: 72
  misc_feature: MA Experiment 20000533 PARAMETER Experiment Name: Zm_0.001percent_MeJA_P Parameter: Tissue Value: Aerial
  misc_feature: MA Experiment 20000533 PARAMETER Experiment Name: Zm_0.001percent_MeJA_P Parameter: Treatment Value: 0.001percent MeJA vs. No Treatment
  misc_feature: MA Experiment ID: 20000535 Result: Down-regulated in Transcription
  misc_feature: MA Experiment 20000535 PARAMETER Experiment Name: Zm_Hybrid_Seed_Dev_P Parameter: DAP Value: 30 vs. 12
  misc_feature: MA Experiment 20000535 PARAMETER Experiment Name: Zm_Hybrid_Seed_Dev_P Parameter: Organism Value: Zea mays
  misc_feature: MA Experiment 20000535 PARAMETER Experiment Name: Zm_Hybrid_Seed_Dev_P Parameter: Plant Line Value: 35A19
  misc_feature: MA Experiment 20000535 PARAMETER Experiment Name: Zm_Hybrid_Seed_Dev_P Parameter: Tissue Value: Embryo vs. Unfert Floret
  misc_feature: MA Experiment ID: 20000629 Result: Down-regulated in Transcription
  misc_feature: MA Experiment 20000629 PARAMETER Experiment Name: Zm_Herbicide-Treatments_P Parameter: Timepoint (hr) Value: 12
  misc_feature: MA Experiment 20000629 PARAMETER Experiment Name: Zm_Herbicide-Treatments_P Parameter: Tissue Value: Aerial
  misc_feature: MA Experiment 20000629 PARAMETER Experiment Name: Zm_Herbicide-Treatments_P Parameter: Treatment Value: Trimec vs. No Treatment
  misc_feature: MA Experiment ID: 20000630 Result: Up-regulated in Transcription
  misc_feature: MA Experiment 20000630 PARAMETER Experiment Name: Zm_Herbicide-Treatments_P Parameter: Timepoint (hr) Value: 4
  misc_feature: MA Experiment 20000630 PARAMETER Experiment Name: Zm_Herbicide-Treatments_P Parameter: Tissue Value: Aerial
  misc_feature: MA Experiment 20000630 PARAMETER Experiment Name: Zm_Herbicide-Treatments_P Parameter: Treatment Value: Roundup vs. No Treatment
aagtcaagctgagcacaagtgatcgaacaactacagtacatacactctatcgatctctgtgaattaatttagttattaactcgatcatggcgcgcccccaaaacaaccagaaccccagggtgttcctggtcctcaacatcggcggcgtgacggttggccgcgtcgtcatcgagctgttcgccgacaaggtgcccaagacggcggagaacttccggctgctgtgcaccggagagcgcagcgtggggaagtggtccggcaagcgcctgcactacaagggcgcggcgttccaccgcgtggtgcccgggttcatgtgccagggcggcgacatcacggcgggcaacggcacgggcggcgagtctgcgatcggtgacgcccggtacttcgccgacgaggcgttcggagccgtccggcacgatggcgccggcgtggtgtccatggccaacgccgggcccaacaccaacggatctcagttcttcatcaccttcgccgacgcgccgtggctggacggccgccacgtcgcgttcggccgcgtcgtggatggcatggacgctctgcgtgccatcgaaaaggccgggtccatcagtggcaggactatgaggcatgtcgtcatcgccgactgcggcgagctcaagcactaagccgccatgtcctaattattcaggatcatacttactctctaccaaatctgacactatctagtaggtatacgtatacttatatattattatgattgttgtttgttgctgctgctgttacaagatgcgtttgagactaggtagatgatgagcatatatgcgtgattattttcgggtcttgatataaattctcaagtgtgagacaggttaattctgtgtaattgtaataccatggttaatgaagttgctcgctgttattg

SEQ ID NO: 1557 - protein, 183 aa, Zea mays subsp. mays
  peptide (1)..(183): Ceres Seq. ID no. 12351297
  misc_feature (9)..(181): Homolog of NCBI NO: 11270322 NR Description: peptidylprolyl isomerase (EC 5.2.1.8)
  misc_feature (9)..(181): Homolog of NCBI NO: 21886603 NR Description: peptidylprolyl isomerase (cyclophilin) [Betula
  misc_feature (9)..(181): Homolog of NCBI NO: 1084455 NR Description: peptidylprolyl isomerase (EC 5.2.1.8) Cyp2 - rice
  misc_feature (9)..(181): Homolog of NCBI NO: 23394388 NR Description: peptidylprolyl isomerase [Phytophthora infestans]
  misc_feature (9)..(181): Homolog of NCBI NO: 18376589 NR Description: putative cyclosporin A-binding protein [Picea
  misc_feature (9)..(181): Homolog of NCBI NO: 3334157 NR Description: Peptidyl-prolyl cis-trans isomerase (PPIase)
  misc_feature (10)..(181): Homolog of NCBI NO: 11270318 NR Description: peptidylprolyl isomerase (EC 5.2.1.8) CYP18
  misc_feature (9)..(181): Homolog of NCBI NO: 18076088 NR Description: cyclophilin [Ricinus communis]
  misc_feature (9)..(181): Homolog of NCBI NO: 11270316 NR Description: peptidylprolyl isomerase (EC 5.2.1.8)
  misc_feature (6)..(181): Homolog of NCBI NO: 37531200 NR Description: putative cyclophilin [Oryza sativa (japonica
MARPQNNQNPRVFLVLNIGGVTVGRVVIELFADKVPKTAENFRLLCTGERSVGKWSGKRLHYKGAAFHRVVPGFMCQGGDITAGNGTGGESAIGDARYFADEAFGAVRHDGAGVVSMANAGPNTNGSQFFITFADAPWLDGRHVAFGRVVDGMDALRAIEKAGSISGRTMRHVVIADCGELKH

SEQ ID NO: 1558 - protein, 109 aa, Zea mays subsp. mays
  peptide (1)..(109): Ceres Seq. ID no. 12351298
  misc_feature (1)..(107): Homolog of NCBI NO: 11270322 NR Description: peptidylprolyl isomerase (EC 5.2.1.8)
  misc_feature (1)..(107): Homolog of NCBI NO: 21886603 NR Description: peptidylprolyl isomerase (cyclophilin) [Betula
  misc_feature (1)..(107): Homolog of NCBI NO: 1084455 NR Description: peptidylprolyl isomerase (EC 5.2.1.8) Cyp2 - rice
  misc_feature (1)..(107): Homolog of NCBI NO: 23394388 NR Description: peptidylprolyl isomerase [Phytophthora infestans]
  misc_feature (1)..(107): Homolog of NCBI NO: 18376589 NR Description: putative cyclosporin A-binding protein [Picea
  misc_feature (1)..(107): Homolog of NCBI NO: 3334157 NR Description: Peptidyl-prolyl cis-trans isomerase (PPIase)
  misc_feature (1)..(107): Homolog of NCBI NO: 11270318 NR Description: peptidylprolyl isomerase (EC 5.2.1.8) CYP18
  misc_feature (1)..(107): Homolog of NCBI NO: 18076088 NR Description: cyclophilin [Ricinus communis]
  misc_feature (1)..(107): Homolog of NCBI NO: 11270316 NR Description: peptidylprolyl isomerase (EC 5.2.1.8)
  misc_feature (1)..(107): Homolog of NCBI NO: 37531200 NR Description: putative cyclophilin [Oryza sativa (japonica
MCQGGDITAGNGTGGESAIGDARYFADEAFGAVRHDGAGVVSMANAGPNTNGSQFFITFADAPWLDGRHVAFGRVVDGMDALRAIEKAGSISGRTMRHVVIADCGELKH

SEQ ID NO: 1559 - DNA, 1818 bp, Zea mays subsp. mays
  misc_feature (1)..(1818): Ceres Seq. ID no. 12355481
  misc_feature: MA Experiment ID: 108504 Result: Down-regulated in Transcription
  misc_feature: MA Experiment 108504 PARAMETER Experiment Name: Zm_Drought_P Parameter: Age (day) Value: 8
  misc_feature: MA Experiment 108504 PARAMETER Experiment Name: Zm_Drought_P Parameter: Organism Value: Zea mays
  misc_feature: MA Experiment 108504 PARAMETER Experiment Name: Zm_Drought_P Parameter: Plant Line Value: 35A19
  misc_feature: MA Experiment 108504 PARAMETER Experiment Name: Zm_Drought_P Parameter: Timepoint (hr) Value: 12
  misc_feature: MA Experiment 108504 PARAMETER Experiment Name: Zm_Drought_P Parameter: Tissue Value: Aerial
  misc_feature: MA Experiment 108504 PARAMETER Experiment Name: Zm_Drought_P Parameter: Treatment Value: Drought vs. No Drought
  misc_feature: MA Experiment ID: 108515 Result: Down-regulated in Transcription
  misc_feature: MA Experiment 108515 PARAMETER Experiment Name: Zm_2mM_SA_P Parameter: Age (day) Value: 8
  misc_feature: MA Experiment 108515 PARAMETER Experiment Name: Zm_2mM_SA_P Parameter: Organism Value: Zea mays
  misc_feature: MA Experiment 108515 PARAMETER Experiment Name: Zm_2mM_SA_P Parameter: Plant Line Value: 35A19
  misc_feature: MA Experiment 108515 PARAMETER Experiment Name: Zm_2mM_SA_P Parameter: Timepoint (hr) Value: 12
  misc_feature: MA Experiment 108515 PARAMETER Experiment Name: Zm_2mM_SA_P Parameter: Tissue Value: Aerial
  misc_feature: MA Experiment 108515 PARAMETER Experiment Name: Zm_2mM_SA_P Parameter: Treatment Value: 2mM SA vs. No Treatment
  misc_feature: MA Experiment ID: 108528 Result: Down-regulated in Transcription
  misc_feature: MA Experiment 108528 PARAMETER Experiment Name: Zm_Imbibed_Seeds_P Parameter: Age (day) Value: 5 vs. 2
  misc_feature: MA Experiment 108528 PARAMETER Experiment Name: Zm_Imbibed_Seeds_P Parameter: Organism Value: Zea mays
  misc_feature: MA Experiment 108528 PARAMETER Experiment Name: Zm_Imbibed_Seeds_P Parameter: Plant Line Value: 35A19
  misc_feature: MA Experiment 108528 PARAMETER Experiment Name: Zm_Imbibed_Seeds_P Parameter: Tissue Value: Aerial vs. Embryo
  misc_feature: MA Experiment ID: 108530 Result: Down-regulated in Transcription
  misc_feature: MA Experiment 108530 PARAMETER Experiment Name: Zm_Imbibed_Seeds_P Parameter: Age (day) Value: 6 vs. 2
  misc_feature: MA Experiment 108530 PARAMETER Experiment Name: Zm_Imbibed_Seeds_P Parameter: Organism Value: Zea mays
  misc_feature: MA Experiment 108530 PARAMETER Experiment Name: Zm_Imbibed_Seeds_P Parameter: Plant Line Value: 35A19
  misc_feature: MA Experiment 108530 PARAMETER Experiment Name: Zm_Imbibed_Seeds_P Parameter: Tissue Value: Aerial vs. Embryo
  misc_feature: MA Experiment ID: 108543 Result: Up-regulated in Transcription
  misc_feature: MA Experiment ID: 108556 Result: Down-regulated in Transcription
  misc_feature: MA Experiment 108556 PARAMETER Experiment Name: Zm_Drought_P Parameter: Age (day) Value: 9
  misc_feature: MA Experiment 108556 PARAMETER Experiment Name: Zm_Drought_P Parameter: Organism Value: Zea mays
  misc_feature: MA Experiment 108556 PARAMETER Experiment Name: Zm_Drought_P Parameter: Plant Line Value: 35A19
  misc_feature: MA Experiment 108556 PARAMETER Experiment Name: Zm_Drought_P Parameter: Timepoint (hr) Value: 24
  misc_feature: MA Experiment 108556 PARAMETER Experiment Name: Zm_Drought_P Parameter: Tissue Value: Aerial
  misc_feature: MA Experiment 108556 PARAMETER Experiment Name: Zm_Drought_P Parameter: Treatment Value: Drought vs. No Drought
  misc_feature: MA Experiment ID: 108559 Result: Down-regulated in Transcription
  misc_feature: MA Experiment 108559 PARAMETER Experiment Name: Zm_5mM_NO_P Parameter: Age (day) Value: 8
  misc_feature: MA Experiment 108559 PARAMETER Experiment Name: Zm_5mM_NO_P Parameter: Organism Value: Zea mays
  misc_feature: MA Experiment 108559 PARAMETER Experiment Name: Zm_5mM_NO_P Parameter: Plant Line Value: 35A19
  misc_feature: MA Experiment 108559 PARAMETER Experiment Name: Zm_5mM_NO_P Parameter: Timepoint (hr) Value: 12
  misc_feature: MA Experiment 108559 PARAMETER Experiment Name: Zm_5mM_NO_P Parameter: Tissue Value: Aerial
  misc_feature: MA Experiment 108559 PARAMETER Experiment Name: Zm_5mM_NO_P Parameter: Treatment Value: 5mM NO vs. No Treatment
  misc_feature: MA Experiment ID: 108597 Result: Down-regulated in Transcription
  misc_feature: MA Experiment 108597 PARAMETER Experiment Name: Zm_100uM_ABA_P Parameter: Age (day) Value: 9
  misc_feature: MA Experiment 108597 PARAMETER Experiment Name: Zm_100uM_ABA_P Parameter: Organism Value: Zea mays
  misc_feature: MA Experiment 108597 PARAMETER Experiment Name: Zm_100uM_ABA_P Parameter: Plant Line Value: 35A19
  misc_feature: MA Experiment 108597 PARAMETER Experiment Name: Zm_100uM_ABA_P Parameter: Timepoint (hr) Value: 24
  misc_feature: MA Experiment 108597 PARAMETER Experiment Name: Zm_100uM_ABA_P Parameter: Tissue Value: Aerial
  misc_feature: MA Experiment 108597 PARAMETER Experiment Name: Zm_100uM_ABA_P Parameter: Treatment Value: 100uM ABA vs. No Treatment
  misc_feature: MA Experiment ID: 20000478 Result: Down-regulated in Transcription
  misc_feature: MA Experiment 20000478 PARAMETER Experiment Name: Zm_5mM_SA_P Parameter: Age (day) Value: 11
  misc_feature: MA Experiment 20000478 PARAMETER Experiment Name: Zm_5mM_SA_P Parameter: Organism Value: Zea mays
  misc_feature: MA Experiment 20000478 PARAMETER Experiment Name: Zm_5mM_SA_P Parameter: Plant Line Value: 35A19
  misc_feature: MA Experiment 20000478 PARAMETER Experiment Name: Zm_5mM_SA_P Parameter: Timepoint (hr) Value: 72
  misc_feature: MA Experiment 20000478 PARAMETER Experiment Name: Zm_5mM_SA_P Parameter: Tissue Value: Aerial
  misc_feature: MA Experiment 20000478 PARAMETER Experiment Name: Zm_5mM_SA_P Parameter: Treatment Value: 5mM SA vs. No Treatment
  misc_feature: MA Experiment ID: 20000479 Result: Down-regulated in Transcription
  misc_feature: MA Experiment 20000479 PARAMETER Experiment Name: Zm_Drought_P Parameter: Age (day) Value: 10
  misc_feature: MA Experiment 20000479 PARAMETER Experiment Name: Zm_Drought_P Parameter: Organism Value: Zea mays
  misc_feature: MA Experiment 20000479 PARAMETER Experiment Name: Zm_Drought_P Parameter: Plant Line Value: 35A19
  misc_feature: MA Experiment 20000479 PARAMETER Experiment Name: Zm_Drought_P Parameter: Timepoint (hr) Value: 48
  misc_feature: MA Experiment 20000479 PARAMETER Experiment Name: Zm_Drought_P Parameter: Tissue Value: Aerial
  misc_feature: MA Experiment 20000479 PARAMETER Experiment Name: Zm_Drought_P Parameter: Treatment Value: Drought vs. No Drought
  misc_feature: MA Experiment ID: 20000492 Result: Up-regulated in Transcription
  misc_feature: MA Experiment 20000492 PARAMETER Experiment Name: Zm_Hybrid_Seed_Dev_P Parameter: DAP Value: 12
  misc_feature: MA Experiment 20000492 PARAMETER Experiment Name: Zm_Hybrid_Seed_Dev_P Parameter: Organism Value: Zea mays
  misc_feature: MA Experiment 20000492 PARAMETER Experiment Name: Zm_Hybrid_Seed_Dev_P Parameter: Plant Line Value: 35A19
  misc_feature: MA Experiment 20000492 PARAMETER Experiment Name: Zm_Hybrid_Seed_Dev_P Parameter: Tissue Value: Fert Kernel vs. Unfert Floret
  misc_feature: MA Experiment ID: 20000535 Result: Up-regulated in Transcription
  misc_feature: MA Experiment 20000535 PARAMETER Experiment Name: Zm_Hybrid_Seed_Dev_P Parameter: DAP Value: 30 vs. 12
  misc_feature: MA Experiment 20000535 PARAMETER Experiment Name: Zm_Hybrid_Seed_Dev_P Parameter: Organism Value: Zea mays
  misc_feature: MA Experiment 20000535 PARAMETER Experiment Name: Zm_Hybrid_Seed_Dev_P Parameter: Plant Line Value: 35A19
  misc_feature: MA Experiment 20000535 PARAMETER Experiment Name: Zm_Hybrid_Seed_Dev_P Parameter: Tissue Value: Embryo vs. Unfert Floret
  misc_feature: MA Experiment ID: 20000632 Result: Down-regulated in Transcription
  misc_feature: MA Experiment 20000632 PARAMETER Experiment Name: Zm_Herbicide-Treatments_P Parameter: Timepoint (hr) Value: 4
  misc_feature: MA Experiment 20000632 PARAMETER Experiment Name: Zm_Herbicide-Treatments_P Parameter: Tissue Value: Aerial
  misc_feature: MA Experiment 20000632 PARAMETER Experiment Name: Zm_Herbicide-Treatments_P Parameter: Treatment Value: Glean vs. No Treatment
acagtcccactcctctctctctcgcgctctctctctttcatcgccaccaccgccgtgaaatccgcacgcgtgcttcctgtcgatttttgagctgtgactgtgagcgccatggccgtggaggctgtgtccggaaatggcaccgaggcagtggccgcggcgccggcgaaggaggtgagcaccaagcaggcgtctttccgggaggagagcaacttcctggacgatctcaaggagagcgagcgtaaggcgcttgccgagctccgcgacaaggtcgaggcggccatcgtggagggcaagctgttcgacgacggtaagccggaggtgaaggagaaggagaaggagaaggaggaggccaagaagaaggcagtggagaagaaagatgagcagcccgaagccgaggagaagggagaggaggatgacaagaaggaggccgacgccgaggaggagaagaaggaaggcgtggaggaaggggagaagaaggaaggccaggaggaaggggagaaggaggaggccgaggaggagagcggagacgacaccaagcaggaggccaaggaagaggaagccgacgacaaggcggcggcgaaggagccggagacggcggccgttgtcgtcgacaaggacatcgcgctgtggggcgtgcctttgctccctagcaagggcgacgaggccaccgacgtggtgctcctcaagttcctccgcgcgcgcgacttcaaggccggcgccgcgttcgagatgctccgccgcacgctccgctggcgcagggactggaccggcttcagctccggcgccgagtccgacgccgacctccccgaggagctcgcgggcgcgtgctacctcgacggcgcagaccacgagggccacccggtgtgctacaacgcgctgggcgtgttcgcggacgacgccgtgtacaagaaggcgctgggcaccgaggaaggcaaggccaggttcctccggtggcgggtgcgcgccatggagcgccacgtcgccgagctggacctgaggcccggcggcgtcgcgtcgctgctgcaggtgatcgacctcaggaactcgccggggccggccaagaaggacttccgagtcgccgtcaagcaggtgctcgacctgttccaggacaactaccccgagctcgtcgcgagaaacatcttggtcaacgtgccgttctggtactacgcgttcagcaccctgttctacccgttcctgacgcagaggacgaagagcaagttcgtcgttgctcgcccgtcaaaggtcaccgagaccctcctcaagtacattccgatcgaggccatcccggtgaagtacggcggcctgaagcgcgacggcgacaccgagttctcggcggacgacggcgaggtcgcggaggtcaccgtcaagggaagctccacggagaccatcgagatcgaagctactgaggctgatgccacgctgacatgggacctgactgtgctggggtgggaggtgaactacaaggaggagttcgtgccggcggacgagggctcctacactatcatcgtcaggaaaggcaagaagatggcgtccggcgaggaggcggtccgcaactcgttccgcgccggcgagccgggcaaggtcgtgctcaccgtccagaacacctcgcacaggaagaagaaggtgctgttcaggcacaaggccaagagcgcctgcgccaagaagtgctgagaggctaagaaatttgggagtgaaattggttgtggatttcaatattcgttacattctttgtgtgtgtgtaaggagagagagagagaacattgttcgctgattatttgaggtggttgttgcagcaaaaatgcaaagagttttcgattg

SEQ ID NO: 1560 - protein, 520 aa, Zea mays subsp. mays
  peptide (1)..(520): Ceres Seq. ID no. 12355482
  misc_feature (239)..(398): Pfam Name: CRAL/TRIO domain Pfam Description: CRAL/TRIO domain
  misc_feature (122)..(513): Homolog of NCBI NO: 15081614 NR Description: At1g72160/T9N14_8 [Arabidopsis thaliana]
  misc_feature (140)..(515): Homolog of NCBI NO: 15230555 NR Description: putative protein
  misc_feature (437)..(516): Homolog of NCBI NO: 25407487 NR Description: hypothetical protein AT4g09160 [imported] -
  misc_feature (1)..(429): Homolog of NCBI NO: 25407487 NR Description: hypothetical protein AT4g09160 [imported] -
  misc_feature (38)..(513): Homolog of NCBI NO: 15218383 NR Description: cytosolic factor, putative
  misc_feature (1)..(516): Homolog of NCBI NO: 30680992 NR Description: expressed protein [Arabidopsis thaliana]
  misc_feature (37)..(511): Homolog of NCBI NO: 8894548 NR Description: hypothetical protein [Cicer arietinum]
  misc_feature (12)..(514): Homolog of NCBI NO: 34907288 NR Description: contains ESTs
  misc_feature (25)..(514): Homolog of NCBI NO: 14334978 NR Description: unknown protein [Arabidopsis thaliana]
  misc_feature (25)..(514): Homolog of NCBI NO: 18397616 NR Description: expressed protein
MAVEAVSGNGTEAVAAAPAKEVSTKQASFREESNFLDDLKESERKALAELRDKVEAAIVEGKLFDDGKPEVKEKEKEKEEAKKKAVEKKDEQPEAEEKGEEDDKKEADAEEEKKEGVEEGEKKEGQEEGEKEEAEEESGDDTKQEAKEEEADDKAAAKEPETAAVVVDKDIALWGVPLLPSKGDEATDVVLLKFLRARDFKAGAAFEMLRRTLRWRRDWTGFSSGAESDADLPEELAGACYLDGADHEGHPVCYNALGVFADDAVYKKALGTEEGKARFLRWRVRAMERHVAELDLRPGGVASLLQVIDLRNSPGPAKKDFRVAVKQVLDLFQDNYPELVARNILVNVPFWYYAFSTLFYPFLTQRTKSKFVVARPSKVTETLLKYIPIEAIPVKYGGLKRDGDTEFSADDGEVAEVTVKGSSTETIEIEATEADATLTWDLTVLGWEVNYKEEFVPADEGSYTIIVRKGKKMASGEEAVRNSFRAGEPGKVVLTVQNTSHRKKKVLFRHKAKSACAKKC

SEQ ID NO: 1561 - protein, 313 aa, Zea mays subsp. mays
  peptide (1)..(313): Ceres Seq. ID no. 12355483
  misc_feature (32)..(191): Pfam Name: CRAL/TRIO domain Pfam Description: CRAL/TRIO domain
  misc_feature (1)..(307): Homolog of NCBI NO: 14334978 NR Description: unknown protein [Arabidopsis thaliana]
  misc_feature (1)..(306): Homolog of NCBI NO: 15081614 NR Description: At1g72160/T9N14_8 [Arabidopsis thaliana]
  misc_feature (230)..(309): Homolog of NCBI NO: 25407487 NR Description: hypothetical protein AT4g09160 [imported] -
  misc_feature (1)..(306): Homolog of NCBI NO: 15218383 NR Description: cytosolic factor, putative
  misc_feature (1)..(304): Homolog of NCBI NO: 8894548 NR Description: hypothetical protein [Cicer arietinum]
  misc_feature (1)..(307): Homolog of NCBI NO: 34907288 NR Description: contains ESTs
  misc_feature (1)..(309): Homolog of NCBI NO: 30680992 NR Description: expressed protein [Arabidopsis thaliana]
  misc_feature (1)..(222): Homolog of NCBI NO: 25407487 NR Description: hypothetical protein AT4g09160 [imported] -
  misc_feature (1)..(308): Homolog of NCBI NO: 15230555 NR Description: putative protein
  misc_feature (1)..(307): Homolog of NCBI NO: 18397616 NR Description: expressed protein
MLRRTLRWRRDWTGFSSGAESDADLPEELAGACYLDGADHEGHPVCYNALGVFADDAVYKKALGTEEGKARFLRWRVRAMERHVAELDLRPGGVASLLQVIDLRNSPGPAKKDFRVAVKQVLDLFQDNYPELVARNILVNVPFWYYAFSTLFYPFLTQRTKSKFVVARPSKVTETLLKYIPIEAIPVKYGGLKRDGDTEFSADDGEVAEVTVKGSSTETIEIEATEADATLTWDLTVLGWEVNYKEEFVPADEGSYTIIVRKGKKMASGEEAVRNSFRAGEPGKVVLTVQNTSHRKKKVLFRHKAKSACAKKC

SEQ ID NO: 1562 - DNA, 1177 bp, Zea mays subsp. mays
  misc_feature (1)..(1177): Ceres Seq. ID no. 12405858
  misc_feature: MA Experiment ID: 108522 Result: Up-regulated in Transcription
  misc_feature: MA Experiment 108522 PARAMETER Experiment Name: Zm_42deg_Heat_P Parameter: Age (day) Value: 8
  misc_feature: MA Experiment 108522 PARAMETER Experiment Name: Zm_42deg_Heat_P Parameter: Organism Value: Zea mays
  misc_feature: MA Experiment 108522 PARAMETER Experiment Name: Zm_42deg_Heat_P Parameter: Plant Line Value: 35A19
  misc_feature: MA Experiment 108522 PARAMETER Experiment Name: Zm_42deg_Heat_P Parameter: Temperature (deg C) Value: 42 vs. 22
  misc_feature: MA Experiment 108522 PARAMETER Experiment Name: Zm_42deg_Heat_P Parameter: Timepoint (hr) Value: 1
  misc_feature: MA Experiment 108522 PARAMETER Experiment Name: Zm_42deg_Heat_P Parameter: Tissue Value: Aerial
  misc_feature: MA Experiment ID: 108527 Result: Up-regulated in Transcription
  misc_feature: MA Experiment 108527 PARAMETER Experiment Name: Zm_5mM_NO_P Parameter: Age (day) Value: 8
  misc_feature: MA Experiment 108527 PARAMETER Experiment Name: Zm_5mM_NO_P Parameter: Organism Value: Zea mays
  misc_feature: MA Experiment 108527 PARAMETER Experiment Name: Zm_5mM_NO_P Parameter: Plant Line Value: 35A19
  misc_feature: MA Experiment 108527 PARAMETER Experiment Name: Zm_5mM_NO_P Parameter: Timepoint (hr) Value: 6
  misc_feature: MA Experiment 108527 PARAMETER Experiment Name: Zm_5mM_NO_P Parameter: Tissue Value: Aerial
  misc_feature: MA Experiment 108527 PARAMETER Experiment Name: Zm_5mM_NO_P Parameter: Treatment Value: 5mM NO vs. No Treatment
  misc_feature: MA Experiment ID: 108543 Result: Down-regulated in Transcription
  misc_feature: MA Experiment ID: 108556 Result: Up-regulated in Transcription
  misc_feature: MA Experiment 108556 PARAMETER Experiment Name: Zm_Drought_P Parameter: Age (day) Value: 9
  misc_feature: MA Experiment 108556 PARAMETER Experiment Name: Zm_Drought_P Parameter: Organism Value: Zea mays
  misc_feature: MA Experiment 108556 PARAMETER Experiment Name: Zm_Drought_P Parameter: Plant Line Value: 35A19
  misc_feature: MA Experiment 108556 PARAMETER Experiment Name: Zm_Drought_P Parameter: Timepoint (hr) Value: 24
  misc_feature: MA Experiment 108556 PARAMETER Experiment Name: Zm_Drought_P Parameter: Tissue Value: Aerial
  misc_feature: MA Experiment 108556 PARAMETER Experiment Name: Zm_Drought_P Parameter: Treatment Value: Drought vs. No Drought
  misc_feature: MA Experiment ID: 108559 Result: Up-regulated in Transcription
  misc_feature: MA Experiment 108559 PARAMETER Experiment Name: Zm_5mM_NO_P Parameter: Age (day) Value: 8
  misc_feature: MA Experiment 108559 PARAMETER Experiment Name: Zm_5mM_NO_P Parameter: Organism Value: Zea mays
  misc_feature: MA Experiment 108559 PARAMETER Experiment Name: Zm_5mM_NO_P Parameter: Plant Line Value: 35A19
  misc_feature: MA Experiment 108559 PARAMETER Experiment Name: Zm_5mM_NO_P Parameter: Timepoint (hr) Value: 12
  misc_feature: MA Experiment 108559 PARAMETER Experiment Name: Zm_5mM_NO_P Parameter: Tissue Value: Aerial
  misc_feature: MA Experiment 108559 PARAMETER Experiment Name: Zm_5mM_NO_P Parameter: Treatment Value: 5mM NO vs. No Treatment
  misc_feature: MA Experiment ID: 20000478 Result: Up-regulated in Transcription
  misc_feature: MA Experiment 20000478 PARAMETER Experiment Name: Zm_5mM_SA_P Parameter: Age (day) Value: 11
  misc_feature: MA Experiment 20000478 PARAMETER Experiment Name: Zm_5mM_SA_P Parameter: Organism Value: Zea mays
  misc_feature: MA Experiment 20000478 PARAMETER Experiment Name: Zm_5mM_SA_P Parameter: Plant Line Value: 35A19
  misc_feature: MA Experiment 20000478 PARAMETER Experiment Name: Zm_5mM_SA_P Parameter: Timepoint (hr) Value: 72
  misc_feature: MA Experiment 20000478 PARAMETER Experiment Name: Zm_5mM_SA_P Parameter: Tissue Value: Aerial
  misc_feature: MA Experiment 20000478 PARAMETER Experiment Name: Zm_5mM_SA_P Parameter: Treatment Value: 5mM SA vs. No Treatment
  misc_feature: MA Experiment ID: 20000479 Result: Up-regulated in Transcription
  misc_feature: MA Experiment 20000479 PARAMETER Experiment Name: Zm_Drought_P Parameter: Age (day) Value: 10
  misc_feature: MA Experiment 20000479 PARAMETER Experiment Name: Zm_Drought_P Parameter: Organism Value: Zea mays
  misc_feature: MA Experiment 20000479 PARAMETER Experiment Name: Zm_Drought_P Parameter: Plant Line Value: 35A19
  misc_feature: MA Experiment 20000479 PARAMETER Experiment Name: Zm_Drought_P Parameter: Timepoint (hr) Value: 48
  misc_feature: MA Experiment 20000479 PARAMETER Experiment Name: Zm_Drought_P Parameter: Tissue Value: Aerial
  misc_feature: MA Experiment 20000479 PARAMETER Experiment Name: Zm_Drought_P Parameter: Treatment Value: Drought vs. No Drought
  misc_feature: MA Experiment ID: 20000626 Result: Up-regulated in Transcription
  misc_feature: MA Experiment 20000626 PARAMETER Experiment Name: Zm_Herbicide-Treatments_P Parameter: Timepoint (hr) Value: 12
  misc_feature: MA Experiment 20000626 PARAMETER Experiment Name: Zm_Herbicide-Treatments_P Parameter: Tissue Value: Aerial
  misc_feature: MA Experiment 20000626 PARAMETER Experiment Name: Zm_Herbicide-Treatments_P Parameter: Treatment Value: Roundup vs. No Treatment
gtctcaggtagcagtcgcgtgatgaatccgggggcgtgcagataaaaccctccctcgattaaccctaattccttttctcttcggggatactcctttcaccgagtctcttctggttctcggcgtgtgctcgtgtgcagatttgactccatgtcggcggcgctcgcggtgacggacgaggtggccctgccgatccgggcggtgggggatctggcggccgccgccgaggtctcgcgggaggaggtcgccgtcatcacccagtgcgcggcgctcggtgggaagttgccttttgaagatgcatcagttggtgcggttcttgcagtcattaaaaacgtggaaagcttgagggagcaattggttgctgaaatcaggcgggtgctgaaagctggtggaagagtattggtgcagagccctgcaccctcatccagtcagaagccgaacactgatattgagcgcaagttactgatgggtggatttgctgaagtgcaatcttctgctgcaagctcgcaggatagcgtgcaatctgttacagttaaggcaaagaaggctagctggagcatgggctcttcttttccccttaagaaaacaacaaaagcccttcccaagattcaaattgacgacgactctgatctgattgatgaagacagtctcttgactgaggaggacctgaagaaaccacaacttccagttgttggggactgtgaggtgggggcagcaaanaaagcatgcaagaactgtacttgtggcagggctgaggccgaggagaaggttgggaagctggagctcactgcggagcagatcaataaccctcagtcagcttgtggcagttgtgggttgggtgatgccttccgctgtggaacctgtccctacagaggtcttccaccattcaagcctggcgagaaggtttccttgtctggcaacttccttgctgctgacatatgatggcatcgccaacatcggcaaaacaaggagacgggggttacctacgttgttagtcgactgaactgcattccaaatagcttctgttagccaatgcgaatgtgcgtgtgagtgacttgtctttcggatgatatatatataagctggccaatcgcgcctctacacaaacacaaagtgtgcatcagtgcatgtgttttcagattgattttgtgagcctggatgtgaagaatgaatatcgctt

SEQ ID NO: 1563 - protein, 263 aa, Zea mays subsp. mays
  peptide (1)..(263): Ceres Seq. ID no. 12405859
  misc_feature (106)..(255): Pfam Name: Protein of unknown function (DUF689) Pfam Description: Protein of unknown function (DUF689)
  misc_feature (118)..(259): Homolog of NCBI NO: 3252825 NR Description: Unknown gene product [Homo sapiens]
  misc_feature (112)..(259): Homolog of NCBI NO: 27658522 NR Description: similar to RIKEN cDNA 2810413N20
  misc_feature (112)..(259): Homolog of NCBI NO: 19527376 NR Description: RIKEN cDNA 2810413N20 [Mus musculus]
  misc_feature (112)..(259): Homolog of NCBI NO: 18314528 NR Description: Unknown (protein for IMAGE:5100442) [Mus musculus]
  misc_feature (44)..(263): Homolog of NCBI NO: 17933742 NR Description: lethal (2) 35Bg CG4180-PA
  misc_feature (58)..(263): Homolog of NCBI NO: 2293332 NR Description: unknown [Dictyostelium discoideum]
  misc_feature (1)..(263): Homolog of NCBI NO: 19424097 NR Description: unknown protein [Arabidopsis thaliana]
  misc_feature (1)..(263): Homolog of NCBI NO: 30686798 NR Description: expressed protein [Arabidopsis thaliana]
  misc_feature (1)..(263): Homolog of NCBI NO: 18418605 NR Description: putative protein
  misc_feature (1)..(263): Homolog of NCBI NO: 38344920 NR Description: OSJNBa0018M05.11 [Oryza sativa (japonica
  misc_feature (190)..(190): Xaa is any aa, unknown or other
MSAALAVTDEVALPIRAVGDLAAAAEVSREEVAVITQCAALGGKLPFEDASVGAVLAVIKNVESLREQLVAEIRRVLKAGGRVLVQSPAPSSSQKPNTDIERKLLMGGFAEVQSSAASSQDSVQSVTVKAKKASWSMGSSFPLKKTTKALPKIQIDDDSDLIDEDSLLTEEDLKKPQLPVVGDCEVGAAXKACKNCTCGRAEAEEKVGKLELTAEQINNPQSACGSCGLGDAFRCGTCPYRGLPPFKPGEKVSLSGNFLAADI

SEQ ID NO: 1564 - protein, 158 aa, Zea mays subsp. mays
  peptide (1)..(158): Ceres Seq. ID no. 12405860
  misc_feature (1)..(150): Pfam Name: Protein of unknown function (DUF689) Pfam Description: Protein of unknown function (DUF689)
  misc_feature (13)..(154): Homolog of NCBI NO: 3252825 NR Description: Unknown gene product [Homo sapiens]
  misc_feature (7)..(154): Homolog of NCBI NO: 27658522 NR Description: similar to RIKEN cDNA 2810413N20
  misc_feature (7)..(154): Homolog of NCBI NO: 19527376 NR Description: RIKEN cDNA 2810413N20 [Mus musculus]
  misc_feature (7)..(154): Homolog of NCBI NO: 18314528 NR Description: Unknown (protein for IMAGE:5100442) [Mus musculus]
  misc_feature (1)..(158): Homolog of NCBI NO: 17933742 NR Description: lethal (2) 35Bg CG4180-PA
  misc_feature (1)..(158): Homolog of NCBI NO: 2293332 NR Description: unknown [Dictyostelium discoideum]
  misc_feature (1)..(158): Homolog of NCBI NO: 19424097 NR Description: unknown protein [Arabidopsis thaliana]
  misc_feature (1)..(158): Homolog of NCBI NO: 30686798 NR Description: expressed protein [Arabidopsis thaliana]
  misc_feature (1)..(158): Homolog of NCBI NO: 18418605 NR Description: putative protein
  misc_feature (1)..(158): Homolog of NCBI NO: 38344920 NR Description: OSJNBa0018M05.11 [Oryza sativa (japonica
  misc_feature (85)..(85): Xaa is any aa, unknown or other
MGGFAEVQSSAASSQDSVQSVTVKAKKASWSMGSSFPLKKTTKALPKIQIDDDSDLIDEDSLLTEEDLKKPQLPVVGDCEVGAAXKACKNCTCGRAEAEEKVGKLELTAEQINNPQSACGSCGLGDAFRCGTCPYRGLPPFKPGEKVSLSGNFLAADI

SEQ ID NO: 1565 - DNA, 955 bp, Zea mays subsp. mays
  misc_feature (1)..(955): Ceres Seq. ID no. 12413575
  misc_feature: MA Experiment ID: 108504 Result: Up-regulated in Transcription
  misc_feature: MA Experiment 108504 PARAMETER Experiment Name: Zm_Drought_P Parameter: Age (day) Value: 8
  misc_feature: MA Experiment 108504 PARAMETER Experiment Name: Zm_Drought_P Parameter: Organism Value: Zea mays
  misc_feature: MA Experiment 108504 PARAMETER Experiment Name: Zm_Drought_P Parameter: Plant Line Value: 35A19
  misc_feature: MA Experiment 108504 PARAMETER Experiment Name: Zm_Drought_P Parameter: Timepoint (hr) Value: 12
  misc_feature: MA Experiment 108504 PARAMETER Experiment Name: Zm_Drought_P Parameter: Tissue Value: Aerial
  misc_feature: MA Experiment 108504 PARAMETER Experiment Name: Zm_Drought_P Parameter: Treatment Value: Drought vs. No Drought
  misc_feature: MA Experiment ID: 108522 Result: Up-regulated in Transcription
  misc_feature: MA Experiment 108522 PARAMETER Experiment Name: Zm_42deg_Heat_P Parameter: Age (day) Value: 8
  misc_feature: MA Experiment 108522 PARAMETER Experiment Name: Zm_42deg_Heat_P Parameter: Organism Value: Zea mays
  misc_feature: MA Experiment 108522 PARAMETER Experiment Name: Zm_42deg_Heat_P Parameter: Plant Line Value: 35A19
  misc_feature: MA Experiment 108522 PARAMETER Experiment Name: Zm_42deg_Heat_P Parameter: Temperature (deg C) Value: 42 vs. 22
  misc_feature: MA Experiment 108522 PARAMETER Experiment Name: Zm_42deg_Heat_P Parameter: Timepoint (hr) Value: 1
  misc_feature: MA Experiment 108522 PARAMETER Experiment Name: Zm_42deg_Heat_P Parameter: Tissue Value: Aerial
  misc_feature: MA Experiment ID: 108526 Result: Up-regulated in Transcription
  misc_feature: MA Experiment 108526 PARAMETER Experiment Name: Zm_5mM_NO_P Parameter: Age (day) Value: 8
  misc_feature: MA Experiment 108526 PARAMETER Experiment Name: Zm_5mM_NO_P Parameter: Organism Value: Zea mays
  misc_feature: MA Experiment 108526 PARAMETER Experiment Name: Zm_5mM_NO_P Parameter: Plant Line Value: 35A19
  misc_feature: MA Experiment 108526 PARAMETER Experiment Name: Zm_5mM_NO_P Parameter: Timepoint (hr) Value: 1
  misc_feature: MA Experiment 108526 PARAMETER Experiment Name: Zm_5mM_NO_P Parameter: Tissue Value: Aerial
  misc_feature: MA Experiment 108526 PARAMETER Experiment Name: Zm_5mM_NO_P Parameter: Treatment Value: 5mM NO vs. No Treatment
  misc_feature: MA Experiment ID: 108528 Result: Up-regulated in Transcription
  misc_feature: MA Experiment 108528 PARAMETER Experiment Name: Zm_Imbibed_Seeds_P Parameter: Age (day) Value: 5 vs. 2
  misc_feature: MA Experiment 108528 PARAMETER Experiment Name: Zm_Imbibed_Seeds_P Parameter: Organism Value: Zea mays
  misc_feature: MA Experiment 108528 PARAMETER Experiment Name: Zm_Imbibed_Seeds_P Parameter: Plant Line Value: 35A19
  misc_feature: MA Experiment 108528 PARAMETER Experiment Name: Zm_Imbibed_Seeds_P Parameter: Tissue Value: Aerial vs. Embryo
  misc_feature: MA Experiment ID: 108529 Result: Up-regulated in Transcription
  misc_feature: MA Experiment 108529 PARAMETER Experiment Name: Zm_Imbibed_Seeds_P Parameter: Age (day) Value: 5 vs. 2
  misc_feature: MA Experiment 108529 PARAMETER Experiment Name: Zm_Imbibed_Seeds_P Parameter: Organism Value: Zea mays
  misc_feature: MA Experiment 108529 PARAMETER Experiment Name: Zm_Imbibed_Seeds_P Parameter: Plant Line Value: 35A19
  misc_feature: MA Experiment 108529 PARAMETER Experiment Name: Zm_Imbibed_Seeds_P Parameter: Tissue Value: Roots vs. Embryo
  misc_feature: MA Experiment ID: 108530 Result: Up-regulated in Transcription
  misc_feature: MA Experiment 108530 PARAMETER Experiment Name: Zm_Imbibed_Seeds_P Parameter: Age (day) Value: 6 vs. 2
  misc_feature: MA Experiment 108530 PARAMETER Experiment Name: Zm_Imbibed_Seeds_P Parameter: Organism Value: Zea mays
  misc_feature: MA Experiment 108530 PARAMETER Experiment Name: Zm_Imbibed_Seeds_P Parameter: Plant Line Value: 35A19
  misc_feature: MA Experiment 108530 PARAMETER Experiment Name: Zm_Imbibed_Seeds_P Parameter: Tissue Value: Aerial vs. Embryo
  misc_feature: MA Experiment ID: 108534 Result: Down-regulated in Transcription
  misc_feature: MA Experiment 108534 PARAMETER Experiment Name: Zm_4deg_Cold_P Parameter: Age (hr) Value: 8
  misc_feature: MA Experiment 108534 PARAMETER Experiment Name: Zm_4deg_Cold_P Parameter: Organism Value: Zea mays
  misc_feature: MA Experiment 108534 PARAMETER Experiment Name: Zm_4deg_Cold_P Parameter: Plant Line Value: 35A19
  misc_feature: MA Experiment 108534 PARAMETER Experiment Name: Zm_4deg_Cold_P Parameter: Temperature (deg C) Value: 4 vs. 22
  misc_feature: MA Experiment 108534 PARAMETER Experiment Name: Zm_4deg_Cold_P Parameter: Timepoint (hr) Value: 6
  misc_feature: MA Experiment 108534 PARAMETER Experiment Name: Zm_4deg_Cold_P Parameter: Tissue Value: Aerial
  misc_feature: MA Experiment ID: 108542 Result: Up-regulated in Transcription
  misc_feature: MA Experiment 108542 PARAMETER Experiment Name: Zm_150mM_NaCl_P Parameter: Age (day) Value: 8
  misc_feature: MA Experiment 108542 PARAMETER Experiment Name: Zm_150mM_NaCl_P Parameter: Organism Value: Zea mays
  misc_feature: MA Experiment 108542 PARAMETER Experiment Name: Zm_150mM_NaCl_P Parameter: Plant Line Value: 35A19
  misc_feature: MA Experiment 108542 PARAMETER Experiment Name: Zm_150mM_NaCl_P Parameter: Timepoint (hr) Value: 6
  misc_feature: MA Experiment 108542 PARAMETER Experiment Name: Zm_150mM_NaCl_P Parameter: Tissue Value: Aerial
  misc_feature: MA Experiment 108542 PARAMETER Experiment Name: Zm_150mM_NaCl_P Parameter: Treatment Value: 150mM NaCl vs. No Treatment
  misc_feature: MA Experiment ID: 108543 Result: Down-regulated in Transcription
  misc_feature: MA Experiment ID: 108545 Result: Up-regulated in Transcription
  misc_feature: MA Experiment 108545 PARAMETER Experiment Name: Zm_Imbibed_Seeds_P Parameter: Age (day) Value: 3 vs. 2
  misc_feature: MA Experiment 108545 PARAMETER Experiment Name: Zm_Imbibed_Seeds_P Parameter: Organism Value: Zea mays
  misc_feature: MA Experiment 108545 PARAMETER Experiment Name: Zm_Imbibed_Seeds_P Parameter: Plant Line Value: 35A19
  misc_feature: MA Experiment 108545 PARAMETER Experiment Name: Zm_Imbibed_Seeds_P Parameter: Tissue Value: Aerial vs. Embryo
  misc_feature: MA Experiment ID: 108546 Result: Up-regulated in Transcription
  misc_feature: MA Experiment 108546 PARAMETER Experiment Name: Zm_Imbibed_Seeds_P Parameter: Age (day) Value: 3 vs. 2
  misc_feature: MA Experiment 108546 PARAMETER Experiment Name: Zm_Imbibed_Seeds_P Parameter: Organism Value: Zea mays
  misc_feature: MA Experiment 108546 PARAMETER Experiment Name: Zm_Imbibed_Seeds_P Parameter: Plant Line Value: 35A19
  misc_feature: MA Experiment 108546 PARAMETER Experiment Name: Zm_Imbibed_Seeds_P Parameter: Tissue Value: Roots vs. Embryo
  misc_feature: MA Experiment ID: 108547 Result: Up-regulated in Transcription
  misc_feature: MA Experiment 108547 PARAMETER Experiment Name: Zm_Imbibed_Seeds_P Parameter: Age (day) Value: 4 vs. 2
  misc_feature: MA Experiment 108547 PARAMETER Experiment Name: Zm_Imbibed_Seeds_P Parameter: Organism Value: Zea mays
  misc_feature: MA Experiment 108547 PARAMETER Experiment Name: Zm_Imbibed_Seeds_P Parameter: Plant Line Value: 35A19
  misc_feature: MA Experiment 108547 PARAMETER Experiment Name: Zm_Imbibed_Seeds_P Parameter: Tissue Value: Aerial vs. Embryo
  misc_feature: MA Experiment ID: 108556 Result: Up-regulated in Transcription
  misc_feature: MA Experiment 108556 PARAMETER Experiment Name: Zm_Drought_P Parameter: Age (day) Value: 9
  misc_feature: MA Experiment 108556 PARAMETER Experiment Name: Zm_Drought_P Parameter: Organism Value: Zea mays
  misc_feature: MA Experiment 108556 PARAMETER Experiment Name: Zm_Drought_P Parameter: Plant Line Value: 35A19
  misc_feature: MA Experiment 108556 PARAMETER Experiment Name: Zm_Drought_P Parameter: Timepoint (hr) Value: 24
  misc_feature: MA Experiment 108556 PARAMETER Experiment Name: Zm_Drought_P Parameter: Tissue Value: Aerial
  misc_feature: MA Experiment 108556 PARAMETER Experiment Name: Zm_Drought_P Parameter: Treatment Value: Drought vs. No Drought
  misc_feature: MA Experiment ID: 20000478 Result: Up-regulated in Transcription
  misc_feature: MA Experiment 20000478 PARAMETER Experiment Name: Zm_5mM_SA_P Parameter: Age (day) Value: 11
  misc_feature: MA Experiment 20000478 PARAMETER Experiment Name: Zm_5mM_SA_P Parameter: Organism Value: Zea mays
  misc_feature: MA Experiment 20000478 PARAMETER Experiment Name: Zm_5mM_SA_P Parameter: Plant Line Value: 35A19
  misc_feature: MA Experiment 20000478 PARAMETER Experiment Name: Zm_5mM_SA_P Parameter: Timepoint (hr) Value: 72
  misc_feature: MA Experiment 20000478 PARAMETER Experiment Name: Zm_5mM_SA_P Parameter: Tissue Value: Aerial
  misc_feature: MA Experiment 20000478 PARAMETER Experiment Name: Zm_5mM_SA_P Parameter: Treatment Value: 5mM SA vs. No Treatment
  misc_feature: MA Experiment ID: 20000479 Result: Up-regulated in Transcription
  misc_feature: MA Experiment 20000479 PARAMETER Experiment Name: Zm_Drought_P Parameter: Age (day) Value: 10
  misc_feature: MA Experiment 20000479 PARAMETER Experiment Name: Zm_Drought_P Parameter: Organism Value: Zea mays
  misc_feature: MA Experiment 20000479 PARAMETER Experiment Name: Zm_Drought_P Parameter: Plant Line Value: 35A19
  misc_feature: MA Experiment 20000479 PARAMETER Experiment Name: Zm_Drought_P Parameter: Timepoint (hr) Value: 48
  misc_feature: MA Experiment 20000479 PARAMETER Experiment Name: Zm_Drought_P Parameter: Tissue Value: Aerial
  misc_feature: MA Experiment 20000479 PARAMETER Experiment Name: Zm_Drought_P Parameter: Treatment Value: Drought vs. No Drought
gtaccctcacactctgctttatatactgccgaaggtaatcccgttcgcagttcacctacgcggaaaatcactagtgattcgctgaacaaaaaaaaattacaagaaggaatcgagagcaaatgctatcttcaaccacactccgaccgccggcgccggcacacctcaccatctgctcctcgcccgcagcgtggcggcgtgcgccggcggtgcgcgcggtgcggaactacgactccatcccgaagcgggagcccttcagctccagccgcagcatcctccacgagttcctcaggcaggacaagcccctcatccagcgcaccaaggaccagatcacagattattgcacggccatcgaaggcgatgagtgctgcagctgttgggacgcttactttgaactgaataaacttgagcaagagctgcccaaagacgaaatcgcaaggatggtgaaggactcggagggtgacgtgaggtacctgatagagagcatccaccatcgctcggatctgcggaagaaggtggcagagaagtctcgcaattcagtaccgtcaagctcccagggtagtagagccgcgaagccaaggccgttccccgtgcctgatgggataccgaaaacgcaagaagagctcgctgaagaagaagaggcgttgatgccggagtctccgtacacgaggctgctgagaaggatgggaaggtaccctgattggtacaccccacgccctgatcatgagaccgactgaatcgagttgcccaccatcctagtgtcccttgtgggagtttttggagcatggtaatctgaggctccttttatggcctgtgttatgtggtaagattagctttgtatctattgcagtatgcagattagggtgttcttactcttttccaattgtactaatgaaaaccggtgtgtgctttatgctgtaaatatgtgataaatagctgaacgttttattcgaggttc

SEQ ID NO: 1566 - protein, 204 aa, Zea mays subsp. mays
  peptide (1)..(204): Ceres Seq. ID no. 12413576
  misc_feature (1)..(204): Homolog of NCBI NO: 18397956 NR Description: expressed protein
MLSSTTLRPPAPAHLTICSSPAAWRRAPAVRAVRNYDSIPKREPFSSSRSILHEFLRQDKPLIQRTKDQITDYCTAIEGDECCSCWDAYFELNKLEQELPKDEIARMVKDSEGDVRYLIESIHHRSDLRKKVAEKSRNSVPSSSQGSRAAKPRPFPVPDGIPKTQEELAEEEEALMPESPYTRLLRRMGRYPDWYTPRPDHETD

SEQ ID NO: 1567 - protein, 131 aa, Zea mays subsp. mays
  peptide (1)..(131): Ceres Seq. ID no. 12413577
VPSHSALYTAEGNPVRSSPTRKITSDSLNKKKLQEGIESKCYLQPHSDRRRRHTSPSAPRPQRGGVRRRCARCGTTTPSRSGSPSAPAAASSTSSSGRTSPSSSAPRTRSQIIARPSKAMSAAAVGTLTLN

SEQ ID NO: 1568 - DNA, 1756 bp, Zea mays subsp. mays
  misc_feature (1)..(1756): Ceres Seq. ID no. 13495584
  misc_feature: MA Experiment ID: 108522 Result: Up-regulated in Transcription
  misc_feature: MA Experiment 108522 PARAMETER Experiment Name: Zm_42deg_Heat_P Parameter: Age (day) Value: 8
  misc_feature: MA Experiment 108522 PARAMETER Experiment Name: Zm_42deg_Heat_P Parameter: Organism Value: Zea mays
  misc_feature: MA Experiment 108522 PARAMETER Experiment Name: Zm_42deg_Heat_P Parameter: Plant Line Value: 35A19
  misc_feature: MA Experiment 108522 PARAMETER Experiment Name: Zm_42deg_Heat_P Parameter: Temperature (deg C) Value: 42 vs. 22
  misc_feature: MA Experiment 108522 PARAMETER Experiment Name: Zm_42deg_Heat_P Parameter: Timepoint (hr) Value: 1
  misc_feature: MA Experiment 108522 PARAMETER Experiment Name: Zm_42deg_Heat_P Parameter: Tissue Value: Aerial
  misc_feature: MA Experiment ID: 108523 Result: Up-regulated in Transcription
  misc_feature: MA Experiment 108523 PARAMETER Experiment Name: Zm_42deg_Heat_P Parameter: Age (day) Value: 8
  misc_feature: MA Experiment 108523 PARAMETER Experiment Name: Zm_42deg_Heat_P Parameter: Organism Value: Zea mays
  misc_feature: MA Experiment 108523 PARAMETER Experiment Name: Zm_42deg_Heat_P Parameter: Plant Line Value: 35A19
  misc_feature: MA Experiment 108523 PARAMETER Experiment Name: Zm_42deg_Heat_P Parameter: Temperature (deg C) Value: 42 vs. 22
  misc_feature: MA Experiment 108523 PARAMETER Experiment Name: Zm_42deg_Heat_P Parameter: Timepoint (hr) Value: 6
  misc_feature: MA Experiment 108523 PARAMETER Experiment Name: Zm_42deg_Heat_P Parameter: Tissue Value: Aerial
  misc_feature: MA Experiment ID: 108597 Result: Up-regulated in Transcription
  misc_feature: MA Experiment 108597 PARAMETER Experiment Name: Zm_100uM_ABA_P Parameter: Age (day) Value: 9
  misc_feature: MA Experiment 108597 PARAMETER Experiment Name: Zm_100uM_ABA_P Parameter: Organism Value: Zea mays
  misc_feature: MA Experiment 108597 PARAMETER Experiment Name: Zm_100uM_ABA_P Parameter: Plant Line Value: 35A19
  misc_feature: MA Experiment 108597 PARAMETER Experiment Name: Zm_100uM_ABA_P Parameter: Timepoint (hr) Value: 24
  misc_feature: MA Experiment 108597 PARAMETER Experiment Name: Zm_100uM_ABA_P Parameter: Tissue Value: Aerial
  misc_feature: MA Experiment 108597 PARAMETER Experiment Name: Zm_100uM_ABA_P Parameter: Treatment Value: 100uM ABA vs. No Treatment
  misc_feature: MA Experiment ID: 108687 Result: Up-regulated in Transcription
  misc_feature: MA Experiment 108687 PARAMETER Experiment Name: Zm_Embryos-Flowers__P Parameter: Tissue Value: Embryo vs. Aerial+
  misc_feature: MA Experiment ID: 108688 Result: Down-regulated in Transcription
  misc_feature: MA Experiment 108688 PARAMETER Experiment Name: Zm_Embryos-Flowers__P Parameter: Tissue Value: Immature Flowers vs. Aerial+
  misc_feature: MA Experiment ID: 108689 Result: Up-regulated in Transcription
  misc_feature: MA Experiment 108689 PARAMETER Experiment Name: Zm_Drought_Roots_P Parameter: Age (day) Value: 9
  misc_feature: MA Experiment 108689 PARAMETER Experiment Name: Zm_Drought_Roots_P Parameter: Organism Value: Zea mays
  misc_feature: MA Experiment 108689 PARAMETER Experiment Name: Zm_Drought_Roots_P Parameter: Plant Line Value: 35A19
  misc_feature: MA Experiment 108689 PARAMETER Experiment Name: Zm_Drought_Roots_P Parameter: Timepoint (hr) Value: 24
  misc_feature: MA Experiment 108689 PARAMETER Experiment Name: Zm_Drought_Roots_P Parameter: Tissue Value: Roots
  misc_feature: MA Experiment 108689 PARAMETER Experiment Name: Zm_Drought_Roots_P Parameter: Treatment Value: Drought vs. No Drought
  misc_feature: MA Experiment ID: 20000480 Result: Up-regulated in Transcription
  misc_feature: MA Experiment 20000480 PARAMETER Experiment Name: Zm_Drought_P Parameter: Age (day) Value: 11
  misc_feature: MA Experiment 20000480 PARAMETER Experiment Name: Zm_Drought_P Parameter: Organism Value: Zea mays
  misc_feature: MA Experiment 20000480 PARAMETER Experiment Name: Zm_Drought_P Parameter: Plant Line Value: 35A19
  misc_feature: MA Experiment 20000480 PARAMETER Experiment Name: Zm_Drought_P Parameter: Timepoint (hr) Value: 72
  misc_feature: MA Experiment 20000480 PARAMETER Experiment Name: Zm_Drought_P Parameter: Tissue Value: Aerial
  misc_feature: MA Experiment 20000480 PARAMETER Experiment Name: Zm_Drought_P Parameter: Treatment Value: Drought vs. No Drought
  misc_feature: MA Experiment ID: 20000535 Result: Up-regulated in Transcription
  misc_feature: MA Experiment 20000535 PARAMETER Experiment Name: Zm_Hybrid_Seed_Dev_P Parameter: DAP Value: 30 vs. 12
  misc_feature: MA Experiment 20000535 PARAMETER Experiment Name: Zm_Hybrid_Seed_Dev_P Parameter: Organism Value: Zea mays
  misc_feature: MA Experiment 20000535 PARAMETER Experiment Name: Zm_Hybrid_Seed_Dev_P Parameter: Plant Line Value: 35A19
  misc_feature: MA Experiment 20000535 PARAMETER Experiment Name: Zm_Hybrid_Seed_Dev_P Parameter: Tissue Value: Embryo vs. Unfert Floret
tctcgatccggaaacctctcaaaccctagccgcctcctgcaagtttcagagctcaggaatctgcgccatggcgagtgagacggagaccttcgcatttcaggctgagatcaaccagctgctctcactcatcatcaacaccttctactccaacaaggagatcttcctccgcgagcttatctccaactcttccgatgcgctggacaagatcaggttcgagagtctcactgacaagagcaagctcgatgcgcagcctgagcttttcatccaccttgtcccagacaaggccacgaacacgctctccatcatcgacagcggcatcggcatgaccaagtccgaccttgtcaacaacctcggtaccatcgccaggtccgggaccaaggagttcatggaagcccttgctgccggcgctgatgtgtccatgattggccagttcggcgtcggtttctactctgcctacctcgtcgccgatagagttgtcgtgaccaccaagcacaacgatgacgagcagtacgtgtgggagtcccaagcgggcgggtcgttcactgttactcgtgacacgtcaggggagcagcttggcaggggcactaagatcacactgttcctcaaggacgatcagctggagtaccttgaggagcgtcgcctcaaggatctggtcaagaagcactctgagttcatcagctaccccatctccctgtggactgaaaagacaacagagaaggaaatttctgacgacgaagacgaggaagagaagaaagatgctgaggaaggaaaggttgaggatgttgatgagaaggaagagaaagaaaagaagaaaaagaagatcaaggaggtttctcatgagtggtcattggtcaacaagcagaagcccatatggatgaggaagccagaagaaatcacaaaagaagaatatgctgccttctataagagcttgacaaatgactgggaggagcatctggctgtgaagcacttctctgtggagggtcaactggagttcaaggctgttctctttgttcctaagagggccccctttgatctctttgacaccaagaagaagcaaaacaacatcaagctctatgtgcgcagggtgttcatcatggacaactgcgaagagctgatccctgagtggctgagcttcgttaagggtattgttgactctgaggaccttcccctcaatatctctcgtgagactcttcagcagaacaagatcctgaaggtgatcaggaagaaccttgtgaagaagtgtgttgagctcttctttgagattgctgagaacaaggaggactacaacaagttttacgaggctttctccaagaacctcaagcttggcatccatgaggactcgcagaacaggaccaagatcgccgagcttctgagataccactccaccaagagtggtgatgagctgaccagcctcaaggactacgtgaccaggatgaaggagggacagaatgacatctactatatcactggtgagagcaagaaggcagtggagaactcccccttccttgagaagctgaagaagaggggctatgaggttctgcacatggttgatgccattgacgagtatgctgttggtcagctgctgctcttgatcgtctgtctagatcacagtagtgtgattgtgcagcaagcgaaacttaaattggttgctccgtgtacattaagcctattactgtcccaaagaactcgatgttatctatcggatactggaagtctgtctatcgactgcaacgcttaagcagatatggcctgtttt

SEQ ID NO: 1569 - protein, 578 aa, Zea mays subsp. mays
  peptide (1)..(578): Ceres Seq. ID no. 13495585
  misc_feature (207)..(527): Pfam Name: Hsp90 protein Pfam Description: Hsp90 protein
  misc_feature (25)..(527): Homolog of NCBI NO: 17979041 NR Description: putative heat shock protein 90 [Arabidopsis
  misc_feature (25)..(527): Homolog of NCBI NO: 15241102 NR Description: heat shock protein 81.4 (hsp81.4) [Arabidopsis
  misc_feature (25)..(527): Homolog of NCBI NO: 15241113 NR Description: heat shock protein, putative [Arabidopsis
  misc_feature (25)..(527): Homolog of NCBI NO: 15215642 NR Description: AT5g56010/MDA7_5 [Arabidopsis thaliana]
  misc_feature (25)..(527): Homolog of NCBI NO: 23397152 NR Description: putative heat shock protein 81-2 (HSP81-2)
  misc_feature (25)..(527): Homolog of NCBI NO: 15241115 NR Description: heat shock protein 81-2 (HSP81-2) [Arabidopsis
  misc_feature (25)..(527): Homolog of NCBI NO: 547683 NR Description: HEAT SHOCK COGNATE PROTEIN 80
  misc_feature (23)..(527): Homolog of NCBI NO: 4204859 NR Description: heat shock protein 80 [Triticum aestivum]
  misc_feature (23)..(527): Homolog of NCBI NO: 5123910 NR Description: HSP80-2 [Triticum aestivum]
  misc_feature (23)..(527): Homolog of NCBI NO: 417154 NR Description: HEAT SHOCK PROTEIN 82
LDPETSQTLAASCKFQSSGICAMASETETFAFQAEINQLLSLIINTFYSNKEIFLRELISNSSDALDKIRFESLTDKSKLDAQPELFIHLVPDKATNTLSIIDSGIGMTKSDLVNNLGTIARSGTKEFMEALAAGADVSMIGQFGVGFYSAYLVADRVVVTTKHNDDEQYVWESQAGGSFTVTRDTSGEQLGRGTKITLFLKDDQLEYLEERRLKDLVKKHSEFISYPISLWTEKTTEKEISDDEDEEEKKDAEEGKVEDVDEKEEKEKKKKKIKEVSHEWSLVNKQKPIWMRKPEEITKEEYAAFYKSLTNDWEEHLAVKHFSVEGQLEFKAVLFVPKRAPFDLFDTKKKQNNIKLYVRRVFIMDNCEELIPEWLSFVKGIVDSEDLPLNISRETLQQNKILKVIRKNLVKKCVELFFEIAENKEDYNKFYEAFSKNLKLGIHEDSQNRTKIAELLRYHSTKSGDELTSLKDYVTRMKEGQNDIYYITGESKKAVENSPFLEKLKKRGYEVLHMVDAIDEYAVGQLLLLIVCLDHSSVIVQQAKLKLVAPCTLSLLLSQRTRCYLSDTGSLSIDCNA

SEQ ID NO: 1570 - protein, 556 aa, Zea mays subsp. mays
  peptide (1)..(556): Ceres Seq. ID no. 13495586
  misc_feature (185)..(505): Pfam Name: Hsp90 protein Pfam Description: Hsp90 protein
  misc_feature (3)..(505): Homolog of NCBI NO: 17979041 NR Description: putative heat shock protein 90 [Arabidopsis
  misc_feature (3)..(505): Homolog of NCBI NO: 15241102 NR Description: heat shock protein 81.4 (hsp81.4) [Arabidopsis
  misc_feature (3)..(505): Homolog of NCBI NO: 15241113 NR Description: heat shock protein, putative [Arabidopsis
  misc_feature (3)..(505): Homolog of NCBI NO: 15215642 NR Description: AT5g56010/MDA7_5 [Arabidopsis thaliana]
  misc_feature (3)..(505): Homolog of NCBI NO: 23397152 NR Description: putative heat shock protein 81-2 (HSP81-2)
  misc_feature (3)..(505): Homolog of NCBI NO: 15241115 NR Description: heat shock protein 81-2 (HSP81-2) [Arabidopsis
  misc_feature (3)..(505): Homolog of NCBI NO: 547683 NR Description: HEAT SHOCK COGNATE PROTEIN 80
  misc_feature (1)..(505): Homolog of NCBI NO: 4204859 NR Description: heat shock protein 80 [Triticum aestivum]
  misc_feature (1)..(505): Homolog of NCBI NO: 5123910 NR Description: HSP80-2 [Triticum aestivum]
  misc_feature (1)..(505): Homolog of NCBI NO: 417154 NR Description: HEAT SHOCK PROTEIN 82
MASETETFAFQAEINQLLSLIINTFYSNKEIFLRELISNSSDALDKIRFESLTDKSKLDAQPELFIHLVPDKATNTLSIIDSGIGMTKSDLVNNLGTIARSGTKEFMEALAAGADVSMIGQFGVGFYSAYLVADRVVVTTKHNDDEQYVWESQAGGSFTVTRDTSGEQLGRGTKITLFLKDDQLEYLEERRLKDLVKKHSEFISYPISLWTEKTTEKEISDDEDEEEKKDAEEGKVEDVDEKEEKEKKKKKIKEVSHEWSLVNKQKPIWMRKPEEITKEEYAAFYKSLTNDWEEHLAVKHFSVEGQLEFKAVLFVPKRAPFDLFDTKKKQNNIKLYVRRVFIMDNCEELIPEWLSFVKGIVDSEDLPLNISRETLQQNKILKVIRKNLVKKCVELFFEIAENKEDYNKFYEAFSKNLKLGIHEDSQNRTKIAELLRYHSTKSGDELTSLKDYVTRMKEGQNDIYYITGESKKAVENSPFLEKLKKRGYEVLHMVDAIDEYAVGQLLLLIVCLDHSSVIVQQAKLKLVAPCTLSLLLSQRTRCYLSDTGSLSIDCNA

SEQ ID NO: 1571 - protein, 471 aa, Zea mays subsp. mays
  peptide (1)..(471): Ceres Seq. ID no. 13495587
  misc_feature (100)..(420): Pfam Name: Hsp90 protein Pfam Description: Hsp90 protein
  misc_feature (1)..(420): Homolog of NCBI NO: 17979041 NR Description: putative heat shock protein 90 [Arabidopsis
  misc_feature (1)..(420): Homolog of NCBI NO: 15241102 NR Description: heat shock protein 81.4 (hsp81.4) [Arabidopsis
  misc_feature (1)..(420): Homolog of NCBI NO: 15241113 NR Description: heat shock protein, putative [Arabidopsis
  misc_feature (1)..(420): Homolog of NCBI NO: 15215642 NR Description: AT5g56010/MDA7_5 [Arabidopsis thaliana]
  misc_feature (1)..(420): Homolog of NCBI NO: 23397152 NR Description: putative heat shock protein 81-2 (HSP81-2)
  misc_feature (1)..(420): Homolog of NCBI NO: 15241115 NR Description: heat shock protein 81-2 (HSP81-2) [Arabidopsis
  misc_feature (1)..(420): Homolog of NCBI NO: 547683 NR Description: HEAT SHOCK COGNATE PROTEIN 80
  misc_feature (1)..(420): Homolog of NCBI NO: 4204859 NR Description: heat shock protein 80 [Triticum aestivum]
  misc_feature (1)..(420): Homolog of NCBI NO: 5123910 NR Description: HSP80-2 [Triticum aestivum]
  misc_feature (1)..(420): Homolog of NCBI NO: 417154 NR Description: HEAT SHOCK PROTEIN 82
MTKSDLVNNLGTIARSGTKEFMEALAAGADVSMIGQFGVGFYSAYLVADRVVVTTKHNDDEQYVWESQAGGSFTVTRDTSGEQLGRGTKITLFLKDDQLEYLEERRLKDLVKKHSEFISYPISLWTEKTTEKEISDDEDEEEKKDAEEGKVEDVDEKEEKEKKKKKIKEVSHEWSLVNKQKPIWMRKPEEITKEEYAAFYKSLTNDWEEHLAVKHFSVEGQLEFKAVLFVPKRAPFDLFDTKKKQNNIKLYVRRVFIMDNCEELIPEWLSFVKGIVDSEDLPLNISRETLQQNKILKVIRKNLVKKCVELFFEIAENKEDYNKFYEAFSKNLKLGIHEDSQNRTKIAELLRYHSTKSGDELTSLKDYVTRMKEGQNDIYYITGESKKAVENSPFLEKLKKRGYEVLHMVDAIDEYAVGQLLLLIVCLDHSSVIVQQAKLKLVAPCTLSLLLSQRTRCYLSDTGSLSIDCNA

SEQ ID NO: 1572 - DNA, 2010 bp, Zea mays subsp. mays
  misc_feature (1)..(2010): Ceres Seq. ID no. 12406806
  misc_feature: MA Experiment ID: 108522 Result: Down-regulated in Transcription
  misc_feature: MA Experiment 108522 PARAMETER Experiment Name: Zm_42deg_Heat_P Parameter: Age (day) Value: 8
  misc_feature: MA Experiment 108522 PARAMETER Experiment Name: Zm_42deg_Heat_P Parameter: Organism Value: Zea mays
  misc_feature: MA Experiment 108522 PARAMETER Experiment Name: Zm_42deg_Heat_P Parameter: Plant Line Value: 35A19
  misc_feature: MA Experiment 108522 PARAMETER Experiment Name: Zm_42deg_Heat_P Parameter: Temperature (deg C) Value: 42 vs. 22
  misc_feature: MA Experiment 108522 PARAMETER Experiment Name: Zm_42deg_Heat_P Parameter: Timepoint (hr) Value: 1
  misc_feature: MA Experiment 108522 PARAMETER Experiment Name: Zm_42deg_Heat_P Parameter: Tissue Value: Aerial
  misc_feature: MA Experiment ID: 20000480 Result: Down-regulated in Transcription
  misc_feature: MA Experiment 20000480 PARAMETER Experiment Name: Zm_Drought_P Parameter: Age (day) Value: 11
  misc_feature: MA Experiment 20000480 PARAMETER Experiment Name: Zm_Drought_P Parameter: Organism Value: Zea mays
  misc_feature: MA Experiment 20000480 PARAMETER Experiment Name: Zm_Drought_P Parameter: Plant Line Value: 35A19
  misc_feature: MA Experiment 20000480 PARAMETER Experiment Name: Zm_Drought_P Parameter: Timepoint (hr) Value: 72
  misc_feature: MA Experiment 20000480 PARAMETER Experiment Name: Zm_Drought_P Parameter: Tissue Value: Aerial
  misc_feature: MA Experiment 20000480 PARAMETER Experiment Name: Zm_Drought_P Parameter: Treatment Value: Drought vs. No Drought
atccaccacaccactcgagcgcgcgcgcggcccaccgctccgccgctgcccgcccgccgccatgcgagggatcctctcctcttcctccgctctcctccggcgagccggcgcccagctctcgcgcacggactgcagtagcccctcagcgtccgcgacctctcctctccgccgctcccctcttcaggtatgatgaccgcgtatctcgctgccgctccctcgatcgcgggctcgtggcttgttgccgtgtgctagggactgtaacttccttttgcaatagaggattttcagtcggactggtaagtcctctttgctagttaatgttgtcaaactgcccttgacctttgttgggttagattggctgaaacagctgatatctgcaacggtttgaccatgagcgtacaagttctgctttgctggctcctgctcatgtgcacaagctactaaaacatagaagagtgagattcggagaaatatgcattatgggctgtaatgctgtacaatagtgctattcccacgtcagccttttcccactaggggagaactgtggcttttggtttcaattggtgtatgtgctgctttactgtttcgttctcactggctttaataccttcataagtgaagtatcgagttcacaatgcctacttgctcatatttcaagagatctgcgcaaattgctgataatctttcttccctgtgatgtcatttgctagaatgggaaaagagacacattttgttcgctttggttcaaaggtcgttcggtatcaaccacagttgatatgcagttagactatgagagtgatccccctcttgacgatacaaaagctattgagaaggagtcatcacttaatgttgctgtttctcaactcgcaattgacttcgatagagactctaatttatgtttggagcgattttcccgtgcaaggaaagcatctgtagtctctactggttctcttaagcttgacctcgctctcggcgttggaggattaccgaagggtagaatggtggagatatatgggaaagaagcatctgggaagacaacactcgcgcttcatgttattaaggaagctcaaaagaatggaggttattgtgcttatattgatgcagaaaatgccttcaacccttcatttgctgaatctattggcgtagacagtgaaaggctcttgatagcccaacctgattctgctgaaaattctctaagcattgtaaacactcttgttggtggttctgttgctgttgttgttgtggacagtgtggcagcacttattcccaaatgtgaaattgaaggtgaaatatacacaaattgtggagacatccaatcccatttgatgactcgggcccttagaaaaattcagtacactttatgtcgatctgaaacacttattatttttgtgaatcaggttagaacaaagaggacatcaagtaatcctgggatctacaaggaggtgccttgcggtggtaatgcactaggattctatgctgcagtcagaatgaggacttcaaggagagaactgcgctatagtgaagatgaggctaccggcgtaggtatatcagtgcagatcatcaagaacaaattggctccagcgaacctgaagaaggaagccggcatcgacatcacattcggtaaggggatctgccacgagtcggagatcctggagacggcttcctccgtcggagtgatcctgaaagacgggtgtgggtattggatcaacaacgagttcctggcaggcaaggtggaagcggagaagttcctgcgtgaaaacgctgcagtggcagatgagatctgcaataccgtgaggaacgagttcttgcaaaggtgacatagggcgaccgattagagaggctaatgcattgttagtcggaaatgttgtaccgtcatgtattcatagaagaagatttatgtaggatgttgctgtgcctgtcgtgtaactttgactcgcaacagttcattgagtttaccagggccattccctcccagatcatatcgttaggttcttctatgttgctggttgc

SEQ ID NO: 1573 - protein, 346 aa, Zea mays subsp. mays
  peptide (1)..(346): Ceres Seq. ID no. 12406807
  misc_feature (21)..(345): Pfam Name: recA bacterial DNA recombination protein Pfam Description: recA bacterial DNA recombination protein
  misc_feature (11)..(340): Homolog of NCBI NO: 22966246 NR Description: hypothetical protein [Rhodospirillum rubrum]
  misc_feature (11)..(340): Homolog of NCBI NO: 23502079 NR Description: recA protein [Brucella suis 1330]
  misc_feature (11)..(340): Homolog of NCBI NO: 17987070 NR Description: RECA PROTEIN [Brucella melitensis]
  misc_feature (42)..(340): Homolog of NCBI NO: 34907710 NR Description: putative RecA protein [Oryza sativa (japonica
  misc_feature (18)..(344): Homolog of NCBI NO: 15224783 NR Description: putative recA protein; protein id: At2g19490.1
  misc_feature (75)..(159): Homolog of NCBI NO: 34906584 NR Description: hypothetical protein~similar to Arabidopsis
  misc_feature (202)..(311): Homolog of NCBI NO: 34906584 NR Description: hypothetical protein~similar to Arabidopsis
  misc_feature (1)..(345): Homolog of NCBI NO: 6143863 NR Description: putative RecA protein [Arabidopsis thaliana]
  misc_feature (1)..(345): Homolog of NCBI NO: 22330951 NR Description: putative RecA protein
  misc_feature (75)..(346): Homolog of NCBI NO: 24636781 NR Description: P0614D08.19 [Oryza sativa (japonica
MQLDYESDPPLDDTKAIEKESSLNVAVSQLAIDFDRDSNLCLERFSRARKASVVSTGSLKLDLALGVGGLPKGRMVEIYGKEASGKTTLALHVIKEAQKNGGYCAYIDAENAFNPSFAESIGVDSERLLIAQPDSAENSLSIVNTLVGGSVAVVVVDSVAALIPKCEIEGEIYTNCGDIQSHLMTRALRKIQYTLCRSETLIIFVNQVRTKRTSSNPGIYKEVPCGGNALGFYAAVRMRTSRRELRYSEDEATGVGISVQIIKNKLAPANLKKEAGIDITFGKGICHESEILETASSVGVILKDGCGYWINNEFLAGKVEAEKFLRENAAVADEICNTVRNEFLQR

SEQ ID NO: 1574 - protein, 272 aa, Zea mays subsp. mays
  peptide (1)..(272): Ceres Seq. ID no. 12406808
  misc_feature (1)..(271): Pfam Name: recA bacterial DNA recombination protein Pfam Description: recA bacterial DNA recombination protein
  misc_feature (1)..(266): Homolog of NCBI NO: 22966246 NR Description: hypothetical protein [Rhodospirillum rubrum]
  misc_feature (1)..(266): Homolog of NCBI NO: 23502079 NR Description: recA protein [Brucella suis 1330]
  misc_feature (1)..(266): Homolog of NCBI NO: 17987070 NR Description: RECA PROTEIN [Brucella melitensis]
  misc_feature (1)..(266): Homolog of NCBI NO: 34907710 NR Description: putative RecA protein [Oryza sativa (japonica
  misc_feature (1)..(270): Homolog of NCBI NO: 15224783 NR Description: putative recA protein; protein id: At2g19490.1
  misc_feature (1)..(85): Homolog of NCBI NO: 34906584 NR Description: hypothetical protein~similar to Arabidopsis
  misc_feature (128)..(237): Homolog of NCBI NO: 34906584 NR Description: hypothetical protein~similar to Arabidopsis
  misc_feature (1)..(271): Homolog of NCBI NO: 6143863 NR Description: putative RecA protein [Arabidopsis thaliana]
  misc_feature (1)..(271): Homolog of NCBI NO: 22330951 NR Description: putative RecA protein
  misc_feature (1)..(272): Homolog of NCBI NO: 24636781 NR Description: P0614D08.19 [Oryza sativa (japonica
MVEIYGKEASGKTTLALHVIKEAQKNGGYCAYIDAENAFNPSFAESIGVDSERLLIAQPDSAENSLSIVNTLVGGSVAVVVVDSVAALIPKCEIEGEIYTNCGDIQSHLMTRALRKIQYTLCRSETLIIFVNQVRTKRTSSNPGIYKEVPCGGNALGFYAAVRMRTSRRELRYSEDEATGVGISVQIIKNKLAPANLKKEAGIDITFGKGICHESEILETASSVGVILKDGCGYWINNEFLAGKVEAEKFLRENAAVADEICNTVRNEFLQR

SEQ ID NO: 1575 - DNA, 1280 bp, Zea mays subsp. mays
  misc_feature (1)..(1280): Ceres Seq. ID no. 12340706
  misc_feature: MA Experiment ID: 108530 Result: Down-regulated in Transcription
  misc_feature: MA Experiment 108530 PARAMETER Experiment Name: Zm_Imbibed_Seeds_P Parameter: Age (day) Value: 6 vs. 2
  misc_feature: MA Experiment 108530 PARAMETER Experiment Name: Zm_Imbibed_Seeds_P Parameter: Organism Value: Zea mays
  misc_feature: MA Experiment 108530 PARAMETER Experiment Name: Zm_Imbibed_Seeds_P Parameter: Plant Line Value: 35A19
  misc_feature: MA Experiment 108530 PARAMETER Experiment Name: Zm_Imbibed_Seeds_P Parameter: Tissue Value: Aerial vs. Embryo
  misc_feature: MA Experiment ID: 108535 Result: Up-regulated in Transcription
  misc_feature: MA Experiment 108535 PARAMETER Experiment Name: Zm_Meristem_P Parameter: Age (day) Value: 8
  misc_feature: MA Experiment 108535 PARAMETER Experiment Name: Zm_Meristem_P Parameter: Organism Value: Zea mays
  misc_feature: MA Experiment 108535 PARAMETER Experiment Name: Zm_Meristem_P Parameter: Plant Line Value: 35A19
  misc_feature: MA Experiment 108535 PARAMETER Experiment Name: Zm_Meristem_P Parameter: Tissue Value: Root Meristem vs. Above Root Meristem
  misc_feature: MA Experiment ID: 108544 Result: Down-regulated in Transcription
  misc_feature: MA Experiment ID: 108556 Result: Down-regulated in Transcription
  misc_feature: MA Experiment 108556 PARAMETER Experiment Name: Zm_Drought_P Parameter: Age (day) Value: 9
  misc_feature: MA Experiment 108556 PARAMETER Experiment Name: Zm_Drought_P Parameter: Organism Value: Zea mays
  misc_feature: MA Experiment 108556 PARAMETER Experiment Name: Zm_Drought_P Parameter: Plant Line Value: 35A19
  misc_feature: MA Experiment 108556 PARAMETER Experiment Name: Zm_Drought_P Parameter: Timepoint (hr) Value: 24
  misc_feature: MA Experiment 108556 PARAMETER Experiment Name: Zm_Drought_P Parameter: Tissue Value: Aerial
  misc_feature: MA Experiment 108556 PARAMETER Experiment Name: Zm_Drought_P Parameter: Treatment Value: Drought vs. No Drought
  misc_feature: MA Experiment ID: 20000108 Result: Up-regulated in Transcription
  misc_feature: MA Experiment 20000108 PARAMETER Experiment Name: Zm_Root-Tips_P Parameter: Age (day) Value: 12
  misc_feature: MA Experiment 20000108 PARAMETER Experiment Name: Zm_Root-Tips_P Parameter: Organism Value: Zea mays
  misc_feature: MA Experiment 20000108 PARAMETER Experiment Name: Zm_Root-Tips_P Parameter: Tissue Value: Root tips vs. Root mid region    35
  misc_feature: MA Experiment 20000108 PARAMETER Experiment Name: Zm_Root-Tips_P Parameter: Tissue Value: Root tips vs. Root mid region   Sequence Listing-Misc Features (4)
  misc_feature: MA Experiment ID: 20000478 Result: Down-regulated in Transcription
  misc_feature: MA Experiment 20000478 PARAMETER Experiment Name: Zm_5mM_SA_P Parameter: Age (day) Value: 11
  misc_feature: MA Experiment 20000478 PARAMETER Experiment Name: Zm_5mM_SA_P Parameter: Organism Value: Zea mays
  misc_feature: MA Experiment 20000478 PARAMETER Experiment Name: Zm_5mM_SA_P Parameter: Plant Line Value: 35A19
  misc_feature: MA Experiment 20000478 PARAMETER Experiment Name: Zm_5mM_SA_P Parameter: Timepoint (hr) Value: 72
  misc_feature: MA Experiment 20000478 PARAMETER Experiment Name: Zm_5mM_SA_P Parameter: Tissue Value: Aerial
  misc_feature: MA Experiment 20000478 PARAMETER Experiment Name: Zm_5mM_SA_P Parameter: Treatment Value: 5mM SA vs. No Treatment
  misc_feature: MA Experiment ID: 20000487 Result: Up-regulated in Transcription
  misc_feature: MA Experiment 20000487 PARAMETER Experiment Name: Zm_50mM_NH4NO3_L_to_H_P Parameter: Organism Value: Zea mays
  misc_feature: MA Experiment 20000487 PARAMETER Experiment Name: Zm_50mM_NH4NO3_L_to_H_P Parameter: Timepoint (hr) Value: 4
  misc_feature: MA Experiment 20000487 PARAMETER Experiment Name: Zm_50mM_NH4NO3_L_to_H_P Parameter: Tissue Value: Leaves
  misc_feature: MA Experiment 20000487 PARAMETER Experiment Name: Zm_50mM_NH4NO3_L_to_H_P Parameter: Treatment Value: 50mM NH4NO3 vs. 100mM Mannitol
  misc_feature: MA Experiment ID: 20000488 Result: Up-regulated in Transcription
  misc_feature: MA Experiment 20000488 PARAMETER Experiment Name: Zm_50mM_NH4NO3_L_to_H_P Parameter: Organism Value: Zea mays
  misc_feature: MA Experiment 20000488 PARAMETER Experiment Name: Zm_50mM_NH4NO3_L_to_H_P Parameter: Timepoint (hr) Value: 8
  misc_feature: MA Experiment 20000488 PARAMETER Experiment Name: Zm_50mM_NH4NO3_L_to_H_P Parameter: Tissue Value: Leaves
  misc_feature: MA Experiment 20000488 PARAMETER Experiment Name: Zm_50mM_NH4NO3_L_to_H_P Parameter: Treatment Value: 50mM NH4NO3 vs. 100mM Mannitol
  misc_feature: MA Experiment ID: 20000492 Result: Up-regulated in Transcription
  misc_feature: MA Experiment 20000492 PARAMETER Experiment Name: Zm_Hybrid_Seed_Dev_P Parameter: DAP Value: 12
  misc_feature: MA Experiment 20000492 PARAMETER Experiment Name: Zm_Hybrid_Seed_Dev_P Parameter: Organism Value: Zea mays
  misc_feature: MA Experiment 20000492 PARAMETER Experiment Name: Zm_Hybrid_Seed_Dev_P Parameter: Plant Line Value: 35A19
  misc_feature: MA Experiment 20000492 PARAMETER Experiment Name: Zm_Hybrid_Seed_Dev_P Parameter: Tissue Value: Fert Kernel vs. Unfert Floret
  misc_feature: MA Experiment ID: 20000626 Result: Up-regulated in Transcription
  misc_feature: MA Experiment 20000626 PARAMETER Experiment Name: Zm_Herbicide-Treatments_P Parameter: Timepoint (hr) Value: 12
  misc_feature: MA Experiment 20000626 PARAMETER Experiment Name: Zm_Herbicide-Treatments_P Parameter: Tissue Value: Aerial
  misc_feature: MA Experiment 20000626 PARAMETER Experiment Name: Zm_Herbicide-Treatments_P Parameter: Treatment Value: Roundup vs. No Treatment
  misc_feature: MA Experiment ID: 20000632 Result: Down-regulated in Transcription
  misc_feature: MA Experiment 20000632 PARAMETER Experiment Name: Zm_Herbicide-Treatments_P Parameter: Timepoint (hr) Value: 4
  misc_feature: MA Experiment 20000632 PARAMETER Experiment Name: Zm_Herbicide-Treatments_P Parameter: Tissue Value: Aerial
  misc_feature: MA Experiment 20000632 PARAMETER Experiment Name: Zm_Herbicide-Treatments_P Parameter: Treatment Value: Glean vs. No Treatment
  misc_feature: MA Experiment ID: 20000633 Result: Down-regulated in Transcription
  misc_feature: MA Experiment 20000633 PARAMETER Experiment Name: Zm_Herbicide-Treatments_P Parameter: Timepoint (hr) Value: 4
  misc_feature: MA Experiment 20000633 PARAMETER Experiment Name: Zm_Herbicide-Treatments_P Parameter: Tissue Value: Aerial
  misc_feature: MA Experiment 20000633 PARAMETER Experiment Name: Zm_Herbicide-Treatments_P Parameter: Treatment Value: Trimec vs. No Treatment
ctctcgagagggccacacacaaaaaccccaatgcgagcgcccctggcttgtcggcgtcgcctccttcagccaaaaccctagcttgcatacgcgcccgaacaaagcttcgtctgcgaggggcgtcctcctgccgccagaagctttcaggagcatcagcgatggtgtggttccaatgcgaggactgtggcgagaacctcaagaagcccaaacttgccggccacttccgctcctgctccgcgtacaagctgtcatgcatcgattgcggcgagttattcagccaggacaccgtgcaggggcacacgcagtgcatctccgaggccgagaagtacggtcctaagggacagaccaaaccatccaatggtgcacagggtaaggcagataagccaaagccaaatgcagatgtcgatatcaatgttgggctgtcgacacggcctccttggttctgtagcctatgcaagaccactaccacaagcaagcaaactctcttactacatgctgatgggaagaagcatagggcaaaggcgaaagccttccatgtgtctcagaaacaaaaagatggtgcagaacaaactccagatgtgaaggaagctggagttgtacccacaaaagaatctgctcaagtaaatggtggcgtgagtggtgatcatgaaagaaatgaagataaagatgctgggaaaaggaaacgaatggatgacatgaccatagagccaggtaacacaaaaagacagttgacacagtctggagatgagaagtcagaaaacaaagcgaagagtaaggccgatgaactagcaagtggtactgactgcaaaagtgttcaaaagcaaaagatcaaatggaagaagattattactaaaacattgaaggcgaacgcagatggagttatgaagctaaagaagctacaaaagatagtctccaaggagcttcaggaatgtggtgtctccaaagacaaggaggagctccgtgctaccttgatggataaaatagcttcaagttccagattttctgttgatggcaagaatgttagactggtggccaagaatgaagaagaatcttagaaagaggttgtcagtcattttttggcattgttgctggtttcattctttggtgtcaactttcagatggcttatagccaagtgttggttaaattgagtccatgaaccatcaattatatccatgacctgtagacggtatgggaatttagcatctgaattttctcgacaaccgttcaaaagtgaaatgtttactctttatgctgtcaagcaatggcaatgatggttggt

SEQ ID NO: 1576 - protein, 350 aa, Zea mays subsp. mays
  peptide (1)..(350): Ceres Seq. ID no. 12340707
  misc_feature (146)..(170): Pfam Name: Zinc finger, C2H2 type Pfam Description: Zinc finger, C2H2 type
  misc_feature (48)..(346): Homolog of NCBI NO: 21902026 NR Description: B1097D05.27 [Oryza sativa (japonica
  misc_feature (53)..(291): Homolog of NCBI NO: 18399026 NR Description: Expressed protein; protein id: At2g19385.1, by cDNA: 114879. [Arabidopsis thaliana]
  misc_feature (53)..(291): Homolog of NCBI NO: 21536909 NR Description: unknown [Arabidopsis thaliana]
  misc_feature (53)..(291): Homolog of NCBI NO: 7486241 NR Description: probable RNA-binding protein At2g19380 -
  misc_feature (53)..(336): Homolog of NCBI NO: 18399023 NR Description: RRM-containing RNA-binding protein; protein id:
  misc_feature (53)..(336): Homolog of NCBI NO: 7486241 NR Description: probable RNA-binding protein At2g19380 -
  misc_feature (53)..(135): Homolog of NCBI NO: 39581890 NR Description: Hypothetical protein CBG20151 [Caenorhabditis
  misc_feature (277)..(343): Homolog of NCBI NO: 39581890 NR Description: Hypothetical protein CBG20151 [Caenorhabditis
  misc_feature (214)..(346): Homolog of NCBI NO: 18399026 NR Description: Expressed protein; protein id: At2g19385.1, by cDNA: 114879. [Arabidopsis thaliana]
  misc_feature (214)..(346): Homolog of NCBI NO: 21536909 NR Description: unknown [Arabidopsis thaliana]
LERATHKNPNASAPGLSASPPSAKTLACIRARTKLRLRGASSCRQKLSGASAMVWFQCEDCGENLKKPKLAGHFRSCSAYKLSCIDCGELFSQDTVQGHTQCISEAEKYGPKGQTKPSNGAQGKADKPKPNADVDINVGLSTRPPWFCSLCKTTTTSKQTLLLHADGKKHRAKAKAFHVSQKQKDGAEQTPDVKEAGVVPTKESAQVNGGVSGDHERNEDKDAGKRKRMDDMTIEPGNTKRQLTQSGDEKSENKAKSKADELASGTDCKSVQKQKIKWKKIITKTLKANADGVMKLKKLQKIVSKELQECGVSKDKEELRATLMDKIASSSRFSVDGKNVRLVAKNEEES

SEQ ID NO: 1577 - protein, 298 aa, Zea mays subsp. mays
  peptide (1)..(298): Ceres Seq. ID no. 12340708
  misc_feature (94)..(118): Pfam Name: Zinc finger, C2H2 type Pfam Description: Zinc finger, C2H2 type
  misc_feature (1)..(239): Homolog of NCBI NO: 18399026 NR Description: Expressed protein; protein id: At2g19385.1, by cDNA: 114879. [Arabidopsis thaliana]
  misc_feature (1)..(239): Homolog of NCBI NO: 21536909 NR Description: unknown [Arabidopsis thaliana]
  misc_feature (1)..(239): Homolog of NCBI NO: 7486241 NR Description: probable RNA-binding protein At2g19380 -
  misc_feature (1)..(284): Homolog of NCBI NO: 18399023 NR Description: RRM-containing RNA-binding protein; protein id:
  misc_feature (1)..(284): Homolog of NCBI NO: 7486241 NR Description: probable RNA-binding protein At2g19380 -
  misc_feature (1)..(294): Homolog of NCBI NO: 21902026 NR Description: B1097D05.27 [Oryza sativa (japonica
  misc_feature (1)..(83): Homolog of NCBI NO: 39581890 NR Description: Hypothetical protein CBG20151 [Caenorhabditis
  misc_feature (225)..(291): Homolog of NCBI NO: 39581890 NR Description: Hypothetical protein CBG20151 [Caenorhabditis
  misc_feature (162)..(294): Homolog of NCBI NO: 18399026 NR Description: Expressed protein; protein id: At2g19385.1, by cDNA: 114879. [Arabidopsis thaliana]
  misc_feature (162)..(294): Homolog of NCBI NO: 21536909 NR Description: unknown [Arabidopsis thaliana]
MVWFQCEDCGENLKKPKLAGHFRSCSAYKLSCIDCGELFSQDTVQGHTQCISEAEKYGPKGQTKPSNGAQGKADKPKPNADVDINVGLSTRPPWFCSLCKTTTTSKQTLLLHADGKKHRAKAKAFHVSQKQKDGAEQTPDVKEAGVVPTKESAQVNGGVSGDHERNEDKDAGKRKRMDDMTIEPGNTKRQLTQSGDEKSENKAKSKADELASGTDCKSVQKQKIKWKKIITKTLKANADGVMKLKKLQKIVSKELQECGVSKDKEELRATLMDKIASSSRFSVDGKNVRLVAKNEEES

SEQ ID NO: 1578 - DNA, 1586 bp, Zea mays subsp. mays
  misc_feature (1)..(1586): Ceres Seq. ID no. 12363031
  misc_feature: MA Experiment ID: 108535 Result: Up-regulated in Transcription
  misc_feature: MA Experiment 108535 PARAMETER Experiment Name: Zm_Meristem_P Parameter: Age (day) Value: 8
  misc_feature: MA Experiment 108535 PARAMETER Experiment Name: Zm_Meristem_P Parameter: Organism Value: Zea mays
  misc_feature: MA Experiment 108535 PARAMETER Experiment Name: Zm_Meristem_P Parameter: Plant Line Value: 35A19
  misc_feature: MA Experiment 108535 PARAMETER Experiment Name: Zm_Meristem_P Parameter: Tissue Value: Root Meristem vs. Above Root Meristem
  misc_feature: MA Experiment ID: 108543 Result: Up-regulated in Transcription
  misc_feature: MA Experiment ID: 108556 Result: Down-regulated in Transcription
  misc_feature: MA Experiment 108556 PARAMETER Experiment Name: Zm_Drought_P Parameter: Age (day) Value: 9
  misc_feature: MA Experiment 108556 PARAMETER Experiment Name: Zm_Drought_P Parameter: Organism Value: Zea mays
  misc_feature: MA Experiment 108556 PARAMETER Experiment Name: Zm_Drought_P Parameter: Plant Line Value: 35A19
  misc_feature: MA Experiment 108556 PARAMETER Experiment Name: Zm_Drought_P Parameter: Timepoint (hr) Value: 24
  misc_feature: MA Experiment 108556 PARAMETER Experiment Name: Zm_Drought_P Parameter: Tissue Value: Aerial
  misc_feature: MA Experiment 108556 PARAMETER Experiment Name: Zm_Drought_P Parameter: Treatment Value: Drought vs. No Drought
  misc_feature: MA Experiment ID: 108689 Result: Down-regulated in Transcription
  misc_feature: MA Experiment 108689 PARAMETER Experiment Name: Zm_Drought_Roots_P Parameter: Age (day) Value: 9
  misc_feature: MA Experiment 108689 PARAMETER Experiment Name: Zm_Drought_Roots_P Parameter: Organism Value: Zea mays
  misc_feature: MA Experiment 108689 PARAMETER Experiment Name: Zm_Drought_Roots_P Parameter: Plant Line Value: 35A19
  misc_feature: MA Experiment 108689 PARAMETER Experiment Name: Zm_Drought_Roots_P Parameter: Timepoint (hr) Value: 24
  misc_feature: MA Experiment 108689 PARAMETER Experiment Name: Zm_Drought_Roots_P Parameter: Tissue Value: Roots
  misc_feature: MA Experiment 108689 PARAMETER Experiment Name: Zm_Drought_Roots_P Parameter: Treatment Value: Drought vs. No Drought
  misc_feature: MA Experiment ID: 20000108 Result: Up-regulated in Transcription
  misc_feature: MA Experiment 20000108 PARAMETER Experiment Name: Zm_Root-Tips_P Parameter: Age (day) Value: 12
  misc_feature: MA Experiment 20000108 PARAMETER Experiment Name: Zm_Root-Tips_P Parameter: Organism Value: Zea mays
  misc_feature: MA Experiment 20000108 PARAMETER Experiment Name: Zm_Root-Tips_P Parameter: Tissue Value: Root tips vs. Root mid region    35
  misc_feature: MA Experiment 20000108 PARAMETER Experiment Name: Zm_Root-Tips_P Parameter: Tissue Value: Root tips vs. Root mid region   Sequence Listing-Misc Features (4)
  misc_feature: MA Experiment ID: 20000478 Result: Down-regulated in Transcription
  misc_feature: MA Experiment 20000478 PARAMETER Experiment Name: Zm_5mM_SA_P Parameter: Age (day) Value: 11
  misc_feature: MA Experiment 20000478 PARAMETER Experiment Name: Zm_5mM_SA_P Parameter: Organism Value: Zea mays
  misc_feature: MA Experiment 20000478 PARAMETER Experiment Name: Zm_5mM_SA_P Parameter: Plant Line Value: 35A19
  misc_feature: MA Experiment 20000478 PARAMETER Experiment Name: Zm_5mM_SA_P Parameter: Timepoint (hr) Value: 72
  misc_feature: MA Experiment 20000478 PARAMETER Experiment Name: Zm_5mM_SA_P Parameter: Tissue Value: Aerial
  misc_feature: MA Experiment 20000478 PARAMETER Experiment Name: Zm_5mM_SA_P Parameter: Treatment Value: 5mM SA vs. No Treatment
  misc_feature: MA Experiment ID: 20000479 Result: Down-regulated in Transcription
  misc_feature: MA Experiment 20000479 PARAMETER Experiment Name: Zm_Drought_P Parameter: Age (day) Value: 10
  misc_feature: MA Experiment 20000479 PARAMETER Experiment Name: Zm_Drought_P Parameter: Organism Value: Zea mays
  misc_feature: MA Experiment 20000479 PARAMETER Experiment Name: Zm_Drought_P Parameter: Plant Line Value: 35A19
  misc_feature: MA Experiment 20000479 PARAMETER Experiment Name: Zm_Drought_P Parameter: Timepoint (hr) Value: 48
  misc_feature: MA Experiment 20000479 PARAMETER Experiment Name: Zm_Drought_P Parameter: Tissue Value: Aerial
  misc_feature: MA Experiment 20000479 PARAMETER Experiment Name: Zm_Drought_P Parameter: Treatment Value: Drought vs. No Drought
  misc_feature: MA Experiment ID: 20000480 Result: Down-regulated in Transcription
  misc_feature: MA Experiment 20000480 PARAMETER Experiment Name: Zm_Drought_P Parameter: Age (day) Value: 11
  misc_feature: MA Experiment 20000480 PARAMETER Experiment Name: Zm_Drought_P Parameter: Organism Value: Zea mays
  misc_feature: MA Experiment 20000480 PARAMETER Experiment Name: Zm_Drought_P Parameter: Plant Line Value: 35A19
  misc_feature: MA Experiment 20000480 PARAMETER Experiment Name: Zm_Drought_P Parameter: Timepoint (hr) Value: 72
  misc_feature: MA Experiment 20000480 PARAMETER Experiment Name: Zm_Drought_P Parameter: Tissue Value: Aerial
  misc_feature: MA Experiment 20000480 PARAMETER Experiment Name: Zm_Drought_P Parameter: Treatment Value: Drought vs. No Drought
  misc_feature: MA Experiment ID: 20000488 Result: Up-regulated in Transcription
  misc_feature: MA Experiment 20000488 PARAMETER Experiment Name: Zm_50mM_NH4NO3_L_to_H_P Parameter: Organism Value: Zea mays
  misc_feature: MA Experiment 20000488 PARAMETER Experiment Name: Zm_50mM_NH4NO3_L_to_H_P Parameter: Timepoint (hr) Value: 8
  misc_feature: MA Experiment 20000488 PARAMETER Experiment Name: Zm_50mM_NH4NO3_L_to_H_P Parameter: Tissue Value: Leaves
  misc_feature: MA Experiment 20000488 PARAMETER Experiment Name: Zm_50mM_NH4NO3_L_to_H_P Parameter: Treatment Value: 50mM NH4NO3 vs. 100mM Mannitol
atccttgagcgcagacaaatcacccccttcctcctgttcatttcctcctgctcccccctcctccctcccccccccctcctcgccgctcgccgttgaagaggtaggcccacgggccggcgagaatggaggcggcgacgatggcgtggacggcggcggtggtcggggcggggctggtgtactggttcgtctcggtgatgggcgcggcggaggtgaagggcaagcgggcggtggatctcaagatgggatccatcacgcgggacaaggtgcaggacaagtacacgcagtactggtccttcttccgccgccccaaggagacggccaccacggcggcgtcggcggacaaggtgccggccttcgtcgacaccttctacaacctcgtgaccgacatctacgagtgggggtggggccagtccttccacttctccccgtccctccccggccgctcccaccgcgacgccacgcgcgtccacgaggagcgcgtcgccgacctcctcggcgccaggccgggccaccgcctcctggacgtcggctgcggcgtcggcgggcccatgcgcgccatcgccgcgcactcgggatccaacgtcgtcggcatcaccatcaacgagtaccaggtgaaccgcgcccgcgcgcacaaccgcaaggccggcctcgactccccgcgctgcgaggtcgtctgcggcaacttcctctccatgccgttcccggacgcctccttcgacggcgcctactccatcgaggccacctgccacgcgcccaggctgcaggacgtgtacggcgaggtctaccgcgtgctcaagccggggggactctacgtctcctacgagtgggtcaccaccccgctgtaccgcgccgaggacccggaccacgtcgagtgcatccacggcatcgagcgcggcgacgcgctaccggggctccgccgccaggacgagatcgcgtccatcgctaaggaggtcgggttcgaggtgctcaaggagcaggacctggcgctgccccccgcgctgccctggtggacgcgcctcaagatgggccgcatcgcctactggcgcaactccctcgtcgtccgcgtgctcaccatgctccgggtcgcgcccaagggcgtctccgaggtgcacgagatgctgtacgagaccgcgcagcacctcacccgcggcggcgagaccggcatcttcacgcccatgcacatggtgctcctccgcaagcccgccgccgccgcctccaccgaggaggccaactagtgtaagactacacaccgccaccaatcagttactactcgcccaccgcaagggggagaaaatggggagggaggaaaaagatgcaagcagcagcagcaccagaggtaagaagagcaggctaatcggcgacttgaagaagttacaaattgatctattagagaagaagatactactaggaacgattcttctctccgtttactcttttccctgttcgtagctttgagttttaatttttgttttttggtggacggattgttccggggaggtcgaggttgggatctaaatttattttcaatcggtggagatccatctatctatcagcagcagcagcaggagcaaccatgttttctctcc

SEQ ID NO: 1579 - protein, 370 aa, Zea mays subsp. mays
  peptide (1)..(370): Ceres Seq. ID no. 12363032
  misc_feature (87)..(287): Pfam Name: ubiE/COQ5 methyltransferase family Pfam Description: ubiE/COQ5 methyltransferase family
  misc_feature (1)..(364): Homolog of NCBI NO: 2246456 NR Description: S-adenosyl-methionine-sterol-C-methyltransferase
  misc_feature (1)..(364): Homolog of NCBI NO: 15222955 NR Description: S-adenosyl-methionine-sterol-C-methyltransferase,
  misc_feature (1)..(370): Homolog of NCBI NO: 21555010 NR Description: sterol-C-methyltransferase [Arabidopsis thaliana]
  misc_feature (9)..(360): Homolog of NCBI NO: 7443717 NR Description: probable sterol 24-C-methyltransferase (EC
  misc_feature (1)..(370): Homolog of NCBI NO: 1061040 NR Description: sterol-C-methyltransferase [Arabidopsis thaliana]
  misc_feature (1)..(370): Homolog of NCBI NO: 23397216 NR Description: putative sterol-C-methyltransferase [Arabidopsis
  misc_feature (1)..(370): Homolog of NCBI NO: 22136020 NR Description: 24-sterol C-methyltransferase [Arabidopsis
  misc_feature (1)..(370): Homolog of NCBI NO: 15217917 NR Description: sterol-C-methyltransferase
  misc_feature (1)..(360): Homolog of NCBI NO: 7443718 NR Description: probable sterol 24-C-methyltransferase (EC
  misc_feature (1)..(360): Homolog of NCBI NO: 3560533 NR Description: 24-methylene lophenol C24(1)methyltransferase
MEAATMAWTAAVVGAGLVYWFVSVMGAAEVKGKRAVDLKMGSITRDKVQDKYTQYWSFFRRPKETATTAASADKVPAFVDTFYNLVTDIYEWGWGQSFHFSPSLPGRSHRDATRVHEERVADLLGARPGHRLLDVGCGVGGPMRAIAAHSGSNVVGITINEYQVNRARAHNRKAGLDSPRCEVVCGNFLSMPFPDASFDGAYSIEATCHAPRLQDVYGEVYRVLKPGGLYVSYEWVTTPLYRAEDPDHVECIHGIERGDALPGLRRQDEIASIAKEVGFEVLKEQDLALPPALPWWTRLKMGRIAYWRNSLVVRVLTMLRVAPKGVSEVHEMLYETAQHLTRGGETGIFTPMHMVLLRKPAAAASTEEAN

SEQ ID NO: 1580 - protein, 365 aa, Zea mays subsp. mays
  peptide (1)..(365): Ceres Seq. ID no. 12363033
  misc_feature (82)..(282): Pfam Name: ubiE/COQ5 methyltransferase family Pfam Description: ubiE/COQ5 methyltransferase family
  misc_feature (1)..(359): Homolog of NCBI NO: 2246456 NR Description: S-adenosyl-methionine-sterol-C-methyltransferase
  misc_feature (1)..(359): Homolog of NCBI NO: 15222955 NR Description: S-adenosyl-methionine-sterol-C-methyltransferase,
  misc_feature (1)..(365): Homolog of NCBI NO: 21555010 NR Description: sterol-C-methyltransferase [Arabidopsis thaliana]
  misc_feature (4)..(355): Homolog of NCBI NO: 7443717 NR Description: probable sterol 24-C-methyltransferase (EC
  misc_feature (1)..(365): Homolog of NCBI NO: 1061040 NR Description: sterol-C-methyltransferase [Arabidopsis thaliana]
  misc_feature (1)..(365): Homolog of NCBI NO: 23397216 NR Description: putative sterol-C-methyltransferase [Arabidopsis
  misc_feature (1)..(365): Homolog of NCBI NO: 22136020 NR Description: 24-sterol C-methyltransferase [Arabidopsis
  misc_feature (1)..(365): Homolog of NCBI NO: 15217917 NR Description: sterol-C-methyltransferase
  misc_feature (1)..(355): Homolog of NCBI NO: 7443718 NR Description: probable sterol 24-C-methyltransferase (EC
  misc_feature (1)..(355): Homolog of NCBI NO: 3560533 NR Description: 24-methylene lophenol C24(1)methyltransferase
MAWTAAVVGAGLVYWFVSVMGAAEVKGKRAVDLKMGSITRDKVQDKYTQYWSFFRRPKETATTAASADKVPAFVDTFYNLVTDIYEWGWGQSFHFSPSLPGRSHRDATRVHEERVADLLGARPGHRLLDVGCGVGGPMRAIAAHSGSNVVGITINEYQVNRARAHNRKAGLDSPRCEVVCGNFLSMPFPDASFDGAYSIEATCHAPRLQDVYGEVYRVLKPGGLYVSYEWVTTPLYRAEDPDHVECIHGIERGDALPGLRRQDEIASIAKEVGFEVLKEQDLALPPALPWWTRLKMGRIAYWRNSLVVRVLTMLRVAPKGVSEVHEMLYETAQHLTRGGETGIFTPMHMVLLRKPAAAASTEEAN

SEQ ID NO: 1581 - protein, 346 aa, Zea mays subsp. mays
  peptide (1)..(346): Ceres Seq. ID no. 12363034
  misc_feature (63)..(263): Pfam Name: ubiE/COQ5 methyltransferase family Pfam Description: ubiE/COQ5 methyltransferase family
  misc_feature (1)..(340): Homolog of NCBI NO: 2246456 NR Description: S-adenosyl-methionine-sterol-C-methyltransferase
  misc_feature (1)..(340): Homolog of NCBI NO: 15222955 NR Description: S-adenosyl-methionine-sterol-C-methyltransferase,
  misc_feature (1)..(346): Homolog of NCBI NO: 21555010 NR Description: sterol-C-methyltransferase [Arabidopsis thaliana]
  misc_feature (1)..(336): Homolog of NCBI NO: 7443717 NR Description: probable sterol 24-C-methyltransferase (EC
  misc_feature (1)..(346): Homolog of NCBI NO: 1061040 NR Description: sterol-C-methyltransferase [Arabidopsis thaliana]
  misc_feature (1)..(346): Homolog of NCBI NO: 23397216 NR Description: putative sterol-C-methyltransferase [Arabidopsis
  misc_feature (1)..(346): Homolog of NCBI NO: 22136020 NR Description: 24-sterol C-methyltransferase [Arabidopsis
  misc_feature (1)..(346): Homolog of NCBI NO: 15217917 NR Description: sterol-C-methyltransferase
  misc_feature (1)..(336): Homolog of NCBI NO: 7443718 NR Description: probable sterol 24-C-methyltransferase (EC
  misc_feature (1)..(336): Homolog of NCBI NO: 3560533 NR Description: 24-methylene lophenol C24(1)methyltransferase
MGAAEVKGKRAVDLKMGSITRDKVQDKYTQYWSFFRRPKETATTAASADKVPAFVDTFYNLVTDIYEWGWGQSFHFSPSLPGRSHRDATRVHEERVADLLGARPGHRLLDVGCGVGGPMRAIAAHSGSNVVGITINEYQVNRARAHNRKAGLDSPRCEVVCGNFLSMPFPDASFDGAYSIEATCHAPRLQDVYGEVYRVLKPGGLYVSYEWVTTPLYRAEDPDHVECIHGIERGDALPGLRRQDEIASIAKEVGFEVLKEQDLALPPALPWWTRLKMGRIAYWRNSLVVRVLTMLRVAPKGVSEVHEMLYETAQHLTRGGETGIFTPMHMVLLRKPAAAASTEEAN

SEQ ID NO: 1582 - DNA, 1721 bp, Zea mays subsp. mays
  misc_feature (1)..(1721): Ceres Seq. ID no. 12412138
  misc_feature: MA Experiment ID: 108522 Result: Down-regulated in Transcription
  misc_feature: MA Experiment 108522 PARAMETER Experiment Name: Zm_42deg_Heat_P Parameter: Age (day) Value: 8
  misc_feature: MA Experiment 108522 PARAMETER Experiment Name: Zm_42deg_Heat_P Parameter: Organism Value: Zea mays
  misc_feature: MA Experiment 108522 PARAMETER Experiment Name: Zm_42deg_Heat_P Parameter: Plant Line Value: 35A19
  misc_feature: MA Experiment 108522 PARAMETER Experiment Name: Zm_42deg_Heat_P Parameter: Temperature (deg C) Value: 42 vs. 22
  misc_feature: MA Experiment 108522 PARAMETER Experiment Name: Zm_42deg_Heat_P Parameter: Timepoint (hr) Value: 1
  misc_feature: MA Experiment 108522 PARAMETER Experiment Name: Zm_42deg_Heat_P Parameter: Tissue Value: Aerial
  misc_feature: MA Experiment ID: 108532 Result: Up-regulated in Transcription
  misc_feature: MA Experiment 108532 PARAMETER Experiment Name: Zm_20uM_KNO3_H-to-L_P Parameter: Age (day) Value: 11
  misc_feature: MA Experiment 108532 PARAMETER Experiment Name: Zm_20uM_KNO3_H-to-L_P Parameter: Organism Value: Zea mays
  misc_feature: MA Experiment 108532 PARAMETER Experiment Name: Zm_20uM_KNO3_H-to-L_P Parameter: Plant Line Value: 35A19
  misc_feature: MA Experiment 108532 PARAMETER Experiment Name: Zm_20uM_KNO3_H-to-L_P Parameter: Timepoint (hr) Value: 16
  misc_feature: MA Experiment 108532 PARAMETER Experiment Name: Zm_20uM_KNO3_H-to-L_P Parameter: Tissue Value: Roots
  misc_feature: MA Experiment 108532 PARAMETER Experiment Name: Zm_20uM_KNO3_H-to-L_P Parameter: Treatment Value: 20uM KNO3 vs. 60mM KNO3
  misc_feature: MA Experiment ID: 108535 Result: Up-regulated in Transcription
  misc_feature: MA Experiment 108535 PARAMETER Experiment Name: Zm_Meristem_P Parameter: Age (day) Value: 8
  misc_feature: MA Experiment 108535 PARAMETER Experiment Name: Zm_Meristem_P Parameter: Organism Value: Zea mays
  misc_feature: MA Experiment 108535 PARAMETER Experiment Name: Zm_Meristem_P Parameter: Plant Line Value: 35A19
  misc_feature: MA Experiment 108535 PARAMETER Experiment Name: Zm_Meristem_P Parameter: Tissue Value: Root Meristem vs. Above Root Meristem
  misc_feature: MA Experiment ID: 108544 Result: Down-regulated in Transcription
  misc_feature: MA Experiment ID: 108688 Result: Down-regulated in Transcription
  misc_feature: MA Experiment 108688 PARAMETER Experiment Name: Zm_Embryos-Flowers__P Parameter: Tissue Value: Immature Flowers vs. Aerial+
  misc_feature: MA Experiment ID: 108689 Result: Down-regulated in Transcription
  misc_feature: MA Experiment 108689 PARAMETER Experiment Name: Zm_Drought_Roots_P Parameter: Age (day) Value: 9
  misc_feature: MA Experiment 108689 PARAMETER Experiment Name: Zm_Drought_Roots_P Parameter: Organism Value: Zea mays
  misc_feature: MA Experiment 108689 PARAMETER Experiment Name: Zm_Drought_Roots_P Parameter: Plant Line Value: 35A19
  misc_feature: MA Experiment 108689 PARAMETER Experiment Name: Zm_Drought_Roots_P Parameter: Timepoint (hr) Value: 24
  misc_feature: MA Experiment 108689 PARAMETER Experiment Name: Zm_Drought_Roots_P Parameter: Tissue Value: Roots
  misc_feature: MA Experiment 108689 PARAMETER Experiment Name: Zm_Drought_Roots_P Parameter: Treatment Value: Drought vs. No Drought
  misc_feature: MA Experiment ID: 20000108 Result: Up-regulated in Transcription
  misc_feature: MA Experiment 20000108 PARAMETER Experiment Name: Zm_Root-Tips_P Parameter: Age (day) Value: 12
  misc_feature: MA Experiment 20000108 PARAMETER Experiment Name: Zm_Root-Tips_P Parameter: Organism Value: Zea mays
  misc_feature: MA Experiment 20000108 PARAMETER Experiment Name: Zm_Root-Tips_P Parameter: Tissue Value: Root tips vs. Root mid region    35
  misc_feature: MA Experiment 20000108 PARAMETER Experiment Name: Zm_Root-Tips_P Parameter: Tissue Value: Root tips vs. Root mid region   Sequence Listing-Misc Features (4)
  misc_feature: MA Experiment ID: 20000477 Result: Down-regulated in Transcription
  misc_feature: MA Experiment 20000477 PARAMETER Experiment Name: Zm_5mM_SA_P Parameter: Age (day) Value: 10
  misc_feature: MA Experiment 20000477 PARAMETER Experiment Name: Zm_5mM_SA_P Parameter: Organism Value: Zea mays
  misc_feature: MA Experiment 20000477 PARAMETER Experiment Name: Zm_5mM_SA_P Parameter: Plant Line Value: 35A19
  misc_feature: MA Experiment 20000477 PARAMETER Experiment Name: Zm_5mM_SA_P Parameter: Timepoint (hr) Value: 48
  misc_feature: MA Experiment 20000477 PARAMETER Experiment Name: Zm_5mM_SA_P Parameter: Tissue Value: Aerial
  misc_feature: MA Experiment 20000477 PARAMETER Experiment Name: Zm_5mM_SA_P Parameter: Treatment Value: 5mM SA vs. No Treatment
  misc_feature: MA Experiment ID: 20000478 Result: Down-regulated in Transcription
  misc_feature: MA Experiment 20000478 PARAMETER Experiment Name: Zm_5mM_SA_P Parameter: Age (day) Value: 11
  misc_feature: MA Experiment 20000478 PARAMETER Experiment Name: Zm_5mM_SA_P Parameter: Organism Value: Zea mays
  misc_feature: MA Experiment 20000478 PARAMETER Experiment Name: Zm_5mM_SA_P Parameter: Plant Line Value: 35A19
  misc_feature: MA Experiment 20000478 PARAMETER Experiment Name: Zm_5mM_SA_P Parameter: Timepoint (hr) Value: 72
  misc_feature: MA Experiment 20000478 PARAMETER Experiment Name: Zm_5mM_SA_P Parameter: Tissue Value: Aerial
  misc_feature: MA Experiment 20000478 PARAMETER Experiment Name: Zm_5mM_SA_P Parameter: Treatment Value: 5mM SA vs. No Treatment
  misc_feature: MA Experiment ID: 20000480 Result: Down-regulated in Transcription
  misc_feature: MA Experiment 20000480 PARAMETER Experiment Name: Zm_Drought_P Parameter: Age (day) Value: 11
  misc_feature: MA Experiment 20000480 PARAMETER Experiment Name: Zm_Drought_P Parameter: Organism Value: Zea mays
  misc_feature: MA Experiment 20000480 PARAMETER Experiment Name: Zm_Drought_P Parameter: Plant Line Value: 35A19
  misc_feature: MA Experiment 20000480 PARAMETER Experiment Name: Zm_Drought_P Parameter: Timepoint (hr) Value: 72
  misc_feature: MA Experiment 20000480 PARAMETER Experiment Name: Zm_Drought_P Parameter: Tissue Value: Aerial
  misc_feature: MA Experiment 20000480 PARAMETER Experiment Name: Zm_Drought_P Parameter: Treatment Value: Drought vs. No Drought
  misc_feature: MA Experiment ID: 20000626 Result: Down-regulated in Transcription
  misc_feature: MA Experiment 20000626 PARAMETER Experiment Name: Zm_Herbicide-Treatments_P Parameter: Timepoint (hr) Value: 12
  misc_feature: MA Experiment 20000626 PARAMETER Experiment Name: Zm_Herbicide-Treatments_P Parameter: Tissue Value: Aerial
  misc_feature: MA Experiment 20000626 PARAMETER Experiment Name: Zm_Herbicide-Treatments_P Parameter: Treatment Value: Roundup vs. No Treatment
acattctcttgtctcttgcacatcccccgcttccttcttggtcgtttctccccttctgatccgtgctagccagcttgcgttgtggctgcttgtcgccagatctacctatccaccgtaccacagtcgtccacagcgcgcgcttacgatggcggtcgccgccgctcgccttcttcttcgcgtcgtcgtcctcgcgctcctcgcagccgcgcanaggtccgtcgggaagagcgccgtgctgtctctgcgggagttggatggacgacgacggagtgccgcgacgacggatacccggagcagccgctactacgtcgacgcaatgcttgctgaaacgctaggggagcacaagaaagctggggcagcaacaagcgtgctagagctcaagcgccactccctcactgccattcctgaagaccccgtcgcccgcgaccggtaccttcgccgtctcctcgcanccgacgagtcgcgcgccaactcattccagccccgccgtaacaaggacagggcatcagcgtccacgcagtccgcctcggcagaggtcccgctgacctcgggcatccggctccagacgctcaactacgtcaccaccatctctctcggcggcagctccggctcgcccgccgcgaacctcaccgtcatcgtggacacggggagcgacctcacctgggtgcagtgcaagccgtgcagcgcgtgctacgcgcagcgcgacccgctcttcgacccagcgggctccgccacctacgctgcggtccggngcaacgcctncgcgtgcgcggactccctcagggccgccaccggcacgccgggatcctgtggttcgacgggggcaggcaacgagaagtgctactacgcgctagcctacggcgacgggtcgttcagccgcggcgtgctggccacggacacggtcgcgctcggcggcgccagcctgggcgggttcgtgttcgggtgcgggctcagcaaccgcggcctgttcggcggcacggcggggctcatggggctcggccgcaccgagctctcgctggtgtcccagaccgcgtcccggttacggcggcgtgttctcctactgccatgccggcggccacctncggcgacgcctcaggctcgctctccctcggcggcggggacgacgcggcgtcatcctaccgcaacacgacgcccgtggcgtacacccgcatgatcgccgacccggcgcagccgcccttctacttcctcaacgtcaccggcgcggccgtcggcggcaccgccctcgcggcgcaggggctgggcgcccgcaacgtgctcatcgactccggcacggtgatcacgcgcctggcgccgtccgtgtanccgctgtgcgcgccgagttcacgcgccagttcggcgccgcgggctacccggccgccccggggttctcgatcctggacacgtgctacgacctgacggggcacgacgaggtgaaggtgccgctntgacgctgcggctggagggcggggcggacgtgaccgtggacgcggctgggatgctgttcgtcgtgaggaaggacggctcgcaggtgtgcctggccatggcgagtctgtcgtacgaggacgagacgcctatcattggcaactaccagcagaagaacaagagggtggtgtatgacacgctggggtccaggctaggcttcgctgacgaggactgcaactatgtatagagacttgacagggaggaggatgtggaatatcggatttctagttatatgttgc

SEQ ID NO: 1583 - protein, 390 aa, Zea mays subsp. mays
  peptide (1)..(390): Ceres Seq. ID no. 12412139
  misc_feature (145)..(343): Pfam Name: Eukaryotic aspartyl protease Pfam Description: Eukaryotic aspartyl protease
  misc_feature (101)..(342): Homolog of NCBI NO: 38344196 NR Description: OSJNBa0064G10.12 [Oryza sativa (japonica
  misc_feature (148)..(345): Homolog of NCBI NO: 15238250 NR Description: nucleoid DNA-binding protein cnd41 - like protein
  misc_feature (148)..(345): Homolog of NCBI NO: 24417232 NR Description: unknown [Arabidopsis thaliana]
  misc_feature (148)..(345): Homolog of NCBI NO: 22326716 NR Description: nucleoid DNA-binding protein cnd41 - like protein
  misc_feature (148)..(345): Homolog of NCBI NO: 11358588 NR Description: nucleoid DNA-binding protein cnd41-like protein -
  misc_feature (115)..(346): Homolog of NCBI NO: 7489168 NR Description: nucleoid DNA-binding protein cnd41, chloroplast -
  misc_feature (110)..(346): Homolog of NCBI NO: 24430421 NR Description: 41 kD chloroplast nucleoid DNA binding protein
  misc_feature (118)..(343): Homolog of NCBI NO: 21595063 NR Description: putative aspartyl protease [Arabidopsis thaliana]
  misc_feature (118)..(343): Homolog of NCBI NO: 25406599 NR Description: probable aspartyl proteinase, 105611-106921
  misc_feature (118)..(343): Homolog of NCBI NO: 18412482 NR Description: putative aspartyl protease
  misc_feature (70)..(70): Xaa is any aa, unknown or other
  misc_feature (151)..(151): Xaa is any aa, unknown or other
  misc_feature (251)..(251): Xaa is any aa, unknown or other
  misc_feature (254)..(254): Xaa is any aa, unknown or other
  misc_feature (361)..(361): Xaa is any aa, unknown or other
HSLVSCTSPASFLVVSPLLIRASQLALWLLVARSTYPPYHSRPQRALTMAVAAARLLLRVVVLALLAAAXRSVGKSAVLSLRELDGRRRSAATTDTRSSRYYVDAMLAETLGEHKKAGAATSVLELKRHSLTAIPEDPVARDRYLRRLLAXDESRANSFQPRRNKDRASASTQSASAEVPLTSGIRLQTLNYVTTISLGGSSGSPAANLTVIVDTGSDLTWVQCKPCSACYAQRDPLFDPAGSATYAAVRXNAXACADSLRAATGTPGSCGSTGAGNEKCYYALAYGDGSFSRGVLATDTVALGGASLGGFVFGCGLSNRGLFGGTAGLMGLGRTELSLVSQTASRLRRRVLLLPCRRPPXATPQARSPSAAGTTRRHPTATRRPWRTPA

SEQ ID NO: 1584 - protein, 342 aa, Zea mays subsp. mays
  peptide (1)..(342): Ceres Seq. ID no. 12412140
  misc_feature (97)..(295): Pfam Name: Eukaryotic aspartyl protease Pfam Description: Eukaryotic aspartyl protease
  misc_feature (53)..(294): Homolog of NCBI NO: 38344196 NR Description: OSJNBa0064G10.12 [Oryza sativa (japonica
  misc_feature (100)..(297): Homolog of NCBI NO: 15238250 NR Description: nucleoid DNA-binding protein cnd41 - like protein
  misc_feature (100)..(297): Homolog of NCBI NO: 24417232 NR Description: unknown [Arabidopsis thaliana]
  misc_feature (100)..(297): Homolog of NCBI NO: 22326716 NR Description: nucleoid DNA-binding protein cnd41 - like protein
  misc_feature (100)..(297): Homolog of NCBI NO: 11358588 NR Description: nucleoid DNA-binding protein cnd41-like protein -
  misc_feature (67)..(298): Homolog of NCBI NO: 7489168 NR Description: nucleoid DNA-binding protein cnd41, chloroplast -
  misc_feature (62)..(298): Homolog of NCBI NO: 24430421 NR Description: 41 kD chloroplast nucleoid DNA binding protein
  misc_feature (70)..(295): Homolog of NCBI NO: 21595063 NR Description: putative aspartyl protease [Arabidopsis thaliana]
  misc_feature (70)..(295): Homolog of NCBI NO: 25406599 NR Description: probable aspartyl proteinase, 105611-106921
  misc_feature (70)..(295): Homolog of NCBI NO: 18412482 NR Description: putative aspartyl protease
  misc_feature (22)..(22): Xaa is any aa, unknown or other
  misc_feature (103)..(103): Xaa is any aa, unknown or other
  misc_feature (203)..(203): Xaa is any aa, unknown or other
  misc_feature (206)..(206): Xaa is any aa, unknown or other
  misc_feature (313)..(313): Xaa is any aa, unknown or other
MAVAAARLLLRVVVLALLAAAXRSVGKSAVLSLRELDGRRRSAATTDTRSSRYYVDAMLAETLGEHKKAGAATSVLELKRHSLTAIPEDPVARDRYLRRLLAXDESRANSFQPRRNKDRASASTQSASAEVPLTSGIRLQTLNYVTTISLGGSSGSPAANLTVIVDTGSDLTWVQCKPCSACYAQRDPLFDPAGSATYAAVRXNAXACADSLRAATGTPGSCGSTGAGNEKCYYALAYGDGSFSRGVLATDTVALGGASLGGFVFGCGLSNRGLFGGTAGLMGLGRTELSLVSQTASRLRRRVLLLPCRRPPXATPQARSPSAAGTTRRHPTATRRPWRTPA

SEQ ID NO: 1585 - protein, 285 aa, Zea mays subsp. mays
  peptide (1)..(285): Ceres Seq. ID no. 12412141
  misc_feature (40)..(238): Pfam Name: Eukaryotic aspartyl protease Pfam Description: Eukaryotic aspartyl protease
  misc_feature (1)..(237): Homolog of NCBI NO: 38344196 NR Description: OSJNBa0064G10.12 [Oryza sativa (japonica
  misc_feature (43)..(240): Homolog of NCBI NO: 15238250 NR Description: nucleoid DNA-binding protein cnd41 - like protein
  misc_feature (43)..(240): Homolog of NCBI NO: 24417232 NR Description: unknown [Arabidopsis thaliana]
  misc_feature (43)..(240): Homolog of NCBI NO: 22326716 NR Description: nucleoid DNA-binding protein cnd41 - like protein
  misc_feature (43)..(240): Homolog of NCBI NO: 11358588 NR Description: nucleoid DNA-binding protein cnd41-like protein -
  misc_feature (10)..(241): Homolog of NCBI NO: 7489168 NR Description: nucleoid DNA-binding protein cnd41, chloroplast -
  misc_feature (5)..(241): Homolog of NCBI NO: 24430421 NR Description: 41 kD chloroplast nucleoid DNA binding protein
  misc_feature (13)..(238): Homolog of NCBI NO: 21595063 NR Description: putative aspartyl protease [Arabidopsis thaliana]
  misc_feature (13)..(238): Homolog of NCBI NO: 25406599 NR Description: probable aspartyl proteinase, 105611-106921
  misc_feature (13)..(238): Homolog of NCBI NO: 18412482 NR Description: putative aspartyl protease
  misc_feature (46)..(46): Xaa is any aa, unknown or other
  misc_feature (146)..(146): Xaa is any aa, unknown or other
  misc_feature (149)..(149): Xaa is any aa, unknown or other
  misc_feature (256)..(256): Xaa is any aa, unknown or other
MLAETLGEHKKAGAATSVLELKRHSLTAIPEDPVARDRYLRRLLAXDESRANSFQPRRNKDRASASTQSASAEVPLTSGIRLQTLNYVTTISLGGSSGSPAANLTVIVDTGSDLTWVQCKPCSACYAQRDPLFDPAGSATYAAVRXNAXACADSLRAATGTPGSCGSTGAGNEKCYYALAYGDGSFSRGVLATDTVALGGASLGGFVFGCGLSNRGLFGGTAGLMGLGRTELSLVSQTASRLRRRVLLLPCRRPPXATPQARSPSAAGTTRRHPTATRRPWRTPA

SEQ ID NO: 1586 - DNA, 1284 bp, Zea mays subsp. mays
  misc_feature (1)..(1284): Ceres Seq. ID no. 12364595
  misc_feature: MA Experiment ID: 108523 Result: Down-regulated in Transcription
  misc_feature: MA Experiment 108523 PARAMETER Experiment Name: Zm_42deg_Heat_P Parameter: Age (day) Value: 8
  misc_feature: MA Experiment 108523 PARAMETER Experiment Name: Zm_42deg_Heat_P Parameter: Organism Value: Zea mays
  misc_feature: MA Experiment 108523 PARAMETER Experiment Name: Zm_42deg_Heat_P Parameter: Plant Line Value: 35A19
  misc_feature: MA Experiment 108523 PARAMETER Experiment Name: Zm_42deg_Heat_P Parameter: Temperature (deg C) Value: 42 vs. 22
  misc_feature: MA Experiment 108523 PARAMETER Experiment Name: Zm_42deg_Heat_P Parameter: Timepoint (hr) Value: 6
  misc_feature: MA Experiment 108523 PARAMETER Experiment Name: Zm_42deg_Heat_P Parameter: Tissue Value: Aerial
  misc_feature: MA Experiment ID: 108529 Result: Up-regulated in Transcription
  misc_feature: MA Experiment 108529 PARAMETER Experiment Name: Zm_Imbibed_Seeds_P Parameter: Age (day) Value: 5 vs. 2
  misc_feature: MA Experiment 108529 PARAMETER Experiment Name: Zm_Imbibed_Seeds_P Parameter: Organism Value: Zea mays
  misc_feature: MA Experiment 108529 PARAMETER Experiment Name: Zm_Imbibed_Seeds_P Parameter: Plant Line Value: 35A19
  misc_feature: MA Experiment 108529 PARAMETER Experiment Name: Zm_Imbibed_Seeds_P Parameter: Tissue Value: Roots vs. Embryo
  misc_feature: MA Experiment ID: 108535 Result: Down-regulated in Transcription
  misc_feature: MA Experiment 108535 PARAMETER Experiment Name: Zm_Meristem_P Parameter: Age (day) Value: 8
  misc_feature: MA Experiment 108535 PARAMETER Experiment Name: Zm_Meristem_P Parameter: Organism Value: Zea mays
  misc_feature: MA Experiment 108535 PARAMETER Experiment Name: Zm_Meristem_P Parameter: Plant Line Value: 35A19
  misc_feature: MA Experiment 108535 PARAMETER Experiment Name: Zm_Meristem_P Parameter: Tissue Value: Root Meristem vs. Above Root Meristem
  misc_feature: MA Experiment ID: 108543 Result: Up-regulated in Transcription
  misc_feature: MA Experiment ID: 108545 Result: Down-regulated in Transcription
  misc_feature: MA Experiment 108545 PARAMETER Experiment Name: Zm_Imbibed_Seeds_P Parameter: Age (day) Value: 3 vs. 2
  misc_feature: MA Experiment 108545 PARAMETER Experiment Name: Zm_Imbibed_Seeds_P Parameter: Organism Value: Zea mays
  misc_feature: MA Experiment 108545 PARAMETER Experiment Name: Zm_Imbibed_Seeds_P Parameter: Plant Line Value: 35A19
  misc_feature: MA Experiment 108545 PARAMETER Experiment Name: Zm_Imbibed_Seeds_P Parameter: Tissue Value: Aerial vs. Embryo
  misc_feature: MA Experiment ID: 108546 Result: Up-regulated in Transcription
  misc_feature: MA Experiment 108546 PARAMETER Experiment Name: Zm_Imbibed_Seeds_P Parameter: Age (day) Value: 3 vs. 2
  misc_feature: MA Experiment 108546 PARAMETER Experiment Name: Zm_Imbibed_Seeds_P Parameter: Organism Value: Zea mays
  misc_feature: MA Experiment 108546 PARAMETER Experiment Name: Zm_Imbibed_Seeds_P Parameter: Plant Line Value: 35A19
  misc_feature: MA Experiment 108546 PARAMETER Experiment Name: Zm_Imbibed_Seeds_P Parameter: Tissue Value: Roots vs. Embryo
  misc_feature: MA Experiment ID: 108547 Result: Down-regulated in Transcription
  misc_feature: MA Experiment 108547 PARAMETER Experiment Name: Zm_Imbibed_Seeds_P Parameter: Age (day) Value: 4 vs. 2
  misc_feature: MA Experiment 108547 PARAMETER Experiment Name: Zm_Imbibed_Seeds_P Parameter: Organism Value: Zea mays
  misc_feature: MA Experiment 108547 PARAMETER Experiment Name: Zm_Imbibed_Seeds_P Parameter: Plant Line Value: 35A19
  misc_feature: MA Experiment 108547 PARAMETER Experiment Name: Zm_Imbibed_Seeds_P Parameter: Tissue Value: Aerial vs. Embryo
  misc_feature: MA Experiment ID: 108556 Result: Down-regulated in Transcription
  misc_feature: MA Experiment 108556 PARAMETER Experiment Name: Zm_Drought_P Parameter: Age (day) Value: 9
  misc_feature: MA Experiment 108556 PARAMETER Experiment Name: Zm_Drought_P Parameter: Organism Value: Zea mays
  misc_feature: MA Experiment 108556 PARAMETER Experiment Name: Zm_Drought_P Parameter: Plant Line Value: 35A19
  misc_feature: MA Experiment 108556 PARAMETER Experiment Name: Zm_Drought_P Parameter: Timepoint (hr) Value: 24
  misc_feature: MA Experiment 108556 PARAMETER Experiment Name: Zm_Drought_P Parameter: Tissue Value: Aerial
  misc_feature: MA Experiment 108556 PARAMETER Experiment Name: Zm_Drought_P Parameter: Treatment Value: Drought vs. No Drought
  misc_feature: MA Experiment ID: 108559 Result: Down-regulated in Transcription
  misc_feature: MA Experiment 108559 PARAMETER Experiment Name: Zm_5mM_NO_P Parameter: Age (day) Value: 8
  misc_feature: MA Experiment 108559 PARAMETER Experiment Name: Zm_5mM_NO_P Parameter: Organism Value: Zea mays
  misc_feature: MA Experiment 108559 PARAMETER Experiment Name: Zm_5mM_NO_P Parameter: Plant Line Value: 35A19
  misc_feature: MA Experiment 108559 PARAMETER Experiment Name: Zm_5mM_NO_P Parameter: Timepoint (hr) Value: 12
  misc_feature: MA Experiment 108559 PARAMETER Experiment Name: Zm_5mM_NO_P Parameter: Tissue Value: Aerial
  misc_feature: MA Experiment 108559 PARAMETER Experiment Name: Zm_5mM_NO_P Parameter: Treatment Value: 5mM NO vs. No Treatment
  misc_feature: MA Experiment ID: 20000108 Result: Down-regulated in Transcription
  misc_feature: MA Experiment 20000108 PARAMETER Experiment Name: Zm_Root-Tips_P Parameter: Age (day) Value: 12
  misc_feature: MA Experiment 20000108 PARAMETER Experiment Name: Zm_Root-Tips_P Parameter: Organism Value: Zea mays
  misc_feature: MA Experiment 20000108 PARAMETER Experiment Name: Zm_Root-Tips_P Parameter: Tissue Value: Root tips vs. Root mid region    35
  misc_feature: MA Experiment 20000108 PARAMETER Experiment Name: Zm_Root-Tips_P Parameter: Tissue Value: Root tips vs. Root mid region   Sequence Listing-Misc Features (4)
  misc_feature: MA Experiment ID: 20000477 Result: Down-regulated in Transcription
  misc_feature: MA Experiment 20000477 PARAMETER Experiment Name: Zm_5mM_SA_P Parameter: Age (day) Value: 10
  misc_feature: MA Experiment 20000477 PARAMETER Experiment Name: Zm_5mM_SA_P Parameter: Organism Value: Zea mays
  misc_feature: MA Experiment 20000477 PARAMETER Experiment Name: Zm_5mM_SA_P Parameter: Plant Line Value: 35A19
  misc_feature: MA Experiment 20000477 PARAMETER Experiment Name: Zm_5mM_SA_P Parameter: Timepoint (hr) Value: 48
  misc_feature: MA Experiment 20000477 PARAMETER Experiment Name: Zm_5mM_SA_P Parameter: Tissue Value: Aerial
  misc_feature: MA Experiment 20000477 PARAMETER Experiment Name: Zm_5mM_SA_P Parameter: Treatment Value: 5mM SA vs. No Treatment
  misc_feature: MA Experiment ID: 20000478 Result: Down-regulated in Transcription
  misc_feature: MA Experiment 20000478 PARAMETER Experiment Name: Zm_5mM_SA_P Parameter: Age (day) Value: 11
  misc_feature: MA Experiment 20000478 PARAMETER Experiment Name: Zm_5mM_SA_P Parameter: Organism Value: Zea mays
  misc_feature: MA Experiment 20000478 PARAMETER Experiment Name: Zm_5mM_SA_P Parameter: Plant Line Value: 35A19
  misc_feature: MA Experiment 20000478 PARAMETER Experiment Name: Zm_5mM_SA_P Parameter: Timepoint (hr) Value: 72
  misc_feature: MA Experiment 20000478 PARAMETER Experiment Name: Zm_5mM_SA_P Parameter: Tissue Value: Aerial
  misc_feature: MA Experiment 20000478 PARAMETER Experiment Name: Zm_5mM_SA_P Parameter: Treatment Value: 5mM SA vs. No Treatment
  misc_feature: MA Experiment ID: 20000480 Result: Down-regulated in Transcription
  misc_feature: MA Experiment 20000480 PARAMETER Experiment Name: Zm_Drought_P Parameter: Age (day) Value: 11
  misc_feature: MA Experiment 20000480 PARAMETER Experiment Name: Zm_Drought_P Parameter: Organism Value: Zea mays
  misc_feature: MA Experiment 20000480 PARAMETER Experiment Name: Zm_Drought_P Parameter: Plant Line Value: 35A19
  misc_feature: MA Experiment 20000480 PARAMETER Experiment Name: Zm_Drought_P Parameter: Timepoint (hr) Value: 72
  misc_feature: MA Experiment 20000480 PARAMETER Experiment Name: Zm_Drought_P Parameter: Tissue Value: Aerial
  misc_feature: MA Experiment 20000480 PARAMETER Experiment Name: Zm_Drought_P Parameter: Treatment Value: Drought vs. No Drought
  misc_feature: MA Experiment ID: 20000535 Result: Down-regulated in Transcription
  misc_feature: MA Experiment 20000535 PARAMETER Experiment Name: Zm_Hybrid_Seed_Dev_P Parameter: DAP Value: 30 vs. 12
  misc_feature: MA Experiment 20000535 PARAMETER Experiment Name: Zm_Hybrid_Seed_Dev_P Parameter: Organism Value: Zea mays
  misc_feature: MA Experiment 20000535 PARAMETER Experiment Name: Zm_Hybrid_Seed_Dev_P Parameter: Plant Line Value: 35A19
  misc_feature: MA Experiment 20000535 PARAMETER Experiment Name: Zm_Hybrid_Seed_Dev_P Parameter: Tissue Value: Embryo vs. Unfert Floret
aaacctcattccatgctctcttcattggttcatacttcatagctagtttgcctcccaaaaacacctgccctcgtgcgtggcaggagcacgggcacgatgatcagcacagcgcacagccggcagcagcaccatgccttcgagaagagccctggcaacagccacatgaagagcatcgacaggaagctgcagcaggccatgagccaggcggccagcaagtacatgcagaggatctaccctctaggcatgcagaggagcagctccagcctcacattgtcgtcgctctcgctgtcgcagaactccaacgactcctccatcagcagctccaactccagctgggagcctaaggtgccgctgctctacggcggcaccttcagcccctggggcgacgtcatggtgtctcgggagatgaggcgggaggacgatgacaaggtcagtgaccatgacgtcgaaggaggcgaggaggacttggactgcagtgagccggggagcctgcgtaggtgcagctggatcaccaagaacagtgacgaggcgtacgtccagttccacgacgagtgctggggcgtccctgtgtacagcgacaaccggctgttcgagcttctgtcgctgtcagggatgctgatcgaccacaactggacggagatactgaagcgtcgggacatgtacagggaggcgttcgccgacttcgaccccagcgcggtggcgcggatggaggaggaggacgtggcggagatcagcggcgacagggagctgaggatcgccgagtgcagggtccggtgcatcgtggagaacgccaggtgcatccagagggtggccagggagttcggctccttcagcggctacatgtggggccacgtgaaccaccggccggtggtgggcaagtaccgccaccacaagtacatcccgttccggacgcccaagtcggaggcggtgagcaaggacctcgtccgccggggcttccgcctcgtcggccccgtcatcgtctactctttcatgcaggccgccggcatggccatcgaccacctcgtcgactgcttccgcttccacgactgcgtccgcctcgccgagcgctcctggggcatcaccaacgtcgccgcgtagccagccggcccctcaatatctgtgcatgcattcctctccaactttttcacaccttcttcttggtgttgttattttttttttgtttggagatcgaaattgtgtgtgtaattacgtagagtatgtagtactctactaagttatgatgtaatacttctattaactctttgccaatgaaaagtagtactg

SEQ ID NO: 1587 - protein, 333 aa, Zea mays subsp. mays
  peptide (1)..(333): Ceres Seq. ID no. 12364596
  misc_feature (137)..(317): Pfam Name: Methyladenine glycosylase Pfam Description: Methyladenine glycosylase
  misc_feature (50)..(323): Homolog of NCBI NO: 15218379 NR Description: hypothetical protein; protein id: At1g15970.1
  misc_feature (68)..(324): Homolog of NCBI NO: 18410766 NR Description: putative DNA-3-methyladenine glycosylase I
  misc_feature (138)..(324): Homolog of NCBI NO: 25406407 NR Description: hypothetical protein F9E10.6 [imported] -
  misc_feature (104)..(322): Homolog of NCBI NO: 21592537 NR Description: unknown [Arabidopsis thaliana]
  misc_feature (47)..(325): Homolog of NCBI NO: 38345034 NR Description: OSJNBa0029H02.18 [Oryza sativa (japonica
  misc_feature (50)..(319): Homolog of NCBI NO: 15220860 NR Description: DNA-3-methyladenine glycosidase, putative
  misc_feature (104)..(322): Homolog of NCBI NO: 15241554 NR Description: putative protein
  misc_feature (133)..(322): Homolog of NCBI NO: 18399721 NR Description: expressed protein
  misc_feature (13)..(324): Homolog of NCBI NO: 15242914 NR Description: putative protein; protein id: At5g57970.1
  misc_feature (24)..(326): Homolog of NCBI NO: 25518014 NR Description: F21F23.7 protein - Arabidopsis thaliana
MISTAHSRQQHHAFEKSPGNSHMKSIDRKLQQAMSQAASKYMQRIYPLGMQRSSSSLTLSSLSLSQNSNDSSISSSNSSWEPKVPLLYGGTFSPWGDVMVSREMRREDDDKVSDHDVEGGEEDLDCSEPGSLRRCSWITKNSDEAYVQFHDECWGVPVYSDNRLFELLSLSGMLIDHNWTEILKRRDMYREAFADFDPSAVARMEEEDVAEISGDRELRIAECRVRCIVENARCIQRVAREFGSFSGYMWGHVNHRPVVGKYRHHKYIPFRTPKSEAVSKDLVRRGFRLVGPVIVYSFMQAAGMAIDHLVDCFRFHDCVRLAERSWGITNVAA

SEQ ID NO: 1588 - protein, 311 aa, Zea mays subsp. mays
  peptide (1)..(311): Ceres Seq. ID no. 12364597
  misc_feature (115)..(295): Pfam Name: Methyladenine glycosylase Pfam Description: Methyladenine glycosylase
  misc_feature (116)..(302): Homolog of NCBI NO: 25406407 NR Description: hypothetical protein F9E10.6 [imported] -
  misc_feature (111)..(300): Homolog of NCBI NO: 18399721 NR Description: expressed protein
  misc_feature (82)..(300): Homolog of NCBI NO: 21592537 NR Description: unknown [Arabidopsis thaliana]
  misc_feature (82)..(300): Homolog of NCBI NO: 15241554 NR Description: putative protein
  misc_feature (25)..(303): Homolog of NCBI NO: 38345034 NR Description: OSJNBa0029H02.18 [Oryza sativa (japonica
  misc_feature (28)..(297): Homolog of NCBI NO: 15220860 NR Description: DNA-3-methyladenine glycosidase, putative
  misc_feature (28)..(301): Homolog of NCBI NO: 15218379 NR Description: hypothetical protein; protein id: At1g15970.1
  misc_feature (46)..(302): Homolog of NCBI NO: 18410766 NR Description: putative DNA-3-methyladenine glycosylase I
  misc_feature (1)..(302): Homolog of NCBI NO: 15242914 NR Description: putative protein; protein id: At5g57970.1
  misc_feature (2)..(304): Homolog of NCBI NO: 25518014 NR Description: F21F23.7 protein - Arabidopsis thaliana
MKSIDRKLQQAMSQAASKYMQRIYPLGMQRSSSSLTLSSLSLSQNSNDSSISSSNSSWEPKVPLLYGGTFSPWGDVMVSREMRREDDDKVSDHDVEGGEEDLDCSEPGSLRRCSWITKNSDEAYVQFHDECWGVPVYSDNRLFELLSLSGMLIDHNWTEILKRRDMYREAFADFDPSAVARMEEEDVAEISGDRELRIAECRVRCIVENARCIQRVAREFGSFSGYMWGHVNHRPVVGKYRHHKYIPFRTPKSEAVSKDLVRRGFRLVGPVIVYSFMQAAGMAIDHLVDCFRFHDCVRLAERSWGITNVAA

SEQ ID NO: 1589 - protein, 300 aa, Zea mays subsp. mays
  peptide (1)..(300): Ceres Seq. ID no. 12364598
  misc_feature (104)..(284): Pfam Name: Methyladenine glycosylase Pfam Description: Methyladenine glycosylase
  misc_feature (105)..(291): Homolog of NCBI NO: 25406407 NR Description: hypothetical protein F9E10.6 [imported] -
  misc_feature (100)..(289): Homolog of NCBI NO: 18399721 NR Description: expressed protein
  misc_feature (71)..(289): Homolog of NCBI NO: 21592537 NR Description: unknown [Arabidopsis thaliana]
  misc_feature (71)..(289): Homolog of NCBI NO: 15241554 NR Description: putative protein
  misc_feature (14)..(292): Homolog of NCBI NO: 38345034 NR Description: OSJNBa0029H02.18 [Oryza sativa (japonica
  misc_feature (17)..(286): Homolog of NCBI NO: 15220860 NR Description: DNA-3-methyladenine glycosidase, putative
  misc_feature (17)..(290): Homolog of NCBI NO: 15218379 NR Description: hypothetical protein; protein id: At1g15970.1
  misc_feature (35)..(291): Homolog of NCBI NO: 18410766 NR Description: putative DNA-3-methyladenine glycosylase I
  misc_feature (1)..(291): Homolog of NCBI NO: 15242914 NR Description: putative protein; protein id: At5g57970.1
  misc_feature (1)..(293): Homolog of NCBI NO: 25518014 NR Description: F21F23.7 protein - Arabidopsis thaliana
MSQAASKYMQRIYPLGMQRSSSSLTLSSLSLSQNSNDSSISSSNSSWEPKVPLLYGGTFSPWGDVMVSREMRREDDDKVSDHDVEGGEEDLDCSEPGSLRRCSWITKNSDEAYVQFHDECWGVPVYSDNRLFELLSLSGMLIDHNWTEILKRRDMYREAFADFDPSAVARMEEEDVAEISGDRELRIAECRVRCIVENARCIQRVAREFGSFSGYMWGHVNHRPVVGKYRHHKYIPFRTPKSEAVSKDLVRRGFRLVGPVIVYSFMQAAGMAIDHLVDCFRFHDCVRLAERSWGITNVAA

SEQ ID NO: 1590 - DNA, 954 bp, Zea mays subsp. mays
  misc_feature (1)..(954): Ceres Seq. ID no. 12412215
  misc_feature: MA Experiment ID: 20000534 Result: Down-regulated in Transcription
  misc_feature: MA Experiment 20000534 PARAMETER Experiment Name: Zm_Hybrid_Pollen_P Parameter: Age (day) Value: 8
  misc_feature: MA Experiment 20000534 PARAMETER Experiment Name: Zm_Hybrid_Pollen_P Parameter: Organism Value: Zea mays
  misc_feature: MA Experiment 20000534 PARAMETER Experiment Name: Zm_Hybrid_Pollen_P Parameter: Plant Line Value: 35A19
  misc_feature: MA Experiment 20000534 PARAMETER Experiment Name: Zm_Hybrid_Pollen_P Parameter: Tissue Value: Pollen vs. Aerial
agcgaggggcaacagttttctcgaagaagggaaggcagcctcttcctcgtcgccggcgacgtcaccctcagcggctatcagggatgccggtcagggtggtagataccgccacgccttcctcccagccctccccagggcaagaagcaaatactggacacccatctcctcctagctgttcactcttaagtgctggaagatcttttgctgggactcaaaatgtttcaagcctgcagaaggatgaagcatggaaagtgaatgtacgcatccatggttgtgatcttgaacagggttatttatgtggaacgatggaagcgcttaatgttccattagcagatacacctgttgtgactttctgggagggggagatagtggatgctaaaaattacacttttttcactggaaagtgggaggcatcaccagatgatgatataagacattggtccaagttcccatcatttacgcctcttctgggtcagattgagacagatggtggcaagtctctggactttagcaactatccttatatatttatgagatggaaagagcaatattttgtcaatgttggagtcgactgtgggttaaccatcgctggtttctactacgtctgcttttcttgcagcgatggctccattaatggattttattatgatccaaatagcagtccatttcagaagctcgagctgaagtgtaccaatgagaagaaatccgggttcaccttttcatcctacgagctgcagtgacaggacagatgccctcgacagacaactttctgttagcatatagtgtgtgtactgaactcgtactccctaatgaaaggaatgagtggtcgtttacgtaacagtttgttttctagcaagactaagcaaactgtcactttgtaatctgcagaagcatcttgtcctttctaaaatctaccttttgtattacgttcctattccacaattgttatctgct

SEQ ID NO: 1591 - protein, 245 aa, Zea mays subsp. mays
  peptide (1)..(245): Ceres Seq. ID no. 12412216
  misc_feature (35)..(227): Homolog of NCBI NO: 18676842 NR Description: unnamed protein product [Homo sapiens]
  misc_feature (35)..(227): Homolog of NCBI NO: 23111007 NR Description: hypothetical protein MGC3048 [Homo sapiens]
  misc_feature (29)..(227): Homolog of NCBI NO: 34328469 NR Description: RIKEN cDNA 4933439F18 [Mus musculus]
  misc_feature (29)..(227): Homolog of NCBI NO: 12848536 NR Description: unnamed protein product [Mus musculus]
  misc_feature (35)..(227): Homolog of NCBI NO: 34870809 NR Description: similar to RIKEN cDNA 4933439F18 [Rattus
  misc_feature (12)..(228): Homolog of NCBI NO: 40747141 NR Description: hypothetical protein AN1179.2 [Aspergillus
  misc_feature (153)..(245): Homolog of NCBI NO: 34895748 NR Description: P0024G09.20 [Oryza sativa (japonica
  misc_feature (169)..(220): Homolog of NCBI NO: 15224341 NR Description: hypothetical protein; protein id: At2g37680.1
  misc_feature (65)..(155): Homolog of NCBI NO: 15224341 NR Description: hypothetical protein; protein id: At2g37680.1
  misc_feature (28)..(245): Homolog of NCBI NO: 29150393 NR Description: unknown protein [Oryza sativa (japonica
RGATVFSKKGRQPLPRRRRRHPQRLSGMPVRVVDTATPSSQPSPGQEANTGHPSPPSCSLLSAGRSFAGTQNVSSLQKDEAWKVNVRIHGCDLEQGYLCGTMEALNVPLADTPVVTFWEGEIVDAKNYTFFTGKWEASPDDDIRHWSKFPSFTPLLGQIETDGGKSLDFSNYPYIFMRWKEQYFVNVGVDCGLTIAGFYYVCFSCSDGSINGFYYDPNSSPFQKLELKCTNEKKSGFTFSSYELQ

SEQ ID NO: 1592 - protein, 218 aa, Zea mays subsp. mays
  peptide (1)..(218): Ceres Seq. ID no. 12412217
  misc_feature (8)..(200): Homolog of NCBI NO: 18676842 NR Description: unnamed protein product [Homo sapiens]
  misc_feature (8)..(200): Homolog of NCBI NO: 23111007 NR Description: hypothetical protein MGC3048 [Homo sapiens]
  misc_feature (2)..(200): Homolog of NCBI NO: 34328469 NR Description: RIKEN cDNA 4933439F18 [Mus musculus]
  misc_feature (2)..(200): Homolog of NCBI NO: 12848536 NR Description: unnamed protein product [Mus musculus]
  misc_feature (8)..(200): Homolog of NCBI NO: 34870809 NR Description: similar to RIKEN cDNA 4933439F18 [Rattus
  misc_feature (1)..(201): Homolog of NCBI NO: 40747141 NR Description: hypothetical protein AN1179.2 [Aspergillus
  misc_feature (126)..(218): Homolog of NCBI NO: 34895748 NR Description: P0024G09.20 [Oryza sativa (japonica
  misc_feature (142)..(193): Homolog of NCBI NO: 15224341 NR Description: hypothetical protein; protein id: At2g37680.1
  misc_feature (38)..(128): Homolog of NCBI NO: 15224341 NR Description: hypothetical protein; protein id: At2g37680.1
  misc_feature (1)..(218): Homolog of NCBI NO: 29150393 NR Description: unknown protein [Oryza sativa (japonica
MPVRVVDTATPSSQPSPGQEANTGHPSPPSCSLLSAGRSFAGTQNVSSLQKDEAWKVNVRIHGCDLEQGYLCGTMEALNVPLADTPVVTFWEGEIVDAKNYTFFTGKWEASPDDDIRHWSKFPSFTPLLGQIETDGGKSLDFSNYPYIFMRWKEQYFVNVGVDCGLTIAGFYYVCFSCSDGSINGFYYDPNSSPFQKLELKCTNEKKSGFTFSSYELQ

SEQ ID NO: 1593 - protein, 144 aa, Zea mays subsp. mays
  peptide (1)..(144): Ceres Seq. ID no. 12412218
  misc_feature (1)..(126): Homolog of NCBI NO: 18676842 NR Description: unnamed protein product [Homo sapiens]
  misc_feature (1)..(126): Homolog of NCBI NO: 23111007 NR Description: hypothetical protein MGC3048 [Homo sapiens]
  misc_feature (1)..(126): Homolog of NCBI NO: 34328469 NR Description: RIKEN cDNA 4933439F18 [Mus musculus]
  misc_feature (1)..(126): Homolog of NCBI NO: 12848536 NR Description: unnamed protein product [Mus musculus]
  misc_feature (1)..(126): Homolog of NCBI NO: 34870809 NR Description: similar to RIKEN cDNA 4933439F18 [Rattus
  misc_feature (1)..(127): Homolog of NCBI NO: 40747141 NR Description: hypothetical protein AN1179.2 [Aspergillus
  misc_feature (52)..(144): Homolog of NCBI NO: 34895748 NR Description: P0024G09.20 [Oryza sativa (japonica
  misc_feature (68)..(119): Homolog of NCBI NO: 15224341 NR Description: hypothetical protein; protein id: At2g37680.1
  misc_feature (1)..(54): Homolog of NCBI NO: 15224341 NR Description: hypothetical protein; protein id: At2g37680.1
  misc_feature (1)..(144): Homolog of NCBI NO: 29150393 NR Description: unknown protein [Oryza sativa (japonica
MEALNVPLADTPVVTFWEGEIVDAKNYTFFTGKWEASPDDDIRHWSKFPSFTPLLGQIETDGGKSLDFSNYPYIFMRWKEQYFVNVGVDCGLTIAGFYYVCFSCSDGSINGFYYDPNSSPFQKLELKCTNEKKSGFTFSSYELQ

SEQ ID NO: 1594 - DNA, 1766 bp, Zea mays subsp. mays
  misc_feature (1)..(1766): Ceres Seq. ID no. 12386848
  misc_feature: MA Experiment ID: 108527 Result: Up-regulated in Transcription
  misc_feature: MA Experiment 108527 PARAMETER Experiment Name: Zm_5mM_NO_P Parameter: Age (day) Value: 8
  misc_feature: MA Experiment 108527 PARAMETER Experiment Name: Zm_5mM_NO_P Parameter: Organism Value: Zea mays
  misc_feature: MA Experiment 108527 PARAMETER Experiment Name: Zm_5mM_NO_P Parameter: Plant Line Value: 35A19
  misc_feature: MA Experiment 108527 PARAMETER Experiment Name: Zm_5mM_NO_P Parameter: Timepoint (hr) Value: 6
  misc_feature: MA Experiment 108527 PARAMETER Experiment Name: Zm_5mM_NO_P Parameter: Tissue Value: Aerial
  misc_feature: MA Experiment 108527 PARAMETER Experiment Name: Zm_5mM_NO_P Parameter: Treatment Value: 5mM NO vs. No Treatment
gcagtcgcagcagggccgagccgaccggtcaaaagcactgctgccccaccccaacccaccaccatccccgttccccaacccccaaagccgagagccatcccgcccgcagccgcaaccaggcaagcaagcgggagccgccaactcgtgcctctcggcagcggcgtctgaactctgaaccgaccgaccgaccgaccgttccgttccgttcaccccaccatggaggcgccgccgggaccggggcccatggagctggacgccccacctcccgccgccgccgccgcggcgattcctcccgccggcagcgacaagcacaaggacggggaagggggagacgctgtgacgggccatatcatctccaccaccatcggcgggaagaacggcgagcccaagcggaccatcagttacatggcagaacgtgtcgtgggcacaggctcatttgggatcgtcttccaggctaagtgtctggaaacaggagagaccttcgccatcaagaaggtgctgcaagatcggcgttacaagaaccgggagctgcaacttatgcgtgccatggagcaccccaacgtcatctgcctgaagcactgcttcttctcgacaacgagcagggacgaattgtttttaaaccttgtcatggaattcgtccctgagactctataccgagtcctgaagcactacagcaatgcgaaccagaggatgcctcttatctacgtcaagctctacatgtatcagctttttagaggcctagcttatattcataatgtaccaggagtctgccatagggatgtgaagccacaaaacgttttggttgatcctctcacccaccaggtcaagctctgtgactttggtagtgcaaaagttctgattcctggtgaaccgaacatatcttacatatgctctcgttactatcgtgcccctgagctcatatttggtgcgacggagtatacaagttcaatagacatatggtcagctggttgtgttctagctgagttgcttcttggacagccactatttccaggagagagcgctgttgatcagttggtagagatcatcaaggttcttggtactccaacccgtgaggagatacggtgcatgaatcccaactatactgagttcaggtttcctcagataaaggctcatccatggcacaagattttccacaagagaatgcctcctgaagccatagaccttgcttctcgtctccttcagtattcaccaagtcttcgctgctctgctcttgacgcatgtgctcatcccttcttcgatgagcttcggacaccgaacgcacgcctaccaaacggccgcccgttccctccgctctttaacttcaagcacgaactagcaaatgcctctccggacctcgtcagcaggcttgtgccggagcacattagacggcagatcggtgtcaacttcgggagcagctaggagggcaggcgctgtgatggtcgaagttttcggtcttggtttccccttctggagagtgggaggggctcaagcagtacctgagaaaagtagtgaaaccgtgtaaattatctgaccgtgaaggagtactaccgccagtaactggcgcatgttcgtccagtagttatggtaagaatgtaggaggtggagactggttaatgtgtagggtcgttttttttgttttgttttgatattactaccattttgttgtaatgttcgtcggtacttccagcagtagtgtagctggccacgttttgttcgtccgccatgatgtaaatgatcatcgcccaactgtaatgcatgttctctcg

SEQ ID NO: 1595 - protein, 400 aa, Zea mays subsp. mays
  peptide (1)..(400): Ceres Seq. ID no. 12386849
  misc_feature (63)..(347): Pfam Name: Protein kinase domain Pfam Description: Protein kinase domain
  misc_feature (7)..(391): Homolog of NCBI NO: 7434282 NR Description: shaggy protein kinase (EC 2.7.1.-) 6 - common
  misc_feature (37)..(392): Homolog of NCBI NO: 15230058 NR Description: shaggy related protein kinase, ASK-GAMMA
  misc_feature (1)..(394): Homolog of NCBI NO: 7434281 NR Description: probable shaggy-like protein kinase etha (EC
  misc_feature (4)..(397): Homolog of NCBI NO: 21593135 NR Description: putative shaggy-like protein kinase dzeta
  misc_feature (36)..(397): Homolog of NCBI NO: 18700188 NR Description: AT4g18710/F28A21_120 [Arabidopsis thaliana]
  misc_feature (4)..(397): Homolog of NCBI NO: 15224593 NR Description: putative shaggy-like protein kinase dzeta
  misc_feature (4)..(397): Homolog of NCBI NO: 12643750 NR Description: Shaggy-related protein kinase delta (ASK-delta)
  misc_feature (36)..(397): Homolog of NCBI NO: 12643751 NR Description: Shaggy-related protein kinase eta (ASK-eta)
  misc_feature (36)..(397): Homolog of NCBI NO: 15233984 NR Description: shaggy-like protein kinase etha (EC 2.7.1.-)
  misc_feature (4)..(400): Homolog of NCBI NO: 15221476 NR Description: shaggy-like kinase, putative
MEAPPGPGPMELDAPPPAAAAAAIPPAGSDKHKDGEGGDAVTGHIISTTIGGKNGEPKRTISYMAERVVGTGSFGIVFQAKCLETGETFAIKKVLQDRRYKNRELQLMRAMEHPNVICLKHCFFSTTSRDELFLNLVMEFVPETLYRVLKHYSNANQRMPLIYVKLYMYQLFRGLAYIHNVPGVCHRDVKPQNVLVDPLTHQVKLCDFGSAKVLIPGEPNISYICSRYYRAPELIFGATEYTSSIDIWSAGCVLAELLLGQPLFPGESAVDQLVEIIKVLGTPTREEIRCMNPNYTEFRFPQIKAHPWHKIFHKRMPPEAIDLASRLLQYSPSLRCSALDACAHPFFDELRTPNARLPNGRPFPPLFNFKHELANASPDLVSRLVPEHIRRQIGVNFGSS

SEQ ID NO: 1596 - protein, 391 aa, Zea mays subsp. mays
  peptide (1)..(391): Ceres Seq. ID no. 12386850
  misc_feature (54)..(338): Pfam Name: Protein kinase domain Pfam Description: Protein kinase domain
  misc_feature (1)..(388): Homolog of NCBI NO: 21593135 NR Description: putative shaggy-like protein kinase dzeta
  misc_feature (27)..(388): Homolog of NCBI NO: 18700188 NR Description: AT4g18710/F28A21_120 [Arabidopsis thaliana]
  misc_feature (1)..(388): Homolog of NCBI NO: 15224593 NR Description: putative shaggy-like protein kinase dzeta
  misc_feature (1)..(388): Homolog of NCBI NO: 12643750 NR Description: Shaggy-related protein kinase delta (ASK-delta)
  misc_feature (28)..(383): Homolog of NCBI NO: 15230058 NR Description: shaggy related protein kinase, ASK-GAMMA
  misc_feature (1)..(385): Homolog of NCBI NO: 7434281 NR Description: probable shaggy-like protein kinase etha (EC
  misc_feature (1)..(382): Homolog of NCBI NO: 7434282 NR Description: shaggy protein kinase (EC 2.7.1.-) 6 - common
  misc_feature (27)..(388): Homolog of NCBI NO: 12643751 NR Description: Shaggy-related protein kinase eta (ASK-eta)
  misc_feature (27)..(388): Homolog of NCBI NO: 15233984 NR Description: shaggy-like protein kinase etha (EC 2.7.1.-)
  misc_feature (1)..(391): Homolog of NCBI NO: 15221476 NR Description: shaggy-like kinase, putative
MELDAPPPAAAAAAIPPAGSDKHKDGEGGDAVTGHIISTTIGGKNGEPKRTISYMAERVVGTGSFGIVFQAKCLETGETFAIKKVLQDRRYKNRELQLMRAMEHPNVICLKHCFFSTTSRDELFLNLVMEFVPETLYRVLKHYSNANQRMPLIYVKLYMYQLFRGLAYIHNVPGVCHRDVKPQNVLVDPLTHQVKLCDFGSAKVLIPGEPNISYICSRYYRAPELIFGATEYTSSIDIWSAGCVLAELLLGQPLFPGESAVDQLVEIIKVLGTPTREEIRCMNPNYTEFRFPQIKAHPWHKIFHKRMPPEAIDLASRLLQYSPSLRCSALDACAHPFFDELRTPNARLPNGRPFPPLFNFKHELANASPDLVSRLVPEHIRRQIGVNFGSS

SEQ ID NO: 1597 - protein, 337 aa, Zea mays subsp. mays
  peptide (1)..(337): Ceres Seq. ID no. 12386851
  misc_feature (1)..(284): Pfam Name: Protein kinase domain Pfam Description: Protein kinase domain
  misc_feature (1)..(328): Homolog of NCBI NO: 7434282 NR Description: shaggy protein kinase (EC 2.7.1.-) 6 - common
  misc_feature (1)..(329): Homolog of NCBI NO: 15230058 NR Description: shaggy related protein kinase, ASK-GAMMA
  misc_feature (1)..(331): Homolog of NCBI NO: 7434281 NR Description: probable shaggy-like protein kinase etha (EC
  misc_feature (1)..(334): Homolog of NCBI NO: 21593135 NR Description: putative shaggy-like protein kinase dzeta
  misc_feature (1)..(334): Homolog of NCBI NO: 18700188 NR Description: AT4g18710/F28A21_120 [Arabidopsis thaliana]
  misc_feature (1)..(334): Homolog of NCBI NO: 15224593 NR Description: putative shaggy-like protein kinase dzeta
  misc_feature (1)..(334): Homolog of NCBI NO: 12643750 NR Description: Shaggy-related protein kinase delta (ASK-delta)
  misc_feature (1)..(334): Homolog of NCBI NO: 12643751 NR Description: Shaggy-related protein kinase eta (ASK-eta)
  misc_feature (1)..(334): Homolog of NCBI NO: 15233984 NR Description: shaggy-like protein kinase etha (EC 2.7.1.-)
  misc_feature (1)..(337): Homolog of NCBI NO: 15221476 NR Description: shaggy-like kinase, putative
MAERVVGTGSFGIVFQAKCLETGETFAIKKVLQDRRYKNRELQLMRAMEHPNVICLKHCFFSTTSRDELFLNLVMEFVPETLYRVLKHYSNANQRMPLIYVKLYMYQLFRGLAYIHNVPGVCHRDVKPQNVLVDPLTHQVKLCDFGSAKVLIPGEPNISYICSRYYRAPELIFGATEYTSSIDIWSAGCVLAELLLGQPLFPGESAVDQLVEIIKVLGTPTREEIRCMNPNYTEFRFPQIKAHPWHKIFHKRMPPEAIDLASRLLQYSPSLRCSALDACAHPFFDELRTPNARLPNGRPFPPLFNFKHELANASPDLVSRLVPEHIRRQIGVNFGSS

SEQ ID NO: 1598 - DNA, 1710 bp, Zea mays subsp. mays
  misc_feature (1)..(1710): Ceres Seq. ID no. 12342530
  misc_feature: MA Experiment ID: 108504 Result: Down-regulated in Transcription
  misc_feature: MA Experiment 108504 PARAMETER Experiment Name: Zm_Drought_P Parameter: Age (day) Value: 8
  misc_feature: MA Experiment 108504 PARAMETER Experiment Name: Zm_Drought_P Parameter: Organism Value: Zea mays
  misc_feature: MA Experiment 108504 PARAMETER Experiment Name: Zm_Drought_P Parameter: Plant Line Value: 35A19
  misc_feature: MA Experiment 108504 PARAMETER Experiment Name: Zm_Drought_P Parameter: Timepoint (hr) Value: 12
  misc_feature: MA Experiment 108504 PARAMETER Experiment Name: Zm_Drought_P Parameter: Tissue Value: Aerial
  misc_feature: MA Experiment 108504 PARAMETER Experiment Name: Zm_Drought_P Parameter: Treatment Value: Drought vs. No Drought
  misc_feature: MA Experiment ID: 108528 Result: Up-regulated in Transcription
  misc_feature: MA Experiment 108528 PARAMETER Experiment Name: Zm_Imbibed_Seeds_P Parameter: Age (day) Value: 5 vs. 2
  misc_feature: MA Experiment 108528 PARAMETER Experiment Name: Zm_Imbibed_Seeds_P Parameter: Organism Value: Zea mays
  misc_feature: MA Experiment 108528 PARAMETER Experiment Name: Zm_Imbibed_Seeds_P Parameter: Plant Line Value: 35A19
  misc_feature: MA Experiment 108528 PARAMETER Experiment Name: Zm_Imbibed_Seeds_P Parameter: Tissue Value: Aerial vs. Embryo
  misc_feature: MA Experiment ID: 108530 Result: Up-regulated in Transcription
  misc_feature: MA Experiment 108530 PARAMETER Experiment Name: Zm_Imbibed_Seeds_P Parameter: Age (day) Value: 6 vs. 2
  misc_feature: MA Experiment 108530 PARAMETER Experiment Name: Zm_Imbibed_Seeds_P Parameter: Organism Value: Zea mays
  misc_feature: MA Experiment 108530 PARAMETER Experiment Name: Zm_Imbibed_Seeds_P Parameter: Plant Line Value: 35A19
  misc_feature: MA Experiment 108530 PARAMETER Experiment Name: Zm_Imbibed_Seeds_P Parameter: Tissue Value: Aerial vs. Embryo
  misc_feature: MA Experiment ID: 108534 Result: Up-regulated in Transcription
  misc_feature: MA Experiment 108534 PARAMETER Experiment Name: Zm_4deg_Cold_P Parameter: Age (hr) Value: 8
  misc_feature: MA Experiment 108534 PARAMETER Experiment Name: Zm_4deg_Cold_P Parameter: Organism Value: Zea mays
  misc_feature: MA Experiment 108534 PARAMETER Experiment Name: Zm_4deg_Cold_P Parameter: Plant Line Value: 35A19
  misc_feature: MA Experiment 108534 PARAMETER Experiment Name: Zm_4deg_Cold_P Parameter: Temperature (deg C) Value: 4 vs. 22
  misc_feature: MA Experiment 108534 PARAMETER Experiment Name: Zm_4deg_Cold_P Parameter: Timepoint (hr) Value: 6
  misc_feature: MA Experiment 108534 PARAMETER Experiment Name: Zm_4deg_Cold_P Parameter: Tissue Value: Aerial
  misc_feature: MA Experiment ID: 108547 Result: Up-regulated in Transcription
  misc_feature: MA Experiment 108547 PARAMETER Experiment Name: Zm_Imbibed_Seeds_P Parameter: Age (day) Value: 4 vs. 2
  misc_feature: MA Experiment 108547 PARAMETER Experiment Name: Zm_Imbibed_Seeds_P Parameter: Organism Value: Zea mays
  misc_feature: MA Experiment 108547 PARAMETER Experiment Name: Zm_Imbibed_Seeds_P Parameter: Plant Line Value: 35A19
  misc_feature: MA Experiment 108547 PARAMETER Experiment Name: Zm_Imbibed_Seeds_P Parameter: Tissue Value: Aerial vs. Embryo
  misc_feature: MA Experiment ID: 108556 Result: Down-regulated in Transcription
  misc_feature: MA Experiment 108556 PARAMETER Experiment Name: Zm_Drought_P Parameter: Age (day) Value: 9
  misc_feature: MA Experiment 108556 PARAMETER Experiment Name: Zm_Drought_P Parameter: Organism Value: Zea mays
  misc_feature: MA Experiment 108556 PARAMETER Experiment Name: Zm_Drought_P Parameter: Plant Line Value: 35A19
  misc_feature: MA Experiment 108556 PARAMETER Experiment Name: Zm_Drought_P Parameter: Timepoint (hr) Value: 24
  misc_feature: MA Experiment 108556 PARAMETER Experiment Name: Zm_Drought_P Parameter: Tissue Value: Aerial
  misc_feature: MA Experiment 108556 PARAMETER Experiment Name: Zm_Drought_P Parameter: Treatment Value: Drought vs. No Drought
  misc_feature: MA Experiment ID: 20000477 Result: Down-regulated in Transcription
  misc_feature: MA Experiment 20000477 PARAMETER Experiment Name: Zm_5mM_SA_P Parameter: Age (day) Value: 10
  misc_feature: MA Experiment 20000477 PARAMETER Experiment Name: Zm_5mM_SA_P Parameter: Organism Value: Zea mays
  misc_feature: MA Experiment 20000477 PARAMETER Experiment Name: Zm_5mM_SA_P Parameter: Plant Line Value: 35A19
  misc_feature: MA Experiment 20000477 PARAMETER Experiment Name: Zm_5mM_SA_P Parameter: Timepoint (hr) Value: 48
  misc_feature: MA Experiment 20000477 PARAMETER Experiment Name: Zm_5mM_SA_P Parameter: Tissue Value: Aerial
  misc_feature: MA Experiment 20000477 PARAMETER Experiment Name: Zm_5mM_SA_P Parameter: Treatment Value: 5mM SA vs. No Treatment
  misc_feature: MA Experiment ID: 20000478 Result: Down-regulated in Transcription
  misc_feature: MA Experiment 20000478 PARAMETER Experiment Name: Zm_5mM_SA_P Parameter: Age (day) Value: 11
  misc_feature: MA Experiment 20000478 PARAMETER Experiment Name: Zm_5mM_SA_P Parameter: Organism Value: Zea mays
  misc_feature: MA Experiment 20000478 PARAMETER Experiment Name: Zm_5mM_SA_P Parameter: Plant Line Value: 35A19
  misc_feature: MA Experiment 20000478 PARAMETER Experiment Name: Zm_5mM_SA_P Parameter: Timepoint (hr) Value: 72
  misc_feature: MA Experiment 20000478 PARAMETER Experiment Name: Zm_5mM_SA_P Parameter: Tissue Value: Aerial
  misc_feature: MA Experiment 20000478 PARAMETER Experiment Name: Zm_5mM_SA_P Parameter: Treatment Value: 5mM SA vs. No Treatment
  misc_feature: MA Experiment ID: 20000479 Result: Down-regulated in Transcription
  misc_feature: MA Experiment 20000479 PARAMETER Experiment Name: Zm_Drought_P Parameter: Age (day) Value: 10
  misc_feature: MA Experiment 20000479 PARAMETER Experiment Name: Zm_Drought_P Parameter: Organism Value: Zea mays
  misc_feature: MA Experiment 20000479 PARAMETER Experiment Name: Zm_Drought_P Parameter: Plant Line Value: 35A19
  misc_feature: MA Experiment 20000479 PARAMETER Experiment Name: Zm_Drought_P Parameter: Timepoint (hr) Value: 48
  misc_feature: MA Experiment 20000479 PARAMETER Experiment Name: Zm_Drought_P Parameter: Tissue Value: Aerial
  misc_feature: MA Experiment 20000479 PARAMETER Experiment Name: Zm_Drought_P Parameter: Treatment Value: Drought vs. No Drought
  misc_feature: MA Experiment ID: 20000480 Result: Down-regulated in Transcription
  misc_feature: MA Experiment 20000480 PARAMETER Experiment Name: Zm_Drought_P Parameter: Age (day) Value: 11
  misc_feature: MA Experiment 20000480 PARAMETER Experiment Name: Zm_Drought_P Parameter: Organism Value: Zea mays
  misc_feature: MA Experiment 20000480 PARAMETER Experiment Name: Zm_Drought_P Parameter: Plant Line Value: 35A19
  misc_feature: MA Experiment 20000480 PARAMETER Experiment Name: Zm_Drought_P Parameter: Timepoint (hr) Value: 72
  misc_feature: MA Experiment 20000480 PARAMETER Experiment Name: Zm_Drought_P Parameter: Tissue Value: Aerial
  misc_feature: MA Experiment 20000480 PARAMETER Experiment Name: Zm_Drought_P Parameter: Treatment Value: Drought vs. No Drought
  misc_feature: MA Experiment ID: 20000535 Result: Down-regulated in Transcription
  misc_feature: MA Experiment 20000535 PARAMETER Experiment Name: Zm_Hybrid_Seed_Dev_P Parameter: DAP Value: 30 vs. 12
  misc_feature: MA Experiment 20000535 PARAMETER Experiment Name: Zm_Hybrid_Seed_Dev_P Parameter: Organism Value: Zea mays
  misc_feature: MA Experiment 20000535 PARAMETER Experiment Name: Zm_Hybrid_Seed_Dev_P Parameter: Plant Line Value: 35A19
  misc_feature: MA Experiment 20000535 PARAMETER Experiment Name: Zm_Hybrid_Seed_Dev_P Parameter: Tissue Value: Embryo vs. Unfert Floret
cttcctcgtccgttccggcgtcctctctcccccagacccccaccccatgccaacgcccaccccgccgtctccgtccccgtctccctcttctggaacttgccctctgctccggatcggcgcgggccgtcgttttgccatggcatttccatcttgggcgactctgttcttcgccgggatgatggtggtgttggcagcggtggaagcggaagcggaagctggaggagggagcgtctgcttcgaccggatgttcggtttcggggactcgctcacggataccggcaacttcctgctctccgtgcctgacgacttcccggaccccgcgcggaacctcccctacggccagaccttcttcgggcgtccctccggccgctattccgacggccgcaacctgctcgacttcttcgcagaggcatttgggttgccatatgtgccaccttacctaggcagtggggacttccagaatggcgcaaactttgcagtcggcggcgcaactgctctcaatggctcgttcttccgtgagcgcggtgtggagcctacatggacgcctcactcccttgatgagcagatgcaatggttcaagaagcttctcccattcattgcaccatctgagacagagctaaatgaaataatgtccaagtcacttttgtttgtgggagagattggcggaaatgattacaaccatttaatcgttagggagaaatctgttgatgagctacatgaaattgttcctaatgttgttggcgccataagctcgggcatcacggaccttataaatcttggagcaaagaagttagttgttccagggaacttcccaatagggtgtgtcccattatatcttgcaatctttcagagccaaaaggagggttactatgaggaacaaacaggctgcattaagtggctcaatgaatttgctgagtaccataataggatgcttcaggaggagttggagaaactcaggaatcttcaccctgatgtaaccatcatttatgctgattattacggtgctgcattgaacatattccgtgccccactcaagtttggcttcacagtcccactgaatgcgtgctgcggaagtgacgctccgtacaactgttccccttcaatactgtgcgggcgtcctggatctacagtgtgccctgacccatcaaaatacatctcatgggatggtctacacttcaccgaggcgagttacaaagttgtcatccaaggagtactaggggggtacgccaaacctcctctttcagaagcctgcaagggtgcggagttcaaagtttctcaacttcaccaatgtacagataatccaacaaacaccgtatcatacgatgccttgagctcttttatttgatctgatgagctcaagtacttttagatttgtgctggtaaaaaaagtgcagtttagagttacagtgggcagtgtagatgctgcaggaccgggtatcttggacacttctcagagcggagaagagatccatcgatctagagtcatgtagttctacaatcaacttggctgctgggaggaggtaaaaaaaggtggggattttgtagtgtggaaatttgcaatcaccgaagggatacaggtggtcatactgctatataggaacctagatctatgattctgcttctgagggcaatgtatgcagatatgggctcagttgccttttaacagatacatgcatatatacagtgtaaatttgttgattcacattaacc

SEQ ID NO: 1599 - protein, 447 aa, Zea mays subsp. mays
  peptide (1)..(447): Ceres Seq. ID no. 12342531
  misc_feature (82)..(404): Pfam Name: GDSL-like Lipase/Acylhydrolase Pfam Description: GDSL-like Lipase/Acylhydrolase
  misc_feature (45)..(283): Homolog of NCBI NO: 34912612 NR Description: P0046B10.23 [Oryza sativa (japonica
  misc_feature (79)..(426): Homolog of NCBI NO: 15218723 NR Description: lipase, putative; protein id: At1g28570.1
  misc_feature (46)..(425): Homolog of NCBI NO: 15218725 NR Description: lipase, putative
  misc_feature (79)..(421): Homolog of NCBI NO: 15218728 NR Description: lipase, putative; protein id: At1g28590.1
  misc_feature (79)..(421): Homolog of NCBI NO: 10764858 NR Description: F1K23.17 [Arabidopsis thaliana]
  misc_feature (79)..(428): Homolog of NCBI NO: 21593234 NR Description: lipase, putative [Arabidopsis thaliana]
  misc_feature (79)..(428): Homolog of NCBI NO: 15218731 NR Description: lipase, putative
  misc_feature (79)..(431): Homolog of NCBI NO: 10764858 NR Description: F1K23.17 [Arabidopsis thaliana]
  misc_feature (79)..(428): Homolog of NCBI NO: 15225872 NR Description: putative lipase; protein id: At2g27360.1
  misc_feature (57)..(413): Homolog of NCBI NO: 34911800 NR Description: lipase-like protein [Oryza sativa (japonica
FLVRSGVLSPPDPHPMPTPTPPSPSPSPSSGTCPLLRIGAGRRFAMAFPSWATLFFAGMMVVLAAVEAEAEAGGGSVCFDRMFGFGDSLTDTGNFLLSVPDDFPDPARNLPYGQTFFGRPSGRYSDGRNLLDFFAEAFGLPYVPPYLGSGDFQNGANFAVGGATALNGSFFRERGVEPTWTPHSLDEQMQWFKKLLPFIAPSETELNEIMSKSLLFVGEIGGNDYNHLIVREKSVDELHEIVPNVVGAISSGITDLINLGAKKLVVPGNFPIGCVPLYLAIFQSQKEGYYEEQTGCIKWLNEFAEYHNRMLQEELEKLRNLHPDVTIIYADYYGAALNIFRAPLKFGFTVPLNACCGSDAPYNCSPSILCGRPGSTVCPDPSKYISWDGLHFTEASYKVVIQGVLGGYAKPPLSEACKGAEFKVSQLHQCTDNPTNTVSYDALSSFI

SEQ ID NO: 1600 - protein, 432 aa, Zea mays subsp. mays
  peptide (1)..(432): Ceres Seq. ID no. 12342532
  misc_feature (67)..(389): Pfam Name: GDSL-like Lipase/Acylhydrolase Pfam Description: GDSL-like Lipase/Acylhydrolase
  misc_feature (30)..(268): Homolog of NCBI NO: 34912612 NR Description: P0046B10.23 [Oryza sativa (japonica
  misc_feature (64)..(411): Homolog of NCBI NO: 15218723 NR Description: lipase, putative; protein id: At1g28570.1
  misc_feature (31)..(410): Homolog of NCBI NO: 15218725 NR Description: lipase, putative
  misc_feature (64)..(406): Homolog of NCBI NO: 15218728 NR Description: lipase, putative; protein id: At1g28590.1
  misc_feature (64)..(406): Homolog of NCBI NO: 10764858 NR Description: F1K23.17 [Arabidopsis thaliana]
  misc_feature (64)..(413): Homolog of NCBI NO: 21593234 NR Description: lipase, putative [Arabidopsis thaliana]
  misc_feature (64)..(413): Homolog of NCBI NO: 15218731 NR Description: lipase, putative
  misc_feature (64)..(416): Homolog of NCBI NO: 10764858 NR Description: F1K23.17 [Arabidopsis thaliana]
  misc_feature (64)..(413): Homolog of NCBI NO: 15225872 NR Description: putative lipase; protein id: At2g27360.1
  misc_feature (42)..(398): Homolog of NCBI NO: 34911800 NR Description: lipase-like protein [Oryza sativa (japonica
MPTPTPPSPSPSPSSGTCPLLRIGAGRRFAMAFPSWATLFFAGMMVVLAAVEAEAEAGGGSVCFDRMFGFGDSLTDTGNFLLSVPDDFPDPARNLPYGQTFFGRPSGRYSDGRNLLDFFAEAFGLPYVPPYLGSGDFQNGANFAVGGATALNGSFFRERGVEPTWTPHSLDEQMQWFKKLLPFIAPSETELNEIMSKSLLFVGEIGGNDYNHLIVREKSVDELHEIVPNVVGAISSGITDLINLGAKKLVVPGNFPIGCVPLYLAIFQSQKEGYYEEQTGCIKWLNEFAEYHNRMLQEELEKLRNLHPDVTIIYADYYGAALNIFRAPLKFGFTVPLNACCGSDAPYNCSPSILCGRPGSTVCPDPSKYISWDGLHFTEASYKVVIQGVLGGYAKPPLSEACKGAEFKVSQLHQCTDNPTNTVSYDALSSFI

SEQ ID NO: 1601 - protein, 402 aa, Zea mays subsp. mays
  peptide (1)..(402): Ceres Seq. ID no. 12342533
  misc_feature (37)..(359): Pfam Name: GDSL-like Lipase/Acylhydrolase Pfam Description: GDSL-like Lipase/Acylhydrolase
  misc_feature (1)..(238): Homolog of NCBI NO: 34912612 NR Description: P0046B10.23 [Oryza sativa (japonica
  misc_feature (34)..(381): Homolog of NCBI NO: 15218723 NR Description: lipase, putative; protein id: At1g28570.1
  misc_feature (1)..(380): Homolog of NCBI NO: 15218725 NR Description: lipase, putative
  misc_feature (34)..(376): Homolog of NCBI NO: 15218728 NR Description: lipase, putative; protein id: At1g28590.1
  misc_feature (34)..(376): Homolog of NCBI NO: 10764858 NR Description: F1K23.17 [Arabidopsis thaliana]
  misc_feature (34)..(383): Homolog of NCBI NO: 21593234 NR Description: lipase, putative [Arabidopsis thaliana]
  misc_feature (34)..(383): Homolog of NCBI NO: 15218731 NR Description: lipase, putative
  misc_feature (34)..(386): Homolog of NCBI NO: 10764858 NR Description: F1K23.17 [Arabidopsis thaliana]
  misc_feature (34)..(383): Homolog of NCBI NO: 15225872 NR Description: putative lipase; protein id: At2g27360.1
  misc_feature (12)..(368): Homolog of NCBI NO: 34911800 NR Description: lipase-like protein [Oryza sativa (japonica
MAFPSWATLFFAGMMVVLAAVEAEAEAGGGSVCFDRMFGFGDSLTDTGNFLLSVPDDFPDPARNLPYGQTFFGRPSGRYSDGRNLLDFFAEAFGLPYVPPYLGSGDFQNGANFAVGGATALNGSFFRERGVEPTWTPHSLDEQMQWFKKLLPFIAPSETELNEIMSKSLLFVGEIGGNDYNHLIVREKSVDELHEIVPNVVGAISSGITDLINLGAKKLVVPGNFPIGCVPLYLAIFQSQKEGYYEEQTGCIKWLNEFAEYHNRMLQEELEKLRNLHPDVTIIYADYYGAALNIFRAPLKFGFTVPLNACCGSDAPYNCSPSILCGRPGSTVCPDPSKYISWDGLHFTEASYKVVIQGVLGGYAKPPLSEACKGAEFKVSQLHQCTDNPTNTVSYDALSSFI

SEQ ID NO: 1602 - DNA, 1398 bp, Zea mays subsp. mays
  misc_feature (1)..(1398): Ceres Seq. ID no. 12347860
  misc_feature: MA Experiment ID: 108544 Result: Up-regulated in Transcription
  misc_feature: MA Experiment ID: 20000492 Result: Up-regulated in Transcription
  misc_feature: MA Experiment 20000492 PARAMETER Experiment Name: Zm_Hybrid_Seed_Dev_P Parameter: DAP Value: 12
  misc_feature: MA Experiment 20000492 PARAMETER Experiment Name: Zm_Hybrid_Seed_Dev_P Parameter: Organism Value: Zea mays
  misc_feature: MA Experiment 20000492 PARAMETER Experiment Name: Zm_Hybrid_Seed_Dev_P Parameter: Plant Line Value: 35A19
  misc_feature: MA Experiment 20000492 PARAMETER Experiment Name: Zm_Hybrid_Seed_Dev_P Parameter: Tissue Value: Fert Kernel vs. Unfert Floret
gttttttctctgacttttctgatttggtcctggcttctcctccttccccctcggatcggcggcagttcccgtgccctcacagtcacaggggacgcggctcgcctttccttccccgccaatccatccgctcttctcagcggcgagaagaagagatggggagcaacgccgccggcaagcctcctcctcctgctgctgctgctgtgtcgtgggagttccacgcgacggggcctcgcaacttgaccagccccggctggagggacctcatccgctccagctggagagatccaagctacagaaggatcgcagtgtcgtgcttcgtgcaggccgcgtatctgctggagctggacaggcaggagggcagagccggtgaagccgcgctcgctcccaactggtggaagcccttcaagtacaagctggtgcgcccgctcatcgactccagagacgggtccatctacggggcgcttctagaatgggaccagctcgccgccctcgctgacctgatagtggccaagcctcagggcgctcccaaggtggtcctcgcgctcaggggcaccgtgctgaggcagctgaccgtggtgagggacctggaagacgaccttcggttgtttgccctggagagcctgagggggtccgtcaggttcacaggcgcgctggaggtgctcaagtcggcgatccacaggcacggcagcgccaacgtgtgcgttgccggccactccctgggcgccggctttgcgctgcaggtcggcagggccttggccaaggatggaaccttcgtggagtgccatctgttcaacccgccgtcggtgtcacttggcacgggcctcaggaaaatccaggaaaaggccagcagtgtcctcaagcggtatatcagtagaagccgcggcggcggcggcagcggcagcagctcctcgtcgaatgtttccccaggaccaggagaggagctacaagccgccgctcgagatggagttggagaagaagagatgagcagggaggtcaaaagatgggtgccaaacctgtacgtgaacagctgcgactacatctgctgcttctacgctgaccgtagcggcgtcgctaccgtcaccgaggagaagcgttccggagtgcattccaagctgtacgtgatcgccaaaggaccgagcaagttcctggaggctcacgggctgcagcagtggtggtccgatgattctgagctccacttggccgtgcacgacagcaaactcatgtataggcaccttaagtccctctatgttgaacagtagtagagaaggcattggtacttgtttctcagaatgcctagtttttcttctctagtccagacaagaaaacatgtaaaccgtcagctgattaagagctccaactcttgcaactcctctaagcatatttcttctcttctcgcgc

SEQ ID NO: 1603 - protein, 418 aa, Zea mays subsp. mays
  peptide (1)..(418): Ceres Seq. ID no. 12347861
  misc_feature (70)..(350): Homolog of NCBI NO: 18396010 NR Description: expressed protein
  misc_feature (71)..(270): Homolog of NCBI NO: 10177082 NR Description: gene_id:MOP9.4~pir||T04290~similar to unknown
  misc_feature (70)..(405): Homolog of NCBI NO: 18413406 NR Description: unknown protein; protein id: At4g10955.1
  misc_feature (71)..(350): Homolog of NCBI NO: 30689345 NR Description: expressed protein [Arabidopsis thaliana]
  misc_feature (90)..(286): Homolog of NCBI NO: 34901136 NR Description: contains EST AU161031(C53313)~similar to Oryza
  misc_feature (59)..(415): Homolog of NCBI NO: 34910916 NR Description: OSJNBb0063G05.3 [Oryza sativa (japonica
  misc_feature (48)..(415): Homolog of NCBI NO: 34909578 NR Description: P0046E05.21 [Oryza sativa (japonica
  misc_feature (69)..(415): Homolog of NCBI NO: 15241306 NR Description: putative protein; protein id: At5g50890.1
  misc_feature (51)..(139): Homolog of NCBI NO: 34904536 NR Description: B1066G12.13 [Oryza sativa (japonica
  misc_feature (170)..(418): Homolog of NCBI NO: 34904536 NR Description: B1066G12.13 [Oryza sativa (japonica
FFSDFSDLVLASPPSPSDRRQFPCPHSHRGRGSPFLPRQSIRSSQRREEEMGSNAAGKPPPPAAAAVSWEFHATGPRNLTSPGWRDLIRSSWRDPSYRRIAVSCFVQAAYLLELDRQEGRAGEAALAPNWWKPFKYKLVRPLIDSRDGSIYGALLEWDQLAALADLIVAKPQGAPKVVLALRGTVLRQLTVVRDLEDDLRLFALESLRGSVRFTGALEVLKSAIHRHGSANVCVAGHSLGAGFALQVGRALAKDGTFVECHLFNPPSVSLGTGLRKIQEKASSVLKRYISRSRGGGGSGSSSSSNVSPGPGEELQAAARDGVGEEEMSREVKRWVPNLYVNSCDYICCFYADRSGVATVTEEKRSGVHSKLYVIAKGPSKFLEAHGLQQWWSDDSELHLAVHDSKLMYRHLKSLYVEQ

SEQ ID NO: 1604 - protein, 368 aa, Zea mays subsp. mays
  peptide (1)..(368): Ceres Seq. ID no. 12347862
  misc_feature (20)..(300): Homolog of NCBI NO: 18396010 NR Description: expressed protein
  misc_feature (21)..(220): Homolog of NCBI NO: 10177082 NR Description: gene_id:MOP9.4~pir||T04290~similar to unknown
  misc_feature (20)..(355): Homolog of NCBI NO: 18413406 NR Description: unknown protein; protein id: At4g10955.1
  misc_feature (21)..(300): Homolog of NCBI NO: 30689345 NR Description: expressed protein [Arabidopsis thaliana]
  misc_feature (40)..(236): Homolog of NCBI NO: 34901136 NR Description: contains EST AU161031(C53313)~similar to Oryza
  misc_feature (9)..(365): Homolog of NCBI NO: 34910916 NR Description: OSJNBb0063G05.3 [Oryza sativa (japonica
  misc_feature (1)..(365): Homolog of NCBI NO: 34909578 NR Description: P0046E05.21 [Oryza sativa (japonica
  misc_feature (19)..(365): Homolog of NCBI NO: 15241306 NR Description: putative protein; protein id: At5g50890.1
  misc_feature (1)..(89): Homolog of NCBI NO: 34904536 NR Description: B1066G12.13 [Oryza sativa (japonica
  misc_feature (120)..(368): Homolog of NCBI NO: 34904536 NR Description: B1066G12.13 [Oryza sativa (japonica
MGSNAAGKPPPPAAAAVSWEFHATGPRNLTSPGWRDLIRSSWRDPSYRRIAVSCFVQAAYLLELDRQEGRAGEAALAPNWWKPFKYKLVRPLIDSRDGSIYGALLEWDQLAALADLIVAKPQGAPKVVLALRGTVLRQLTVVRDLEDDLRLFALESLRGSVRFTGALEVLKSAIHRHGSANVCVAGHSLGAGFALQVGRALAKDGTFVECHLFNPPSVSLGTGLRKIQEKASSVLKRYISRSRGGGGSGSSSSSNVSPGPGEELQAAARDGVGEEEMSREVKRWVPNLYVNSCDYICCFYADRSGVATVTEEKRSGVHSKLYVIAKGPSKFLEAHGLQQWWSDDSELHLAVHDSKLMYRHLKSLYVEQ

SEQ ID NO: 1605 - DNA, 1050 bp, Zea mays subsp. mays
  misc_feature (1)..(1050): Ceres Seq. ID no. 12411097
  misc_feature: MA Experiment ID: 20000535 Result: Down-regulated in Transcription
  misc_feature: MA Experiment 20000535 PARAMETER Experiment Name: Zm_Hybrid_Seed_Dev_P Parameter: DAP Value: 30 vs. 12
  misc_feature: MA Experiment 20000535 PARAMETER Experiment Name: Zm_Hybrid_Seed_Dev_P Parameter: Organism Value: Zea mays
  misc_feature: MA Experiment 20000535 PARAMETER Experiment Name: Zm_Hybrid_Seed_Dev_P Parameter: Plant Line Value: 35A19
  misc_feature: MA Experiment 20000535 PARAMETER Experiment Name: Zm_Hybrid_Seed_Dev_P Parameter: Tissue Value: Embryo vs. Unfert Floret
ccgtggttcaactcctaccactaccacagcaccaacgacggaccaggcagcagagaaaaagcagaccagacgagacctctcgcgttccgtcctcctcccccctgcccctgctgccgttccccttcttcctcagttctcccgcccgctgctgccctccgtccgcgtccagatcccgccaccaaccgatccggcgccctccagcatggcgggggcgggggcgaaggcggcgggagccctggctctggcgctcgtgctcgcgctcgcgggggccaactccgagggcgacgcgctctcggcgctgcgccggagcctcagggaccccggcggcgttctgcagagctgggaccccacgctcgtcaacccctgcacctggttccacgtcacctgcgaccgcgacaaccgcgtcacccgcctagatcttggtaatttgaacttatctggtcatctggtgcctgagcttgggaaactggagcatcttcagtatctggaactttataagaataacattcaaggaacagtcccttctgagcttggcaacttgaagaatctaataagcttcgacttgtacaagaacaacatttcggggacaatacctcctgcccttggaaagttgaagtcccttgtattcttgcgtctcaatggcaatcatttgactgggcccatcccaagggaactcgctggaatatctagtctcaaagttgttgatgtttcaagtaatgatttgtgcgggacgattcccacgtctggaccatttgaacatattcctctgagcaactttgagaagaacccgcgcttggaaggtccagagctacaaggcctggccatatacgacaccaactgctagaggcaccacgaagataagaactgctagaaagtaacgagcgaacaaggttacgagaaattgggcgatatagatttactaggtctggatctgtaatcctccctgcatagctcttattcgtaactcgctgcctgcacgaaagttggtgtgtgtttttagcagaatgctttctgtccgtgaaagtaaacttgaactgcttattacgactg

SEQ ID NO: 1606 - protein, 280 aa, Zea mays subsp. mays
  peptide (1)..(280): Ceres Seq. ID no. 12411098
  misc_feature (66)..(268): Homolog of NCBI NO: 13897310 NR Description: SERK2 protein [Zea mays]
  misc_feature (70)..(222): Homolog of NCBI NO: 34909134 NR Description: putative leucine-rich repeat protein
  misc_feature (75)..(280): Homolog of NCBI NO: 34896972 NR Description: putative leucine-rich repeat protein
  misc_feature (76)..(280): Homolog of NCBI NO: 34146800 NR Description: At3g43740 [Arabidopsis thaliana]
  misc_feature (76)..(280): Homolog of NCBI NO: 15242153 NR Description: leucine-rich repeat protein
  misc_feature (74)..(280): Homolog of NCBI NO: 7489030 NR Description: leucine-rich repeat protein LRP - tomato
  misc_feature (84)..(280): Homolog of NCBI NO: 30385250 NR Description: leucine-rich repeat protein [x Citrofortunella
  misc_feature (68)..(280): Homolog of NCBI NO: 34903344 NR Description: unnamed protein product [Oryza sativa (japonica
  misc_feature (70)..(280): Homolog of NCBI NO: 27497122 NR Description: floral organ regulator 1 [Oryza sativa (japonica
  misc_feature (70)..(280): Homolog of NCBI NO: 29468120 NR Description: leucine-rich repeat protein [Oryza sativa]
RGSTPTTTTAPTTDQAAEKKQTRRDLSRSVLLPPAPAAVPLLPQFSRPLLPSVRVQIPPPTDPAPSSMAGAGAKAAGALALALVLALAGANSEGDALSALRRSLRDPGGVLQSWDPTLVNPCTWFHVTCDRDNRVTRLDLGNLNLSGHLVPELGKLEHLQYLELYKNNIQGTVPSELGNLKNLISFDLYKNNISGTIPPALGKLKSLVFLRLNGNHLTGPIPRELAGISSLKVVDVSSNDLCGTIPTSGPFEHIPLSNFEKNPRLEGPELQGLAIYDTNC

SEQ ID NO: 1607 - protein, 213 aa, Zea mays subsp. mays
  peptide (1)..(213): Ceres Seq. ID no. 12411099
  misc_feature (17)..(213): Homolog of NCBI NO: 30385250 NR Description: leucine-rich repeat protein [x Citrofortunella
  misc_feature (1)..(213): Homolog of NCBI NO: 34903344 NR Description: unnamed protein product [Oryza sativa (japonica
  misc_feature (3)..(213): Homolog of NCBI NO: 27497122 NR Description: floral organ regulator 1 [Oryza sativa (japonica
  misc_feature (3)..(213): Homolog of NCBI NO: 29468120 NR Description: leucine-rich repeat protein [Oryza sativa]
  misc_feature (1)..(201): Homolog of NCBI NO: 13897310 NR Description: SERK2 protein [Zea mays]
  misc_feature (3)..(155): Homolog of NCBI NO: 34909134 NR Description: putative leucine-rich repeat protein
  misc_feature (8)..(213): Homolog of NCBI NO: 34896972 NR Description: putative leucine-rich repeat protein
  misc_feature (9)..(213): Homolog of NCBI NO: 34146800 NR Description: At3g43740 [Arabidopsis thaliana]
  misc_feature (9)..(213): Homolog of NCBI NO: 15242153 NR Description: leucine-rich repeat protein
  misc_feature (7)..(213): Homolog of NCBI NO: 7489030 NR Description: leucine-rich repeat protein LRP - tomato
MAGAGAKAAGALALALVLALAGANSEGDALSALRRSLRDPGGVLQSWDPTLVNPCTWFHVTCDRDNRVTRLDLGNLNLSGHLVPELGKLEHLQYLELYKNNIQGTVPSELGNLKNLISFDLYKNNISGTIPPALGKLKSLVFLRLNGNHLTGPIPRELAGISSLKVVDVSSNDLCGTIPTSGPFEHIPLSNFEKNPRLEGPELQGLAIYDTNC

SEQ ID NO: 1608 - protein, 141 aa, Zea mays subsp. mays
  peptide (1)..(141): Ceres Seq. ID no. 12411100
PWFNSYHYHSTNDGPGSREKADQTRPLAFRPPPPCPCCRSPSSSVLPPAAALRPRPDPATNRSGALQHGGGGGEGGGSPGSGARARARGGQLRGRRALGAAPEPQGPRRRSAELGPHARQPLHLVPRHLRPRQPRHPPRSW

SEQ ID NO: 1609 - DNA, 878 bp, Zea mays subsp. mays
  misc_feature (1)..(878): Ceres Seq. ID no. 12349908
  misc_feature: MA Experiment ID: 108504 Result: Down-regulated in Transcription
  misc_feature: MA Experiment 108504 PARAMETER Experiment Name: Zm_Drought_P Parameter: Age (day) Value: 8
  misc_feature: MA Experiment 108504 PARAMETER Experiment Name: Zm_Drought_P Parameter: Organism Value: Zea mays
  misc_feature: MA Experiment 108504 PARAMETER Experiment Name: Zm_Drought_P Parameter: Plant Line Value: 35A19
  misc_feature: MA Experiment 108504 PARAMETER Experiment Name: Zm_Drought_P Parameter: Timepoint (hr) Value: 12
  misc_feature: MA Experiment 108504 PARAMETER Experiment Name: Zm_Drought_P Parameter: Tissue Value: Aerial
  misc_feature: MA Experiment 108504 PARAMETER Experiment Name: Zm_Drought_P Parameter: Treatment Value: Drought vs. No Drought
  misc_feature: MA Experiment ID: 108523 Result: Down-regulated in Transcription
  misc_feature: MA Experiment 108523 PARAMETER Experiment Name: Zm_42deg_Heat_P Parameter: Age (day) Value: 8
  misc_feature: MA Experiment 108523 PARAMETER Experiment Name: Zm_42deg_Heat_P Parameter: Organism Value: Zea mays
  misc_feature: MA Experiment 108523 PARAMETER Experiment Name: Zm_42deg_Heat_P Parameter: Plant Line Value: 35A19
  misc_feature: MA Experiment 108523 PARAMETER Experiment Name: Zm_42deg_Heat_P Parameter: Temperature (deg C) Value: 42 vs. 22
  misc_feature: MA Experiment 108523 PARAMETER Experiment Name: Zm_42deg_Heat_P Parameter: Timepoint (hr) Value: 6
  misc_feature: MA Experiment 108523 PARAMETER Experiment Name: Zm_42deg_Heat_P Parameter: Tissue Value: Aerial
  misc_feature: MA Experiment ID: 108529 Result: Down-regulated in Transcription
  misc_feature: MA Experiment 108529 PARAMETER Experiment Name: Zm_Imbibed_Seeds_P Parameter: Age (day) Value: 5 vs. 2
  misc_feature: MA Experiment 108529 PARAMETER Experiment Name: Zm_Imbibed_Seeds_P Parameter: Organism Value: Zea mays
  misc_feature: MA Experiment 108529 PARAMETER Experiment Name: Zm_Imbibed_Seeds_P Parameter: Plant Line Value: 35A19
  misc_feature: MA Experiment 108529 PARAMETER Experiment Name: Zm_Imbibed_Seeds_P Parameter: Tissue Value: Roots vs. Embryo
  misc_feature: MA Experiment ID: 108536 Result: Down-regulated in Transcription
  misc_feature: MA Experiment 108536 PARAMETER Experiment Name: Zm_Meristem_P Parameter: Age (day) Value: 8
  misc_feature: MA Experiment 108536 PARAMETER Experiment Name: Zm_Meristem_P Parameter: Organism Value: Zea mays
  misc_feature: MA Experiment 108536 PARAMETER Experiment Name: Zm_Meristem_P Parameter: Plant Line Value: 35A19
  misc_feature: MA Experiment 108536 PARAMETER Experiment Name: Zm_Meristem_P Parameter: Tissue Value: Shoot Meristem vs. Above Shoot Meristem
  misc_feature: MA Experiment ID: 108543 Result: Up-regulated in Transcription
  misc_feature: MA Experiment ID: 108544 Result: Down-regulated in Transcription
  misc_feature: MA Experiment ID: 108546 Result: Down-regulated in Transcription
  misc_feature: MA Experiment 108546 PARAMETER Experiment Name: Zm_Imbibed_Seeds_P Parameter: Age (day) Value: 3 vs. 2
  misc_feature: MA Experiment 108546 PARAMETER Experiment Name: Zm_Imbibed_Seeds_P Parameter: Organism Value: Zea mays
  misc_feature: MA Experiment 108546 PARAMETER Experiment Name: Zm_Imbibed_Seeds_P Parameter: Plant Line Value: 35A19
  misc_feature: MA Experiment 108546 PARAMETER Experiment Name: Zm_Imbibed_Seeds_P Parameter: Tissue Value: Roots vs. Embryo
  misc_feature: MA Experiment ID: 108559 Result: Down-regulated in Transcription
  misc_feature: MA Experiment 108559 PARAMETER Experiment Name: Zm_5mM_NO_P Parameter: Age (day) Value: 8
  misc_feature: MA Experiment 108559 PARAMETER Experiment Name: Zm_5mM_NO_P Parameter: Organism Value: Zea mays
  misc_feature: MA Experiment 108559 PARAMETER Experiment Name: Zm_5mM_NO_P Parameter: Plant Line Value: 35A19
  misc_feature: MA Experiment 108559 PARAMETER Experiment Name: Zm_5mM_NO_P Parameter: Timepoint (hr) Value: 12
  misc_feature: MA Experiment 108559 PARAMETER Experiment Name: Zm_5mM_NO_P Parameter: Tissue Value: Aerial
  misc_feature: MA Experiment 108559 PARAMETER Experiment Name: Zm_5mM_NO_P Parameter: Treatment Value: 5mM NO vs. No Treatment
  misc_feature: MA Experiment ID: 20000478 Result: Down-regulated in Transcription
  misc_feature: MA Experiment 20000478 PARAMETER Experiment Name: Zm_5mM_SA_P Parameter: Age (day) Value: 11
  misc_feature: MA Experiment 20000478 PARAMETER Experiment Name: Zm_5mM_SA_P Parameter: Organism Value: Zea mays
  misc_feature: MA Experiment 20000478 PARAMETER Experiment Name: Zm_5mM_SA_P Parameter: Plant Line Value: 35A19
  misc_feature: MA Experiment 20000478 PARAMETER Experiment Name: Zm_5mM_SA_P Parameter: Timepoint (hr) Value: 72
  misc_feature: MA Experiment 20000478 PARAMETER Experiment Name: Zm_5mM_SA_P Parameter: Tissue Value: Aerial
  misc_feature: MA Experiment 20000478 PARAMETER Experiment Name: Zm_5mM_SA_P Parameter: Treatment Value: 5mM SA vs. No Treatment
  misc_feature: MA Experiment ID: 20000487 Result: Down-regulated in Transcription
  misc_feature: MA Experiment 20000487 PARAMETER Experiment Name: Zm_50mM_NH4NO3_L_to_H_P Parameter: Organism Value: Zea mays
  misc_feature: MA Experiment 20000487 PARAMETER Experiment Name: Zm_50mM_NH4NO3_L_to_H_P Parameter: Timepoint (hr) Value: 4
  misc_feature: MA Experiment 20000487 PARAMETER Experiment Name: Zm_50mM_NH4NO3_L_to_H_P Parameter: Tissue Value: Leaves
  misc_feature: MA Experiment 20000487 PARAMETER Experiment Name: Zm_50mM_NH4NO3_L_to_H_P Parameter: Treatment Value: 50mM NH4NO3 vs. 100mM Mannitol
  misc_feature: MA Experiment ID: 20000535 Result: Up-regulated in Transcription
  misc_feature: MA Experiment 20000535 PARAMETER Experiment Name: Zm_Hybrid_Seed_Dev_P Parameter: DAP Value: 30 vs. 12
  misc_feature: MA Experiment 20000535 PARAMETER Experiment Name: Zm_Hybrid_Seed_Dev_P Parameter: Organism Value: Zea mays
  misc_feature: MA Experiment 20000535 PARAMETER Experiment Name: Zm_Hybrid_Seed_Dev_P Parameter: Plant Line Value: 35A19
  misc_feature: MA Experiment 20000535 PARAMETER Experiment Name: Zm_Hybrid_Seed_Dev_P Parameter: Tissue Value: Embryo vs. Unfert Floret
  misc_feature: MA Experiment ID: 20000626 Result: Down-regulated in Transcription
  misc_feature: MA Experiment 20000626 PARAMETER Experiment Name: Zm_Herbicide-Treatments_P Parameter: Timepoint (hr) Value: 12
  misc_feature: MA Experiment 20000626 PARAMETER Experiment Name: Zm_Herbicide-Treatments_P Parameter: Tissue Value: Aerial
  misc_feature: MA Experiment 20000626 PARAMETER Experiment Name: Zm_Herbicide-Treatments_P Parameter: Treatment Value: Roundup vs. No Treatment
  misc_feature: MA Experiment ID: 20000632 Result: Down-regulated in Transcription
  misc_feature: MA Experiment 20000632 PARAMETER Experiment Name: Zm_Herbicide-Treatments_P Parameter: Timepoint (hr) Value: 4
  misc_feature: MA Experiment 20000632 PARAMETER Experiment Name: Zm_Herbicide-Treatments_P Parameter: Tissue Value: Aerial
  misc_feature: MA Experiment 20000632 PARAMETER Experiment Name: Zm_Herbicide-Treatments_P Parameter: Treatment Value: Glean vs. No Treatment
acaacaccagaatccgcgaatcacagacgcgcctatctcagcttgctgcactgccctgccatcatatcaatatcatatcgtacgtgagcccggccgagagcgagggagaggcatggctgctccgaagctcgcgacgttggcgctggccgtgctcctggcggcgaccgtggtggctcccccggccgcggtgcgcgcggcgatgtcgtgctccaccgtgtacagcacgctgatgccgtgcctgccgttcgtccagatgggcggggccatgccgccccagccgtgctgcggcggcatccgcagcctgctgcagcaggccaacaacacccccgaccgccgcaccatctgcggctgcctcaagaacgtcgccaacggcgccaacgggagcggcacctacatcagccgcgccgccgcgctgcccagcaagtgcggcgtcgccctgccgtacaagatcagcaccaacgttaactgcaacacgattaattaagtgaggcgtcctgtgcgcgtcccgggcgaggaatgcatgcatggcgctggcggagagtaataaaataatgctactggtattttaagctatatcgaggtgtgcctgtctctagtcatttatggtgtttaggaatcgtctacacagttcgtaacggtgtatcgtggtcggatgcatgttgccgcgagcagagtacgtaggcatgaaccgacgtgtgcgcttctgtctgtgtactctctctatgttgtaatgtgtgggtgctttgatccagatgtattcgctcgtgagtcgtggaagtagatcgtttcagtatcattaccgtgtgttctttcttaattttacatgcgattctgaaaatgaacatacacgaagctggactggtccagtatacgttgcc

SEQ ID NO: 1610 - protein, 160 aa, Zea mays subsp. mays
  peptide (1)..(160): Ceres Seq. ID no. 12349909
  misc_feature (69)..(156): Pfam Name: Protease inhibitor/seed storage/LTP family Pfam Description: Protease inhibitor/seed storage/LTP family
  misc_feature (38)..(160): Homolog of NCBI NO: 2497747 NR Description: NONSPECIFIC LIPID-TRANSFER PROTEIN 3 PRECURSOR
  misc_feature (38)..(159): Homolog of NCBI NO: 14423814 NR Description: Nonspecific lipid-transfer protein precursor
  misc_feature (44)..(160): Homolog of NCBI NO: 2506826 NR Description: Nonspecific lipid-transfer protein 1 precursor
  misc_feature (50)..(159): Homolog of NCBI NO: 15224899 NR Description: putative nonspecific lipid-transfer protein
  misc_feature (44)..(160): Homolog of NCBI NO: 7438277 NR Description: lipid transfer protein LPT IV - rice
  misc_feature (38)..(160): Homolog of NCBI NO: 7438275 NR Description: lipid transfer protein LPT II - rice
  misc_feature (38)..(160): Homolog of NCBI NO: 2497746 NR Description: NONSPECIFIC LIPID-TRANSFER PROTEIN 2 PRECURSOR
  misc_feature (42)..(159): Homolog of NCBI NO: 6782436 NR Description: lipid-transfer protein [Nicotiana glauca]
  misc_feature (38)..(160): Homolog of NCBI NO: 6492243 NR Description: lipid transfer protein [Hordeum vulgare]
  misc_feature (40)..(157): Homolog of NCBI NO: 34907830 NR Description: putative lipid transfer protein
QHQNPRITDAPISACCTALPSYQYHIVREPGRERGRGMAAPKLATLALAVLLAATVVAPPAAVRAAMSCSTVYSTLMPCLPFVQMGGAMPPQPCCGGIRSLLQQANNTPDRRTICGCLKNVANGANGSGTYISRAAALPSKCGVALPYKISTNVNCNTIN

SEQ ID NO: 1611 - protein, 123 aa, Zea mays subsp. mays
  peptide (1)..(123): Ceres Seq. ID no. 12349910
  misc_feature (32)..(119): Pfam Name: Protease inhibitor/seed storage/LTP family Pfam Description: Protease inhibitor/seed storage/LTP family
  misc_feature (1)..(123): Homolog of NCBI NO: 2497747 NR Description: NONSPECIFIC LIPID-TRANSFER PROTEIN 3 PRECURSOR
  misc_feature (1)..(122): Homolog of NCBI NO: 14423814 NR Description: Nonspecific lipid-transfer protein precursor
  misc_feature (7)..(123): Homolog of NCBI NO: 2506826 NR Description: Nonspecific lipid-transfer protein 1 precursor
  misc_feature (13)..(122): Homolog of NCBI NO: 15224899 NR Description: putative nonspecific lipid-transfer protein
  misc_feature (7)..(123): Homolog of NCBI NO: 7438277 NR Description: lipid transfer protein LPT IV - rice
  misc_feature (1)..(123): Homolog of NCBI NO: 7438275 NR Description: lipid transfer protein LPT II - rice
  misc_feature (1)..(123): Homolog of NCBI NO: 2497746 NR Description: NONSPECIFIC LIPID-TRANSFER PROTEIN 2 PRECURSOR
  misc_feature (5)..(122): Homolog of NCBI NO: 6782436 NR Description: lipid-transfer protein [Nicotiana glauca]
  misc_feature (1)..(123): Homolog of NCBI NO: 6492243 NR Description: lipid transfer protein [Hordeum vulgare]
  misc_feature (3)..(120): Homolog of NCBI NO: 34907830 NR Description: putative lipid transfer protein
MAAPKLATLALAVLLAATVVAPPAAVRAAMSCSTVYSTLMPCLPFVQMGGAMPPQPCCGGIRSLLQQANNTPDRRTICGCLKNVANGANGSGTYISRAAALPSKCGVALPYKISTNVNCNTIN

SEQ ID NO: 1612 - protein, 94 aa, Zea mays subsp. mays
  peptide (1)..(94): Ceres Seq. ID no. 12349911
  misc_feature (3)..(90): Pfam Name: Protease inhibitor/seed storage/LTP family Pfam Description: Protease inhibitor/seed storage/LTP family
  misc_feature (1)..(94): Homolog of NCBI NO: 2497747 NR Description: NONSPECIFIC LIPID-TRANSFER PROTEIN 3 PRECURSOR
  misc_feature (1)..(93): Homolog of NCBI NO: 14423814 NR Description: Nonspecific lipid-transfer protein precursor
  misc_feature (1)..(94): Homolog of NCBI NO: 2506826 NR Description: Nonspecific lipid-transfer protein 1 precursor
  misc_feature (1)..(93): Homolog of NCBI NO: 15224899 NR Description: putative nonspecific lipid-transfer protein
  misc_feature (1)..(94): Homolog of NCBI NO: 7438277 NR Description: lipid transfer protein LPT IV - rice
  misc_feature (1)..(94): Homolog of NCBI NO: 7438275 NR Description: lipid transfer protein LPT II - rice
  misc_feature (1)..(94): Homolog of NCBI NO: 2497746 NR Description: NONSPECIFIC LIPID-TRANSFER PROTEIN 2 PRECURSOR
  misc_feature (1)..(93): Homolog of NCBI NO: 6782436 NR Description: lipid-transfer protein [Nicotiana glauca]
  misc_feature (1)..(94): Homolog of NCBI NO: 6492243 NR Description: lipid transfer protein [Hordeum vulgare]
  misc_feature (1)..(91): Homolog of NCBI NO: 34907830 NR Description: putative lipid transfer protein
MSCSTVYSTLMPCLPFVQMGGAMPPQPCCGGIRSLLQQANNTPDRRTICGCLKNVANGANGSGTYISRAAALPSKCGVALPYKISTNVNCNTIN

SEQ ID NO: 1613 - DNA, 1656 bp, Zea mays subsp. mays
  misc_feature (1)..(1656): Ceres Seq. ID no. 12345858
  misc_feature: MA Experiment ID: 108522 Result: Down-regulated in Transcription
  misc_feature: MA Experiment 108522 PARAMETER Experiment Name: Zm_42deg_Heat_P Parameter: Age (day) Value: 8
  misc_feature: MA Experiment 108522 PARAMETER Experiment Name: Zm_42deg_Heat_P Parameter: Organism Value: Zea mays
  misc_feature: MA Experiment 108522 PARAMETER Experiment Name: Zm_42deg_Heat_P Parameter: Plant Line Value: 35A19
  misc_feature: MA Experiment 108522 PARAMETER Experiment Name: Zm_42deg_Heat_P Parameter: Temperature (deg C) Value: 42 vs. 22
  misc_feature: MA Experiment 108522 PARAMETER Experiment Name: Zm_42deg_Heat_P Parameter: Timepoint (hr) Value: 1
  misc_feature: MA Experiment 108522 PARAMETER Experiment Name: Zm_42deg_Heat_P Parameter: Tissue Value: Aerial
  misc_feature: MA Experiment ID: 108528 Result: Down-regulated in Transcription
  misc_feature: MA Experiment 108528 PARAMETER Experiment Name: Zm_Imbibed_Seeds_P Parameter: Age (day) Value: 5 vs. 2
  misc_feature: MA Experiment 108528 PARAMETER Experiment Name: Zm_Imbibed_Seeds_P Parameter: Organism Value: Zea mays
  misc_feature: MA Experiment 108528 PARAMETER Experiment Name: Zm_Imbibed_Seeds_P Parameter: Plant Line Value: 35A19
  misc_feature: MA Experiment 108528 PARAMETER Experiment Name: Zm_Imbibed_Seeds_P Parameter: Tissue Value: Aerial vs. Embryo
  misc_feature: MA Experiment ID: 108530 Result: Down-regulated in Transcription
  misc_feature: MA Experiment 108530 PARAMETER Experiment Name: Zm_Imbibed_Seeds_P Parameter: Age (day) Value: 6 vs. 2
  misc_feature: MA Experiment 108530 PARAMETER Experiment Name: Zm_Imbibed_Seeds_P Parameter: Organism Value: Zea mays
  misc_feature: MA Experiment 108530 PARAMETER Experiment Name: Zm_Imbibed_Seeds_P Parameter: Plant Line Value: 35A19
  misc_feature: MA Experiment 108530 PARAMETER Experiment Name: Zm_Imbibed_Seeds_P Parameter: Tissue Value: Aerial vs. Embryo
  misc_feature: MA Experiment ID: 108535 Result: Up-regulated in Transcription
  misc_feature: MA Experiment 108535 PARAMETER Experiment Name: Zm_Meristem_P Parameter: Age (day) Value: 8
  misc_feature: MA Experiment 108535 PARAMETER Experiment Name: Zm_Meristem_P Parameter: Organism Value: Zea mays
  misc_feature: MA Experiment 108535 PARAMETER Experiment Name: Zm_Meristem_P Parameter: Plant Line Value: 35A19
  misc_feature: MA Experiment 108535 PARAMETER Experiment Name: Zm_Meristem_P Parameter: Tissue Value: Root Meristem vs. Above Root Meristem
  misc_feature: MA Experiment ID: 108689 Result: Down-regulated in Transcription
  misc_feature: MA Experiment 108689 PARAMETER Experiment Name: Zm_Drought_Roots_P Parameter: Age (day) Value: 9
  misc_feature: MA Experiment 108689 PARAMETER Experiment Name: Zm_Drought_Roots_P Parameter: Organism Value: Zea mays
  misc_feature: MA Experiment 108689 PARAMETER Experiment Name: Zm_Drought_Roots_P Parameter: Plant Line Value: 35A19
  misc_feature: MA Experiment 108689 PARAMETER Experiment Name: Zm_Drought_Roots_P Parameter: Timepoint (hr) Value: 24
  misc_feature: MA Experiment 108689 PARAMETER Experiment Name: Zm_Drought_Roots_P Parameter: Tissue Value: Roots
  misc_feature: MA Experiment 108689 PARAMETER Experiment Name: Zm_Drought_Roots_P Parameter: Treatment Value: Drought vs. No Drought
  misc_feature: MA Experiment ID: 20000487 Result: Up-regulated in Transcription
  misc_feature: MA Experiment 20000487 PARAMETER Experiment Name: Zm_50mM_NH4NO3_L_to_H_P Parameter: Organism Value: Zea mays
  misc_feature: MA Experiment 20000487 PARAMETER Experiment Name: Zm_50mM_NH4NO3_L_to_H_P Parameter: Timepoint (hr) Value: 4
  misc_feature: MA Experiment 20000487 PARAMETER Experiment Name: Zm_50mM_NH4NO3_L_to_H_P Parameter: Tissue Value: Leaves
  misc_feature: MA Experiment 20000487 PARAMETER Experiment Name: Zm_50mM_NH4NO3_L_to_H_P Parameter: Treatment Value: 50mM NH4NO3 vs. 100mM Mannitol
  misc_feature: MA Experiment ID: 20000488 Result: Up-regulated in Transcription
  misc_feature: MA Experiment 20000488 PARAMETER Experiment Name: Zm_50mM_NH4NO3_L_to_H_P Parameter: Organism Value: Zea mays
  misc_feature: MA Experiment 20000488 PARAMETER Experiment Name: Zm_50mM_NH4NO3_L_to_H_P Parameter: Timepoint (hr) Value: 8
  misc_feature: MA Experiment 20000488 PARAMETER Experiment Name: Zm_50mM_NH4NO3_L_to_H_P Parameter: Tissue Value: Leaves
  misc_feature: MA Experiment 20000488 PARAMETER Experiment Name: Zm_50mM_NH4NO3_L_to_H_P Parameter: Treatment Value: 50mM NH4NO3 vs. 100mM Mannitol
  misc_feature: MA Experiment ID: 20000632 Result: Down-regulated in Transcription
  misc_feature: MA Experiment 20000632 PARAMETER Experiment Name: Zm_Herbicide-Treatments_P Parameter: Timepoint (hr) Value: 4
  misc_feature: MA Experiment 20000632 PARAMETER Experiment Name: Zm_Herbicide-Treatments_P Parameter: Tissue Value: Aerial
  misc_feature: MA Experiment 20000632 PARAMETER Experiment Name: Zm_Herbicide-Treatments_P Parameter: Treatment Value: Glean vs. No Treatment
  misc_feature: MA Experiment ID: 20001606 Result: Up-regulated in Transcription
  misc_feature: MA Experiment 20001606 PARAMETER Experiment Name: Zm_50ppm_KNO3_L-to-H_P Parameter: Age (day) Value: 19
  misc_feature: MA Experiment 20001606 PARAMETER Experiment Name: Zm_50ppm_KNO3_L-to-H_P Parameter: Organism Value: Zea mays
  misc_feature: MA Experiment 20001606 PARAMETER Experiment Name: Zm_50ppm_KNO3_L-to-H_P Parameter: Plant Line Value: 35A19
  misc_feature: MA Experiment 20001606 PARAMETER Experiment Name: Zm_50ppm_KNO3_L-to-H_P Parameter: Timepoint (hr) Value: 8
  misc_feature: MA Experiment 20001606 PARAMETER Experiment Name: Zm_50ppm_KNO3_L-to-H_P Parameter: Tissue Value: Shoots
  misc_feature: MA Experiment 20001606 PARAMETER Experiment Name: Zm_50ppm_KNO3_L-to-H_P Parameter: Treatment Value: 50ppm KNO3 vs. 50ppm KCl
atttcctacttcttccagactaaaaccccaggcctcgcgagtcgccgccgaccgccgcaaccacgcgctacgcccccgatggctcacctccagctcctcttctcatactcgcggcggaacccgcagcgccaccgcctgctctcactcttccacttctcctccgacgccaagtccagctccgcctcgccgccgcctcctcccatcaagcccgtctcctacgctccgaagccgcagcagcaggccccgcccgaggagtctgccgccccgacaaccccggacgttgcccctagggaccaatccccactgccacgacggcctcagcagccgatgccgccgcgggagtggacgcggcaggatatgcggtacgtgaaggacgcggcgcccgcgatctcgcccgtctcgtacccgtccagggtcgcgccgctgccggaggaccgtccggtcggcggcgaggtggaggaggtgcaggacggggggctgcagggggagtcggagcggatccagatgaacgcggtgcgtcccaccaggagcgtctttgggatgcacgaggaggataggctgccgtacccgacggtcatacccgtcgtcaagcggccgcagaaggtcgccattgatttaatcgacgccatccgcctagttaagactagtgcaaacgagaagaagcggaattttgttgaaactgttgaagctcatgtgatattaggtgttgatcctcgtcgtggtgaccagatggttcgtggcgccttaacattgcctcatggcactggcaagactgttagggtagcagtatttgctgaaggtcctggagcagacgaagctagagctgccggagcagatgttgttggtggtgatgagttgattgaggagatccgcacaggaggaggcaaactaagctttgacaagtgcatagcaaccccaatgttcatgccccgattgtcaaaggttgctaggatattgggtccacgtggtttgatgcctaatcctaagctaggatctgtgacgaatgatgtttctggtgcggtcaaagcggcaaaatcaggacgtgttgatttcaaaatagataaaactgctatagtgcatgttggccttgggaaggtaaactttactgaggagagtttacgtgaaaatattggtgcttttgtgcatgcacttttacttgctaagccagtgggcttaaagaaaacttcaaaatatgtcggatatgtgaagaagttcacactgagtagcacaatgggacccggacttcctgttaccataccatcactatctgtggccgccgatcactataacaaggttcaagtcagctaagtcaatacagtagaacatcgaatgtagctttctttctccaatagccgcggcctgcagatggcggcttgtttggcagtggagcttaaccattcagcaaggttgagatttgggtggcttgctgttttgttattggggataataccttttgtggacaaggatcattcaacaaacatcataacctataactttattttatccttgtcactgcaattttgagattgcgttgctggtctacctatgttatccagagtcttgtcatttgttgcacgaaatgtaatattgaaatacggtagttttagggcattacttatgataataagaaatgaagtattaaccatgattcgattc

SEQ ID NO: 1614 - protein, 435 aa, Zea mays subsp. mays
  peptide (1)..(435): Ceres Seq. ID no. 12345859
  misc_feature (200)..(414): Pfam Name: Ribosomal protein L1p/L10e family Pfam Description: Ribosomal protein L1p/L10e family
  misc_feature (210)..(423): Homolog of NCBI NO: 23012511 NR Description: hypothetical protein [Magnetospirillum
  misc_feature (199)..(425): Homolog of NCBI NO: 13470539 NR Description: 50S ribosomal protein L1 [Mesorhizobium loti]
  misc_feature (206)..(417): Homolog of NCBI NO: 27380525 NR Description: 50S ribosomal protein L1 [Bradyrhizobium
  misc_feature (206)..(426): Homolog of NCBI NO: 9957210 NR Description: L1 [EDTA-degrading bacterium BNC1]
  misc_feature (201)..(421): Homolog of NCBI NO: 22957081 NR Description: hypothetical protein [Rhodobacter sphaeroides]
  misc_feature (199)..(426): Homolog of NCBI NO: 17935849 NR Description: 50S ribosomal protein L1
  misc_feature (199)..(426): Homolog of NCBI NO: 15889253 NR Description: AGR_C_3573p [Agrobacterium tumefaciens]
  misc_feature (205)..(426): Homolog of NCBI NO: 22966133 NR Description: hypothetical protein [Rhodospirillum rubrum]
  misc_feature (199)..(425): Homolog of NCBI NO: 15965098 NR Description: PROBABLE 50S RIBOSOMAL PROTEIN L1 [Sinorhizobium
  misc_feature (27)..(434): Homolog of NCBI NO: 30689119 NR Description: ribosomal protein L1p family [Arabidopsis
ISYFFQTKTPGLASRRRPPQPRATPPMAHLQLLFSYSRRNPQRHRLLSLFHFSSDAKSSSASPPPPPIKPVSYAPKPQQQAPPEESAAPTTPDVAPRDQSPLPRRPQQPMPPREWTRQDMRYVKDAAPAISPVSYPSRVAPLPEDRPVGGEVEEVQDGGLQGESERIQMNAVRPTRSVFGMHEEDRLPYPTVIPVVKRPQKVAIDLIDAIRLVKTSANEKKRNFVETVEAHVILGVDPRRGDQMVRGALTLPHGTGKTVRVAVFAEGPGADEARAAGADVVGGDELIEEIRTGGGKLSFDKCIATPMFMPRLSKVARILGPRGLMPNPKLGSVTNDVSGAVKAAKSGRVDFKIDKTAIVHVGLGKVNFTEESLRENIGAFVHALLLAKPVGLKKTSKYVGYVKKFTLSSTMGPGLPVTIPSLSVAADHYNKVQVS

SEQ ID NO: 1615 - protein, 409 aa, Zea mays subsp. mays
  peptide (1)..(409): Ceres Seq. ID no. 12345860
  misc_feature (174)..(388): Pfam Name: Ribosomal protein L1p/L10e family Pfam Description: Ribosomal protein L1p/L10e family
  misc_feature (184)..(397): Homolog of NCBI NO: 23012511 NR Description: hypothetical protein [Magnetospirillum
  misc_feature (173)..(399): Homolog of NCBI NO: 13470539 NR Description: 50S ribosomal protein L1 [Mesorhizobium loti]
  misc_feature (180)..(391): Homolog of NCBI NO: 27380525 NR Description: 50S ribosomal protein L1 [Bradyrhizobium
  misc_feature (180)..(400): Homolog of NCBI NO: 9957210 NR Description: L1 [EDTA-degrading bacterium BNC1]
  misc_feature (175)..(395): Homolog of NCBI NO: 22957081 NR Description: hypothetical protein [Rhodobacter sphaeroides]
  misc_feature (173)..(400): Homolog of NCBI NO: 17935849 NR Description: 50S ribosomal protein L1
  misc_feature (173)..(400): Homolog of NCBI NO: 15889253 NR Description: AGR_C_3573p [Agrobacterium tumefaciens]
  misc_feature (179)..(400): Homolog of NCBI NO: 22966133 NR Description: hypothetical protein [Rhodospirillum rubrum]
  misc_feature (173)..(399): Homolog of NCBI NO: 15965098 NR Description: PROBABLE 50S RIBOSOMAL PROTEIN L1 [Sinorhizobium
  misc_feature (1)..(408): Homolog of NCBI NO: 30689119 NR Description: ribosomal protein L1p family [Arabidopsis
MAHLQLLFSYSRRNPQRHRLLSLFHFSSDAKSSSASPPPPPIKPVSYAPKPQQQAPPEESAAPTTPDVAPRDQSPLPRRPQQPMPPREWTRQDMRYVKDAAPAISPVSYPSRVAPLPEDRPVGGEVEEVQDGGLQGESERIQMNAVRPTRSVFGMHEEDRLPYPTVIPVVKRPQKVAIDLIDAIRLVKTSANEKKRNFVETVEAHVILGVDPRRGDQMVRGALTLPHGTGKTVRVAVFAEGPGADEARAAGADVVGGDELIEEIRTGGGKLSFDKCIATPMFMPRLSKVARILGPRGLMPNPKLGSVTNDVSGAVKAAKSGRVDFKIDKTAIVHVGLGKVNFTEESLRENIGAFVHALLLAKPVGLKKTSKYVGYVKKFTLSSTMGPGLPVTIPSLSVAADHYNKVQVS

SEQ ID NO: 1616 - protein, 326 aa, Zea mays subsp. mays
  peptide (1)..(326): Ceres Seq. ID no. 12345861
  misc_feature (91)..(305): Pfam Name: Ribosomal protein L1p/L10e family Pfam Description: Ribosomal protein L1p/L10e family
  misc_feature (101)..(314): Homolog of NCBI NO: 23012511 NR Description: hypothetical protein [Magnetospirillum
  misc_feature (90)..(316): Homolog of NCBI NO: 13470539 NR Description: 50S ribosomal protein L1 [Mesorhizobium loti]
  misc_feature (97)..(308): Homolog of NCBI NO: 27380525 NR Description: 50S ribosomal protein L1 [Bradyrhizobium
  misc_feature (97)..(317): Homolog of NCBI NO: 9957210 NR Description: L1 [EDTA-degrading bacterium BNC1]
  misc_feature (92)..(312): Homolog of NCBI NO: 22957081 NR Description: hypothetical protein [Rhodobacter sphaeroides]
  misc_feature (90)..(317): Homolog of NCBI NO: 17935849 NR Description: 50S ribosomal protein L1
  misc_feature (90)..(317): Homolog of NCBI NO: 15889253 NR Description: AGR_C_3573p [Agrobacterium tumefaciens]
  misc_feature (96)..(317): Homolog of NCBI NO: 22966133 NR Description: hypothetical protein [Rhodospirillum rubrum]
  misc_feature (90)..(316): Homolog of NCBI NO: 15965098 NR Description: PROBABLE 50S RIBOSOMAL PROTEIN L1 [Sinorhizobium
  misc_feature (1)..(325): Homolog of NCBI NO: 30689119 NR Description: ribosomal protein L1p family [Arabidopsis
MPPREWTRQDMRYVKDAAPAISPVSYPSRVAPLPEDRPVGGEVEEVQDGGLQGESERIQMNAVRPTRSVFGMHEEDRLPYPTVIPVVKRPQKVAIDLIDAIRLVKTSANEKKRNFVETVEAHVILGVDPRRGDQMVRGALTLPHGTGKTVRVAVFAEGPGADEARAAGADVVGGDELIEEIRTGGGKLSFDKCIATPMFMPRLSKVARILGPRGLMPNPKLGSVTNDVSGAVKAAKSGRVDFKIDKTAIVHVGLGKVNFTEESLRENIGAFVHALLLAKPVGLKKTSKYVGYVKKFTLSSTMGPGLPVTIPSLSVAADHYNKVQVS

SEQ ID NO: 1617 - DNA, 2064 bp, Zea mays subsp. mays
  misc_feature (1)..(2064): Ceres Seq. ID no. 12411078
  misc_feature: MA Experiment ID: 20000492 Result: Down-regulated in Transcription
  misc_feature: MA Experiment 20000492 PARAMETER Experiment Name: Zm_Hybrid_Seed_Dev_P Parameter: DAP Value: 12
  misc_feature: MA Experiment 20000492 PARAMETER Experiment Name: Zm_Hybrid_Seed_Dev_P Parameter: Organism Value: Zea mays
  misc_feature: MA Experiment 20000492 PARAMETER Experiment Name: Zm_Hybrid_Seed_Dev_P Parameter: Plant Line Value: 35A19
  misc_feature: MA Experiment 20000492 PARAMETER Experiment Name: Zm_Hybrid_Seed_Dev_P Parameter: Tissue Value: Fert Kernel vs. Unfert Floret
  misc_feature: MA Experiment ID: 20000535 Result: Down-regulated in Transcription
  misc_feature: MA Experiment 20000535 PARAMETER Experiment Name: Zm_Hybrid_Seed_Dev_P Parameter: DAP Value: 30 vs. 12
  misc_feature: MA Experiment 20000535 PARAMETER Experiment Name: Zm_Hybrid_Seed_Dev_P Parameter: Organism Value: Zea mays
  misc_feature: MA Experiment 20000535 PARAMETER Experiment Name: Zm_Hybrid_Seed_Dev_P Parameter: Plant Line Value: 35A19
  misc_feature: MA Experiment 20000535 PARAMETER Experiment Name: Zm_Hybrid_Seed_Dev_P Parameter: Tissue Value: Embryo vs. Unfert Floret
aagcttttcccattctcgttgatacgagcgagagtcgagacaggtcaaaaggagattgagtaaggaaaagaaaaaaaaaatcgctgctcccgaggcacggcggcggcgagcgtgcgacacctccggcggctccacagatccggcgaccgatctccggccgcctgcggatgctccggggccggcgcggtaaggcccaggggtccacgctcgtagccagatctcggggcgctgctgggaagtggggttcgttccgtccctgcctccctggtggtggggatggggtggtccgcggggctgtggtggctcgtggccgcgctgtgggtggtggcggcggcggcggcggcggcggagggtgaggtcgtggtcgggtcagcgccgaggcggcacgcgtacgcgtcgatgatgtacatgggcactccacgggactacgagttctacgtggccacgcgcgtcatgatgcagtccctgcgccggctcagcgccgacgccgaccgcgtcgtgatcgcctccctcgacgtcccaccgctctgggtccaggcgctatgatggtgtaaaggtggtctctgtggagaatttgaaaaatccatacgagagacaagagaatttcaacatgcgattcaagttgaccttaaacaagctgtatgcatggagcttggtttcgtatgagcgagttgttatgcttgactccgacaacattttcctccaaaatactgattagttatttcagtgtggtcagttctgtgctgtcttcatcaatccctgtatcttccatacaggtctctttgtgcttcagccctcaatgaacgtttttaagaatatgctacatgagctatcggttggacgtgaaaacccagatggtgcagaccaaggctttcttgctagttatttcccggacttacttgatcagccaatgttccatccaccagctaatggtacaaaacttcagggtacttaccgcctccctctaggctaccagatggatgcgtcttactattatctgaagcttcgctggagtattccatgtggaccgaacagtgtgattacatttccaagtgctccatggtttaagccatggtactggtggtcttggccagttttacctttggggctctcttggcatgaacaacgtcgtgaaaacctagggtattcatctgagataccagtagtattaattcaggctgtactgtacattggagtcatagcagtgacccgactggcgaagcctaccttgaacaagatgtgctacaacagaagaatggagaaaaacactatgttcttgctctctgttctcagagtcgtggctgcttggtccatacttgctgcctacaccatacccttcttcatcatcccaaggaccgtgcatccactgcttggctggcctctctacttgctcggttcttttgctctttcttccattgttatcaacattttcctcttccacccgatcaccgtcctcacaacatggtttggattcataggcgcactcctggtgatggccttcccttggtatctaaatggttttgtcagggccttggcagtgtttgcgtatgctttctgctgcgcgcccttgatctgggcatctttgggtcaagacaatgagctccttgcaggtcctgattgagagggatgcattcaggctcggagaacctagccagaatgcggagttcacaaagctatactgaggtgggcatggcagatacatgtgatttatcactttcgttgctcagtttgaacagttaatctgcattcacattgtcaaattctgatggccaattcaaatgtacaactaaacctgcagcctgggagcaagagtggttgtacacaatggaactatctggaaacctctagaatccatgaatgttgttatcttagacatgtaggtgacatatacagtggaaaaggggggagggctgtagaattggtgctgaactgaagaggaactgactggggtcagttgttagttattttgatttattgttcctctgaaaagccaaggcatttttggctttgtttgtaattgatatgatatgttccttcacaaatgaagaaaagggttgaaagtgc

SEQ ID NO: 1618 - protein, 273 aa, Zea mays subsp. mays
  peptide (1)..(273): Ceres Seq. ID no. 12411079
  misc_feature (1)..(150): Homolog of NCBI NO: 7507569 NR Description: hypothetical protein T10B10.8 - Caenorhabditis
  misc_feature (1)..(211): Homolog of NCBI NO: 39596633 NR Description: Hypothetical protein CBG07620 [Caenorhabditis
  misc_feature (116)..(261): Homolog of NCBI NO: 15235811 NR Description: glucosyltransferase like protein; protein id:
  misc_feature (1)..(71): Homolog of NCBI NO: 15235811 NR Description: glucosyltransferase like protein; protein id:
  misc_feature (116)..(261): Homolog of NCBI NO: 25408409 NR Description: probable glycogenin [imported] - Arabidopsis
  misc_feature (1)..(65): Homolog of NCBI NO: 25408409 NR Description: probable glycogenin [imported] - Arabidopsis
  misc_feature (1)..(261): Homolog of NCBI NO: 18403930 NR Description: putative glycogenin; protein id: At2g35710.1
  misc_feature (1)..(261): Homolog of NCBI NO: 17380986 NR Description: unknown protein [Arabidopsis thaliana]
  misc_feature (1)..(262): Homolog of NCBI NO: 37536746 NR Description: hypothetical protein [Oryza sativa (japonica
  misc_feature (1)..(262): Homolog of NCBI NO: 38345479 NR Description: OSJNBa0010H02.17 [Oryza sativa (japonica
MNVFKNMLHELSVGRENPDGADQGFLASYFPDLLDQPMFHPPANGTKLQGTYRLPLGYQMDASYYYLKLRWSIPCGPNSVITFPSAPWFKPWYWWSWPVLPLGLSWHEQRRENLGYSSEIPVVLIQAVLYIGVIAVTRLAKPTLNKMCYNRRMEKNTMFLLSVLRVVAAWSILAAYTIPFFIIPRTVHPLLGWPLYLLGSFALSSIVINIFLFHPITVLTTWFGFIGALLVMAFPWYLNGFVRALAVFAYAFCCAPLIWASLGQDNELLAGPD

SEQ ID NO: 1619 - protein, 267 aa, Zea mays subsp. mays
  peptide (1)..(267): Ceres Seq. ID no. 12411080
  misc_feature (110)..(255): Homolog of NCBI NO: 25408409 NR Description: probable glycogenin [imported] - Arabidopsis
  misc_feature (1)..(59): Homolog of NCBI NO: 25408409 NR Description: probable glycogenin [imported] - Arabidopsis
  misc_feature (1)..(255): Homolog of NCBI NO: 18403930 NR Description: putative glycogenin; protein id: At2g35710.1
  misc_feature (1)..(255): Homolog of NCBI NO: 17380986 NR Description: unknown protein [Arabidopsis thaliana]
  misc_feature (1)..(256): Homolog of NCBI NO: 37536746 NR Description: hypothetical protein [Oryza sativa (japonica
  misc_feature (1)..(256): Homolog of NCBI NO: 38345479 NR Description: OSJNBa0010H02.17 [Oryza sativa (japonica
  misc_feature (1)..(144): Homolog of NCBI NO: 7507569 NR Description: hypothetical protein T10B10.8 - Caenorhabditis
  misc_feature (1)..(205): Homolog of NCBI NO: 39596633 NR Description: Hypothetical protein CBG07620 [Caenorhabditis
  misc_feature (110)..(255): Homolog of NCBI NO: 15235811 NR Description: glucosyltransferase like protein; protein id:
  misc_feature (1)..(65): Homolog of NCBI NO: 15235811 NR Description: glucosyltransferase like protein; protein id:
MLHELSVGRENPDGADQGFLASYFPDLLDQPMFHPPANGTKLQGTYRLPLGYQMDASYYYLKLRWSIPCGPNSVITFPSAPWFKPWYWWSWPVLPLGLSWHEQRRENLGYSSEIPVVLIQAVLYIGVIAVTRLAKPTLNKMCYNRRMEKNTMFLLSVLRVVAAWSILAAYTIPFFIIPRTVHPLLGWPLYLLGSFALSSIVINIFLFHPITVLTTWFGFIGALLVMAFPWYLNGFVRALAVFAYAFCCAPLIWASLGQDNELLAGPD

SEQ ID NO: 1620 - protein, 236 aa, Zea mays subsp. mays
  peptide (1)..(236): Ceres Seq. ID no. 12411081
  misc_feature (1)..(113): Homolog of NCBI NO: 7507569 NR Description: hypothetical protein T10B10.8 - Caenorhabditis
  misc_feature (1)..(174): Homolog of NCBI NO: 39596633 NR Description: Hypothetical protein CBG07620 [Caenorhabditis
  misc_feature (79)..(224): Homolog of NCBI NO: 15235811 NR Description: glucosyltransferase like protein; protein id:
  misc_feature (1)..(34): Homolog of NCBI NO: 15235811 NR Description: glucosyltransferase like protein; protein id:
  misc_feature (79)..(224): Homolog of NCBI NO: 25408409 NR Description: probable glycogenin [imported] - Arabidopsis
  misc_feature (1)..(28): Homolog of NCBI NO: 25408409 NR Description: probable glycogenin [imported] - Arabidopsis
  misc_feature (1)..(224): Homolog of NCBI NO: 18403930 NR Description: putative glycogenin; protein id: At2g35710.1
  misc_feature (1)..(224): Homolog of NCBI NO: 17380986 NR Description: unknown protein [Arabidopsis thaliana]
  misc_feature (1)..(225): Homolog of NCBI NO: 37536746 NR Description: hypothetical protein [Oryza sativa (japonica
  misc_feature (1)..(225): Homolog of NCBI NO: 38345479 NR Description: OSJNBa0010H02.17 [Oryza sativa (japonica
MFHPPANGTKLQGTYRLPLGYQMDASYYYLKLRWSIPCGPNSVITFPSAPWFKPWYWWSWPVLPLGLSWHEQRRENLGYSSEIPVVLIQAVLYIGVIAVTRLAKPTLNKMCYNRRMEKNTMFLLSVLRVVAAWSILAAYTIPFFIIPRTVHPLLGWPLYLLGSFALSSIVINIFLFHPITVLTTWFGFIGALLVMAFPWYLNGFVRALAVFAYAFCCAPLIWASLGQDNELLAGPD

SEQ ID NO: 1621 - DNA, 649 bp, Zea mays subsp. mays
  misc_feature (1)..(649): Ceres Seq. ID no. 12363035
  misc_feature: MA Experiment ID: 108522 Result: Up-regulated in Transcription
  misc_feature: MA Experiment 108522 PARAMETER Experiment Name: Zm_42deg_Heat_P Parameter: Age (day) Value: 8
  misc_feature: MA Experiment 108522 PARAMETER Experiment Name: Zm_42deg_Heat_P Parameter: Organism Value: Zea mays
  misc_feature: MA Experiment 108522 PARAMETER Experiment Name: Zm_42deg_Heat_P Parameter: Plant Line Value: 35A19
  misc_feature: MA Experiment 108522 PARAMETER Experiment Name: Zm_42deg_Heat_P Parameter: Temperature (deg C) Value: 42 vs. 22
  misc_feature: MA Experiment 108522 PARAMETER Experiment Name: Zm_42deg_Heat_P Parameter: Timepoint (hr) Value: 1
  misc_feature: MA Experiment 108522 PARAMETER Experiment Name: Zm_42deg_Heat_P Parameter: Tissue Value: Aerial
  misc_feature: MA Experiment ID: 108523 Result: Up-regulated in Transcription
  misc_feature: MA Experiment 108523 PARAMETER Experiment Name: Zm_42deg_Heat_P Parameter: Age (day) Value: 8
  misc_feature: MA Experiment 108523 PARAMETER Experiment Name: Zm_42deg_Heat_P Parameter: Organism Value: Zea mays
  misc_feature: MA Experiment 108523 PARAMETER Experiment Name: Zm_42deg_Heat_P Parameter: Plant Line Value: 35A19
  misc_feature: MA Experiment 108523 PARAMETER Experiment Name: Zm_42deg_Heat_P Parameter: Temperature (deg C) Value: 42 vs. 22
  misc_feature: MA Experiment 108523 PARAMETER Experiment Name: Zm_42deg_Heat_P Parameter: Timepoint (hr) Value: 6
  misc_feature: MA Experiment 108523 PARAMETER Experiment Name: Zm_42deg_Heat_P Parameter: Tissue Value: Aerial
  misc_feature: MA Experiment ID: 108535 Result: Up-regulated in Transcription
  misc_feature: MA Experiment 108535 PARAMETER Experiment Name: Zm_Meristem_P Parameter: Age (day) Value: 8
  misc_feature: MA Experiment 108535 PARAMETER Experiment Name: Zm_Meristem_P Parameter: Organism Value: Zea mays
  misc_feature: MA Experiment 108535 PARAMETER Experiment Name: Zm_Meristem_P Parameter: Plant Line Value: 35A19
  misc_feature: MA Experiment 108535 PARAMETER Experiment Name: Zm_Meristem_P Parameter: Tissue Value: Root Meristem vs. Above Root Meristem
  misc_feature: MA Experiment ID: 108536 Result: Down-regulated in Transcription
  misc_feature: MA Experiment 108536 PARAMETER Experiment Name: Zm_Meristem_P Parameter: Age (day) Value: 8
  misc_feature: MA Experiment 108536 PARAMETER Experiment Name: Zm_Meristem_P Parameter: Organism Value: Zea mays
  misc_feature: MA Experiment 108536 PARAMETER Experiment Name: Zm_Meristem_P Parameter: Plant Line Value: 35A19
  misc_feature: MA Experiment 108536 PARAMETER Experiment Name: Zm_Meristem_P Parameter: Tissue Value: Shoot Meristem vs. Above Shoot Meristem
  misc_feature: MA Experiment ID: 108543 Result: Down-regulated in Transcription
  misc_feature: MA Experiment ID: 108544 Result: Down-regulated in Transcription
  misc_feature: MA Experiment ID: 20000108 Result: Up-regulated in Transcription
  misc_feature: MA Experiment 20000108 PARAMETER Experiment Name: Zm_Root-Tips_P Parameter: Age (day) Value: 12
  misc_feature: MA Experiment 20000108 PARAMETER Experiment Name: Zm_Root-Tips_P Parameter: Organism Value: Zea mays
  misc_feature: MA Experiment 20000108 PARAMETER Experiment Name: Zm_Root-Tips_P Parameter: Tissue Value: Root tips vs. Root mid region    35
  misc_feature: MA Experiment 20000108 PARAMETER Experiment Name: Zm_Root-Tips_P Parameter: Tissue Value: Root tips vs. Root mid region   Sequence Listing-Misc Features (4)
  misc_feature: MA Experiment ID: 20000492 Result: Up-regulated in Transcription
  misc_feature: MA Experiment 20000492 PARAMETER Experiment Name: Zm_Hybrid_Seed_Dev_P Parameter: DAP Value: 12
  misc_feature: MA Experiment 20000492 PARAMETER Experiment Name: Zm_Hybrid_Seed_Dev_P Parameter: Organism Value: Zea mays
  misc_feature: MA Experiment 20000492 PARAMETER Experiment Name: Zm_Hybrid_Seed_Dev_P Parameter: Plant Line Value: 35A19
  misc_feature: MA Experiment 20000492 PARAMETER Experiment Name: Zm_Hybrid_Seed_Dev_P Parameter: Tissue Value: Fert Kernel vs. Unfert Floret
  misc_feature: MA Experiment ID: 20000534 Result: Down-regulated in Transcription
  misc_feature: MA Experiment 20000534 PARAMETER Experiment Name: Zm_Hybrid_Pollen_P Parameter: Age (day) Value: 8
  misc_feature: MA Experiment 20000534 PARAMETER Experiment Name: Zm_Hybrid_Pollen_P Parameter: Organism Value: Zea mays
  misc_feature: MA Experiment 20000534 PARAMETER Experiment Name: Zm_Hybrid_Pollen_P Parameter: Plant Line Value: 35A19
  misc_feature: MA Experiment 20000534 PARAMETER Experiment Name: Zm_Hybrid_Pollen_P Parameter: Tissue Value: Pollen vs. Aerial
gcacgagaccattacctagaacatcctaatcgaaaaatccctgaaaacctcacaaaaccctcgtttgctccccaccaccccgccgcgccgccgcctgtaccagctgcgtcaagatgagtcggcaccctgaggtgaagtgggctcagaggatcgacaaggtttacatcactgtacagttacctgacgcaaaggatgctaaggtcaatttggatccagatggtgtcttcacattctctggcagcgctggtacaaacttgtatgaattgaaactagatctgaatgacaaagtaaacgttgaggctagcaaaataagtgtgtaccagcggtcgggcggcgcccccggtggcgatgccgacggcggcgtcgacgacgaccacgacgagctgtagatggtggtggggagcggtgacgtggagtgccgggaaccaagccaaattttgtaatggtgtttaggggggagggtggtggacaaaaaaactaatcttggtgctgctctgccaatagacgggctgaccatagaacttttttttcccttctacttccttgtgattgnnctttttatagaggattcgcattgcagtgtaatgtaaaaaaaanatgacccacttctgaaacttgntactacaagntaataatgaaatggtgcatc

SEQ ID NO: 1622 - protein, 91 aa, Zea mays subsp. mays
  peptide (1)..(91): Ceres Seq. ID no. 12363036
  misc_feature (1)..(65): Homolog of NCBI NO: 22330824 NR Description: similar to p23 {Brassica napus}; protein id:
  misc_feature (43)..(91): Homolog of NCBI NO: 168424 NR Description: polypeptide chain-binding protein
  misc_feature (1)..(72): Homolog of NCBI NO: 40882701 NR Description: putative ripening regulated protein
  misc_feature (1)..(72): Homolog of NCBI NO: 12231292 NR Description: ripening regulated protein DDTFR8 [Lycopersicon
  misc_feature (1)..(72): Homolog of NCBI NO: 11934654 NR Description: p23 [Brassica napus]
  misc_feature (3)..(72): Homolog of NCBI NO: 7487014 NR Description: hypothetical protein T14P8.5 - Arabidopsis
  misc_feature (1)..(72): Homolog of NCBI NO: 30679149 NR Description: glycine-rich protein [Arabidopsis thaliana]
  misc_feature (1)..(72): Homolog of NCBI NO: 11229591 NR Description: p23 co-chaperone [Arabidopsis thaliana]
  misc_feature (1)..(72): Homolog of NCBI NO: 38637531 NR Description: putative p23 co-chaperone
MSRHPEVKWAQRIDKVYITVQLPDAKDAKVNLDPDGVFTFSGSAGTNLYELKLDLNDKVNVEASKISVYQRSGGAPGGDADGGVDDDHDEL

SEQ ID NO: 1623 - DNA, 1209 bp, Zea mays subsp. mays
  misc_feature (1)..(1209): Ceres Seq. ID no. 12355859
  misc_feature: MA Experiment ID: 20000534 Result: Down-regulated in Transcription
  misc_feature: MA Experiment 20000534 PARAMETER Experiment Name: Zm_Hybrid_Pollen_P Parameter: Age (day) Value: 8
  misc_feature: MA Experiment 20000534 PARAMETER Experiment Name: Zm_Hybrid_Pollen_P Parameter: Organism Value: Zea mays
  misc_feature: MA Experiment 20000534 PARAMETER Experiment Name: Zm_Hybrid_Pollen_P Parameter: Plant Line Value: 35A19
  misc_feature: MA Experiment 20000534 PARAMETER Experiment Name: Zm_Hybrid_Pollen_P Parameter: Tissue Value: Pollen vs. Aerial
agaattccatttatttcatcctctctttttttttttccattccacgcccctcccaacactcccagacccatttccctttccttcccctccggctccgcctcctcgaccactccgacaacccccagcgcctcctctccggcgagctccacctctccaccggcggcggcgagaagcgggggggctaactaagtctgtaggctgcggcggaggtgatcccggagccggagccgagtctagggcgatggggcagcagtcgctgatctacgcgttcgtggcgcgtggcaccgtggtgctggccgagtacaccgagttcaccggcaacttcaccaccatcgccgcccagtgcctgcagaagctccccgccagcaacaacaagttcacctacaactgcgacggccacaccttcaactacctcgtcgaggacggattcacgtattgtgtagttgctgttgaatcagttgggcgacaaatccccatagctttcctggacagagttaaggaagacttcaccaaaaagtatggaggcgggaaagcagctactgctgcagcgaacagcttgaacagggagtttggatcaaagcttaaagagcacatgcagtactgtgtggaccaccctgaggaggttagcaagcttgccaaggtgaaggcccaagtctccgaagtcaaaggagttatgatggaaaacattgagaaggttcttgaccgtggcgagaagattgaactgcttgtcgacaaaactgaaaatctgcgttctcaggcacaagatttcaggcagcagggcaccaaggtgcggcggaagatgtggctccaaaacatgaaaatcaagctgatcgtcctgggcatcatcatcgtgctcatcctcatcatcatcctgtcggtgtgccatggcttcaagtgcggcagcaagtgaggagggggacttacagatggccgtgccctgccctgccctgccctggcacctgcgagaaggaggagactacatgtggagttttttttttttttgcttctttagtcgtcgtgttaagtcgtcctgcgccgataattcttggtggtcaccagataagagtcattcctgatgtcggtgttgattgctgttgggttggtcgggaaatgactgggtgaaccggggggcgaagtgggaggggggttgtgtcgtgtaattttggatgccactattgtgcatgtatagccccgtgtgctgtgctaccc

SEQ ID NO: 1624 - protein, 302 aa, Zea mays subsp. mays
  peptide (1)..(302): Ceres Seq. ID no. 12355860
  misc_feature (207)..(294): Pfam Name: Synaptobrevin Pfam Description: Synaptobrevin
  misc_feature (81)..(299): Homolog of NCBI NO: 27805752 NR Description: Vesicle-associated membrane protein 724
  misc_feature (81)..(274): Homolog of NCBI NO: 33347409 NR Description: synptobrevin-related protein [Pyrus pyrifolia]
  misc_feature (81)..(299): Homolog of NCBI NO: 27805765 NR Description: Putative vesicle-associated membrane protein 726
  misc_feature (81)..(300): Homolog of NCBI NO: 600710 NR Description: formerly called HAT24; synaptobrevin-related
  misc_feature (81)..(300): Homolog of NCBI NO: 15225796 NR Description: putative synaptobrevin
  misc_feature (81)..(299): Homolog of NCBI NO: 15220315 NR Description: synaptobrevin 7B, putative; protein id:
  misc_feature (81)..(299): Homolog of NCBI NO: 15220943 NR Description: synaptobrevin 7B, putative; protein id:
  misc_feature (81)..(299): Homolog of NCBI NO: 27805753 NR Description: Vesicle-associated membrane protein 725
  misc_feature (78)..(299): Homolog of NCBI NO: 30685375 NR Description: synaptobrevin -related [Arabidopsis thaliana]
  misc_feature (81)..(299): Homolog of NCBI NO: 29150380 NR Description: synaptobrevin-like protein
EFHLFHPLFFFFHSTPLPTLPDPFPFPSPPAPPPRPLRQPPAPPLRRAPPLHRRRREAGGLTKSVGCGGGDPGAGAESRAMGQQSLIYAFVARGTVVLAEYTEFTGNFTTIAAQCLQKLPASNNKFTYNCDGHTFNYLVEDGFTYCVVAVESVGRQIPIAFLDRVKEDFTKKYGGGKAATAAANSLNREFGSKLKEHMQYCVDHPEEVSKLAKVKAQVSEVKGVMMENIEKVLDRGEKIELLVDKTENLRSQAQDFRQQGTKVRRKMWLQNMKIKLIVLGIIIVLILIIILSVCHGFKCGSK

SEQ ID NO: 1625 - protein, 222 aa, Zea mays subsp. mays
  peptide (1)..(222): Ceres Seq. ID no. 12355861
  misc_feature (127)..(214): Pfam Name: Synaptobrevin Pfam Description: Synaptobrevin
  misc_feature (1)..(219): Homolog of NCBI NO: 27805752 NR Description: Vesicle-associated membrane protein 724
  misc_feature (1)..(194): Homolog of NCBI NO: 33347409 NR Description: synptobrevin-related protein [Pyrus pyrifolia]
  misc_feature (1)..(219): Homolog of NCBI NO: 27805765 NR Description: Putative vesicle-associated membrane protein 726
  misc_feature (1)..(220): Homolog of NCBI NO: 600710 NR Description: formerly called HAT24; synaptobrevin-related
  misc_feature (1)..(220): Homolog of NCBI NO: 15225796 NR Description: putative synaptobrevin
  misc_feature (1)..(219): Homolog of NCBI NO: 15220315 NR Description: synaptobrevin 7B, putative; protein id:
  misc_feature (1)..(219): Homolog of NCBI NO: 15220943 NR Description: synaptobrevin 7B, putative; protein id:
  misc_feature (1)..(219): Homolog of NCBI NO: 27805753 NR Description: Vesicle-associated membrane protein 725
  misc_feature (1)..(219): Homolog of NCBI NO: 30685375 NR Description: synaptobrevin -related [Arabidopsis thaliana]
  misc_feature (1)..(219): Homolog of NCBI NO: 29150380 NR Description: synaptobrevin-like protein
MGQQSLIYAFVARGTVVLAEYTEFTGNFTTIAAQCLQKLPASNNKFTYNCDGHTFNYLVEDGFTYCVVAVESVGRQIPIAFLDRVKEDFTKKYGGGKAATAAANSLNREFGSKLKEHMQYCVDHPEEVSKLAKVKAQVSEVKGVMMENIEKVLDRGEKIELLVDKTENLRSQAQDFRQQGTKVRRKMWLQNMKIKLIVLGIIIVLILIIILSVCHGFKCGSK

SEQ ID NO: 1626 - DNA, 1117 bp, Zea mays subsp. mays
  misc_feature (1)..(1117): Ceres Seq. ID no. 12348922
  misc_feature: MA Experiment ID: 108523 Result: Down-regulated in Transcription
  misc_feature: MA Experiment 108523 PARAMETER Experiment Name: Zm_42deg_Heat_P Parameter: Age (day) Value: 8
  misc_feature: MA Experiment 108523 PARAMETER Experiment Name: Zm_42deg_Heat_P Parameter: Organism Value: Zea mays
  misc_feature: MA Experiment 108523 PARAMETER Experiment Name: Zm_42deg_Heat_P Parameter: Plant Line Value: 35A19
  misc_feature: MA Experiment 108523 PARAMETER Experiment Name: Zm_42deg_Heat_P Parameter: Temperature (deg C) Value: 42 vs. 22
  misc_feature: MA Experiment 108523 PARAMETER Experiment Name: Zm_42deg_Heat_P Parameter: Timepoint (hr) Value: 6
  misc_feature: MA Experiment 108523 PARAMETER Experiment Name: Zm_42deg_Heat_P Parameter: Tissue Value: Aerial
  misc_feature: MA Experiment ID: 108543 Result: Up-regulated in Transcription
  misc_feature: MA Experiment ID: 108544 Result: Up-regulated in Transcription
  misc_feature: MA Experiment ID: 20000492 Result: Up-regulated in Transcription
  misc_feature: MA Experiment 20000492 PARAMETER Experiment Name: Zm_Hybrid_Seed_Dev_P Parameter: DAP Value: 12
  misc_feature: MA Experiment 20000492 PARAMETER Experiment Name: Zm_Hybrid_Seed_Dev_P Parameter: Organism Value: Zea mays
  misc_feature: MA Experiment 20000492 PARAMETER Experiment Name: Zm_Hybrid_Seed_Dev_P Parameter: Plant Line Value: 35A19
  misc_feature: MA Experiment 20000492 PARAMETER Experiment Name: Zm_Hybrid_Seed_Dev_P Parameter: Tissue Value: Fert Kernel vs. Unfert Floret
aaaaaaggccagccaacagaggccggtggaaaggagagaatcgagcagagccaccaggttgctcctcatttccactttccactgcgcctccgctgcccatcgccgtccccgaccgcagcgcaggactgaggatgagtgaagaggataaggctgctgcttctgctgagcagcctaagagggcccctaagctcaatgaaaggatcctctcctctctgtccaggaggtccgtagctgctcatccatggcatgatctcgagatcggtcctggtgctcctgctgtattcaatgttgttgttgagatcacaaagggaagcaaagtcaaatacgagcttgacaagaaaactggactgattaaggttgatcgagtcctttactcatcagttgtataccctcacaattatggtttcattccaaggactctttgtgaagacaatgacccaatggatgtgttggtcctgatgcaggagcctgttgttcctggttcgttcctgagagctagagcaattggccttatgcccatgattgaccagggtgaaaaggatgacaagataatagcagtatgtgctgacgatcctgaataccgtcactacaacgacatcagcgagctgtctcctcaccgcctgcaagagatcaagcgcttctttgaagattacaagaaaaacgagaacaaagaagtcgcagttgatgcattcttgcccgcgacaacagctcaagaagccattcagtactccatggacctgtatgcccagtatattttgcaaagcttgaggcagtagattgcaagcaacaatttatctatcatgcgtcttggatcggggcgtgattttaataagccgaatcgcttgctatattgcgaaccttggaattgagaacagcgtcactagctgtgattcgctcctttctcgttaaattatcatatgaataggccaagtccatacgtttaccgtgtggcgctctgtcagtcttcgtctacccaagtagctagctgcatggagggatgtctagcgttgctatgagatggcactcgtgggtctgcgggctgactacatgggtccgttcctgtgttttccgtaaaataaaattataattctatataattgaatcatttaatttatgc

SEQ ID NO: 1627 - protein, 257 aa, Zea mays subsp. mays
  peptide (1)..(257): Ceres Seq. ID no. 12348923
  misc_feature (95)..(249): Pfam Name: Inorganic pyrophosphatase Pfam Description: Inorganic pyrophosphatase
  misc_feature (218)..(257): Homolog of NCBI NO: 25290346 NR Description: protein T25K16.5 [imported] - Arabidopsis
  misc_feature (44)..(216): Homolog of NCBI NO: 25290346 NR Description: protein T25K16.5 [imported] - Arabidopsis
  misc_feature (58)..(257): Homolog of NCBI NO: 2500047 NR Description: Soluble inorganic pyrophosphatase (Pyrophosphate
  misc_feature (44)..(257): Homolog of NCBI NO: 26451240 NR Description: putative inorganic pyrophosphatase [Arabidopsis
  misc_feature (44)..(257): Homolog of NCBI NO: 15223288 NR Description: soluble inorganic pyrophosphatase, putative
  misc_feature (44)..(257): Homolog of NCBI NO: 5669924 NR Description: soluble inorganic pyrophosphatase
  misc_feature (44)..(257): Homolog of NCBI NO: 15226453 NR Description: putative inorganic pyrophosphatase; protein id:
  misc_feature (44)..(257): Homolog of NCBI NO: 4033417 NR Description: Soluble inorganic pyrophosphatase (Pyrophosphate
  misc_feature (44)..(257): Homolog of NCBI NO: 38345829 NR Description: OSJNBa0070M12.12 [Oryza sativa (japonica
  misc_feature (44)..(257): Homolog of NCBI NO: 4033424 NR Description: Soluble inorganic pyrophosphatase (Pyrophosphate
KRPANRGRWKGENRAEPPGCSSFPLSTAPPLPIAVPDRSAGLRMSEEDKAAASAEQPKRAPKLNERILSSLSRRSVAAHPWHDLEIGPGAPAVFNVVVEITKGSKVKYELDKKTGLIKVDRVLYSSVVYPHNYGFIPRTLCEDNDPMDVLVLMQEPVVPGSFLRARAIGLMPMIDQGEKDDKIIAVCADDPEYRHYNDISELSPHRLQEIKRFFEDYKKNENKEVAVDAFLPATTAQEAIQYSMDLYAQYILQSLRQ

SEQ ID NO: 1628 - protein, 214 aa, Zea mays subsp. mays
  peptide (1)..(214): Ceres Seq. ID no. 12348924
  misc_feature (52)..(206): Pfam Name: Inorganic pyrophosphatase Pfam Description: Inorganic pyrophosphatase
  misc_feature (175)..(214): Homolog of NCBI NO: 25290346 NR Description: protein T25K16.5 [imported] - Arabidopsis
  misc_feature (1)..(173): Homolog of NCBI NO: 25290346 NR Description: protein T25K16.5 [imported] - Arabidopsis
  misc_feature (15)..(214): Homolog of NCBI NO: 2500047 NR Description: Soluble inorganic pyrophosphatase (Pyrophosphate
  misc_feature (1)..(214): Homolog of NCBI NO: 26451240 NR Description: putative inorganic pyrophosphatase [Arabidopsis
  misc_feature (1)..(214): Homolog of NCBI NO: 15223288 NR Description: soluble inorganic pyrophosphatase, putative
  misc_feature (1)..(214): Homolog of NCBI NO: 5669924 NR Description: soluble inorganic pyrophosphatase
  misc_feature (1)..(214): Homolog of NCBI NO: 15226453 NR Description: putative inorganic pyrophosphatase; protein id:
  misc_feature (1)..(214): Homolog of NCBI NO: 4033417 NR Description: Soluble inorganic pyrophosphatase (Pyrophosphate
  misc_feature (1)..(214): Homolog of NCBI NO: 38345829 NR Description: OSJNBa0070M12.12 [Oryza sativa (japonica
  misc_feature (1)..(214): Homolog of NCBI NO: 4033424 NR Description: Soluble inorganic pyrophosphatase (Pyrophosphate
MSEEDKAAASAEQPKRAPKLNERILSSLSRRSVAAHPWHDLEIGPGAPAVFNVVVEITKGSKVKYELDKKTGLIKVDRVLYSSVVYPHNYGFIPRTLCEDNDPMDVLVLMQEPVVPGSFLRARAIGLMPMIDQGEKDDKIIAVCADDPEYRHYNDISELSPHRLQEIKRFFEDYKKNENKEVAVDAFLPATTAQEAIQYSMDLYAQYILQSLRQ

SEQ ID NO: 1629 - DNA, 1493 bp, Zea mays subsp. mays
  misc_feature (1)..(1493): Ceres Seq. ID no. 12355953
  misc_feature: MA Experiment ID: 108515 Result: Up-regulated in Transcription
  misc_feature: MA Experiment 108515 PARAMETER Experiment Name: Zm_2mM_SA_P Parameter: Age (day) Value: 8
  misc_feature: MA Experiment 108515 PARAMETER Experiment Name: Zm_2mM_SA_P Parameter: Organism Value: Zea mays
  misc_feature: MA Experiment 108515 PARAMETER Experiment Name: Zm_2mM_SA_P Parameter: Plant Line Value: 35A19
  misc_feature: MA Experiment 108515 PARAMETER Experiment Name: Zm_2mM_SA_P Parameter: Timepoint (hr) Value: 12
  misc_feature: MA Experiment 108515 PARAMETER Experiment Name: Zm_2mM_SA_P Parameter: Tissue Value: Aerial
  misc_feature: MA Experiment 108515 PARAMETER Experiment Name: Zm_2mM_SA_P Parameter: Treatment Value: 2mM SA vs. No Treatment
  misc_feature: MA Experiment ID: 108523 Result: Up-regulated in Transcription
  misc_feature: MA Experiment 108523 PARAMETER Experiment Name: Zm_42deg_Heat_P Parameter: Age (day) Value: 8
  misc_feature: MA Experiment 108523 PARAMETER Experiment Name: Zm_42deg_Heat_P Parameter: Organism Value: Zea mays
  misc_feature: MA Experiment 108523 PARAMETER Experiment Name: Zm_42deg_Heat_P Parameter: Plant Line Value: 35A19
  misc_feature: MA Experiment 108523 PARAMETER Experiment Name: Zm_42deg_Heat_P Parameter: Temperature (deg C) Value: 42 vs. 22
  misc_feature: MA Experiment 108523 PARAMETER Experiment Name: Zm_42deg_Heat_P Parameter: Timepoint (hr) Value: 6
  misc_feature: MA Experiment 108523 PARAMETER Experiment Name: Zm_42deg_Heat_P Parameter: Tissue Value: Aerial
  misc_feature: MA Experiment ID: 108527 Result: Up-regulated in Transcription
  misc_feature: MA Experiment 108527 PARAMETER Experiment Name: Zm_5mM_NO_P Parameter: Age (day) Value: 8
  misc_feature: MA Experiment 108527 PARAMETER Experiment Name: Zm_5mM_NO_P Parameter: Organism Value: Zea mays
  misc_feature: MA Experiment 108527 PARAMETER Experiment Name: Zm_5mM_NO_P Parameter: Plant Line Value: 35A19
  misc_feature: MA Experiment 108527 PARAMETER Experiment Name: Zm_5mM_NO_P Parameter: Timepoint (hr) Value: 6
  misc_feature: MA Experiment 108527 PARAMETER Experiment Name: Zm_5mM_NO_P Parameter: Tissue Value: Aerial
  misc_feature: MA Experiment 108527 PARAMETER Experiment Name: Zm_5mM_NO_P Parameter: Treatment Value: 5mM NO vs. No Treatment
  misc_feature: MA Experiment ID: 108528 Result: Down-regulated in Transcription
  misc_feature: MA Experiment 108528 PARAMETER Experiment Name: Zm_Imbibed_Seeds_P Parameter: Age (day) Value: 5 vs. 2
  misc_feature: MA Experiment 108528 PARAMETER Experiment Name: Zm_Imbibed_Seeds_P Parameter: Organism Value: Zea mays
  misc_feature: MA Experiment 108528 PARAMETER Experiment Name: Zm_Imbibed_Seeds_P Parameter: Plant Line Value: 35A19
  misc_feature: MA Experiment 108528 PARAMETER Experiment Name: Zm_Imbibed_Seeds_P Parameter: Tissue Value: Aerial vs. Embryo
  misc_feature: MA Experiment ID: 108530 Result: Down-regulated in Transcription
  misc_feature: MA Experiment 108530 PARAMETER Experiment Name: Zm_Imbibed_Seeds_P Parameter: Age (day) Value: 6 vs. 2
  misc_feature: MA Experiment 108530 PARAMETER Experiment Name: Zm_Imbibed_Seeds_P Parameter: Organism Value: Zea mays
  misc_feature: MA Experiment 108530 PARAMETER Experiment Name: Zm_Imbibed_Seeds_P Parameter: Plant Line Value: 35A19
  misc_feature: MA Experiment 108530 PARAMETER Experiment Name: Zm_Imbibed_Seeds_P Parameter: Tissue Value: Aerial vs. Embryo
  misc_feature: MA Experiment ID: 108543 Result: Down-regulated in Transcription
  misc_feature: MA Experiment ID: 108544 Result: Down-regulated in Transcription
  misc_feature: MA Experiment ID: 108545 Result: Down-regulated in Transcription
  misc_feature: MA Experiment 108545 PARAMETER Experiment Name: Zm_Imbibed_Seeds_P Parameter: Age (day) Value: 3 vs. 2
  misc_feature: MA Experiment 108545 PARAMETER Experiment Name: Zm_Imbibed_Seeds_P Parameter: Organism Value: Zea mays
  misc_feature: MA Experiment 108545 PARAMETER Experiment Name: Zm_Imbibed_Seeds_P Parameter: Plant Line Value: 35A19
  misc_feature: MA Experiment 108545 PARAMETER Experiment Name: Zm_Imbibed_Seeds_P Parameter: Tissue Value: Aerial vs. Embryo
  misc_feature: MA Experiment ID: 108559 Result: Up-regulated in Transcription
  misc_feature: MA Experiment 108559 PARAMETER Experiment Name: Zm_5mM_NO_P Parameter: Age (day) Value: 8
  misc_feature: MA Experiment 108559 PARAMETER Experiment Name: Zm_5mM_NO_P Parameter: Organism Value: Zea mays
  misc_feature: MA Experiment 108559 PARAMETER Experiment Name: Zm_5mM_NO_P Parameter: Plant Line Value: 35A19
  misc_feature: MA Experiment 108559 PARAMETER Experiment Name: Zm_5mM_NO_P Parameter: Timepoint (hr) Value: 12
  misc_feature: MA Experiment 108559 PARAMETER Experiment Name: Zm_5mM_NO_P Parameter: Tissue Value: Aerial
  misc_feature: MA Experiment 108559 PARAMETER Experiment Name: Zm_5mM_NO_P Parameter: Treatment Value: 5mM NO vs. No Treatment
  misc_feature: MA Experiment ID: 108599 Result: Up-regulated in Transcription
  misc_feature: MA Experiment 108599 PARAMETER Experiment Name: Zm_RT1_P Parameter: Age (day) Value: 11
  misc_feature: MA Experiment 108599 PARAMETER Experiment Name: Zm_RT1_P Parameter: Organism Value: Zea mays
  misc_feature: MA Experiment 108599 PARAMETER Experiment Name: Zm_RT1_P Parameter: Plant Line Value: rt1 mut vs. rt1 wt
  misc_feature: MA Experiment 108599 PARAMETER Experiment Name: Zm_RT1_P Parameter: Tissue Value: Roots
  misc_feature: MA Experiment ID: 20000479 Result: Down-regulated in Transcription
  misc_feature: MA Experiment 20000479 PARAMETER Experiment Name: Zm_Drought_P Parameter: Age (day) Value: 10
  misc_feature: MA Experiment 20000479 PARAMETER Experiment Name: Zm_Drought_P Parameter: Organism Value: Zea mays
  misc_feature: MA Experiment 20000479 PARAMETER Experiment Name: Zm_Drought_P Parameter: Plant Line Value: 35A19
  misc_feature: MA Experiment 20000479 PARAMETER Experiment Name: Zm_Drought_P Parameter: Timepoint (hr) Value: 48
  misc_feature: MA Experiment 20000479 PARAMETER Experiment Name: Zm_Drought_P Parameter: Tissue Value: Aerial
  misc_feature: MA Experiment 20000479 PARAMETER Experiment Name: Zm_Drought_P Parameter: Treatment Value: Drought vs. No Drought
  misc_feature: MA Experiment ID: 20000533 Result: Up-regulated in Transcription
  misc_feature: MA Experiment 20000533 PARAMETER Experiment Name: Zm_0.001percent_MeJA_P Parameter: Age (day) Value: 11
  misc_feature: MA Experiment 20000533 PARAMETER Experiment Name: Zm_0.001percent_MeJA_P Parameter: Organism Value: Zea mays
  misc_feature: MA Experiment 20000533 PARAMETER Experiment Name: Zm_0.001percent_MeJA_P Parameter: Plant Line Value: 35A19
  misc_feature: MA Experiment 20000533 PARAMETER Experiment Name: Zm_0.001percent_MeJA_P Parameter: Timepoint (hr) Value: 72
  misc_feature: MA Experiment 20000533 PARAMETER Experiment Name: Zm_0.001percent_MeJA_P Parameter: Tissue Value: Aerial
  misc_feature: MA Experiment 20000533 PARAMETER Experiment Name: Zm_0.001percent_MeJA_P Parameter: Treatment Value: 0.001percent MeJA vs. No Treatment
  misc_feature: MA Experiment ID: 20000626 Result: Down-regulated in Transcription
  misc_feature: MA Experiment 20000626 PARAMETER Experiment Name: Zm_Herbicide-Treatments_P Parameter: Timepoint (hr) Value: 12
  misc_feature: MA Experiment 20000626 PARAMETER Experiment Name: Zm_Herbicide-Treatments_P Parameter: Tissue Value: Aerial
  misc_feature: MA Experiment 20000626 PARAMETER Experiment Name: Zm_Herbicide-Treatments_P Parameter: Treatment Value: Roundup vs. No Treatment
  misc_feature: MA Experiment ID: 20000629 Result: Down-regulated in Transcription
  misc_feature: MA Experiment 20000629 PARAMETER Experiment Name: Zm_Herbicide-Treatments_P Parameter: Timepoint (hr) Value: 12
  misc_feature: MA Experiment 20000629 PARAMETER Experiment Name: Zm_Herbicide-Treatments_P Parameter: Tissue Value: Aerial
  misc_feature: MA Experiment 20000629 PARAMETER Experiment Name: Zm_Herbicide-Treatments_P Parameter: Treatment Value: Trimec vs. No Treatment
  misc_feature: MA Experiment ID: 20000630 Result: Up-regulated in Transcription
  misc_feature: MA Experiment 20000630 PARAMETER Experiment Name: Zm_Herbicide-Treatments_P Parameter: Timepoint (hr) Value: 4
  misc_feature: MA Experiment 20000630 PARAMETER Experiment Name: Zm_Herbicide-Treatments_P Parameter: Tissue Value: Aerial
  misc_feature: MA Experiment 20000630 PARAMETER Experiment Name: Zm_Herbicide-Treatments_P Parameter: Treatment Value: Roundup vs. No Treatment
tcgcgatgggtggcggcagggaacacagcccacggtttttgctggctccccgcctcgtccccgtcacccccctcctccgctccgcctcctgtttatagtcgcctgctgtcgcggcccctttttccttccaccacccaccggccaccaccctccgcggttgcctagttgccttgactgcctgcctcgtcttaccaccaagctaagctagcgcgttccttcgttcgttcgttcgttccttcctccctcgcttcctgttgctcggtccatggaggtggcggcggccgcggcggcgggcgcgggggttgtggagctgcagctggacctcctcgaggcggcggcgccgacggagcgagaggccaagaggcgccgggtgcacccggttccagcgggcccaccggccggggcagcagcggcggcagcagcgccggggcgccgcagccgcaggcgccgcgccgtgcagcgtctcttccaggcctgccgccacgtcttccggggccccggcaccgtgcccagtcccggcgaggtccagctgctccgccacatgctcgacaggatgcggccggaggacgtgggcctgagcccggacctgagcttcttcagagctcgagacgccacacgtggcggtggcaccccgaccataacgcacacgacgatatacaaatgcccgaatttctcgatggtcatcctcttcctgccgcgaaacgcggtgatcccgctccacaaccaccctgggatgacggtgttcagcaagctgctcctggggtcgatgcacgtcaagtcgtacgactggctcaacactgctgaccccgacccttcttccgccacgagcaccaccagctcttcgtcctccgatggcccatgcctgaggctggcgaaactggtggttgacgacgtcttcacggcgccctgcgacacctccgtgctgtacccgacggcgggagggaacatgcaccggttcaccgccatggcgccctgcgcgatcctcgacgtcctcggccccccctactccatagaggaggacagggactgcacgtactacgcggaattaccgtacgcaaaccactcgctggtggctgcgggcgacgacgtggagcggggccagggccaaggccatctggcgtggcttgaggagatcgacatgccgagagagctcaagatgtgcagcgtccactatggcggaccgccgatctccgacgagtgacgtcgccggccgtcgtctccctcactggttgtactatgtctaactgatcgcggcacggcagagccgtgccgccgtctaacgttgtgtatagcaggcagcagcaagccataggctgtagttacacaaagtcccgatcgagtacaatgcttctcgcttgcctgcatcgttgttctctagatgccctttctttcttgttatttttgtttctactactacaagtagacgatgttttgtcctgacgatggatgatacagataagtcatatatatccacatatttcatttttgtcgtt

SEQ ID NO: 1630 - protein, 311 aa, Zea mays subsp. mays
  peptide (1)..(311): Ceres Seq. ID no. 12355954
  misc_feature (65)..(308): Homolog of NCBI NO: 18406030 NR Description: expressed protein
  misc_feature (56)..(308): Homolog of NCBI NO: 25402861 NR Description: protein F15H18.4 [imported] - Arabidopsis
  misc_feature (65)..(308): Homolog of NCBI NO: 21536850 NR Description: unknown [Arabidopsis thaliana]
  misc_feature (56)..(308): Homolog of NCBI NO: 21618020 NR Description: unknown [Arabidopsis thaliana]
  misc_feature (56)..(308): Homolog of NCBI NO: 18394617 NR Description: expressed protein
  misc_feature (56)..(310): Homolog of NCBI NO: 15242505 NR Description: putative protein
  misc_feature (56)..(310): Homolog of NCBI NO: 10176982 NR Description: contains similarity to unknown
  misc_feature (47)..(310): Homolog of NCBI NO: 34906308 NR Description: unnamed protein product [Oryza sativa (japonica
  misc_feature (63)..(310): Homolog of NCBI NO: 15242218 NR Description: putative protein; protein id: At5g15120.1
  misc_feature (25)..(308): Homolog of NCBI NO: 29244630 NR Description: hypothetical protein [Oryza sativa (japonica
MEVAAAAAAGAGVVELQLDLLEAAAPTEREAKRRRVHPVPAGPPAGAAAAAAAPGRRSRRRRAVQRLFQACRHVFRGPGTVPSPGEVQLLRHMLDRMRPEDVGLSPDLSFFRARDATRGGGTPTITHTTIYKCPNFSMVILFLPRNAVIPLHNHPGMTVFSKLLLGSMHVKSYDWLNTADPDPSSATSTTSSSSSDGPCLRLAKLVVDDVFTAPCDTSVLYPTAGGNMHRFTAMAPCAILDVLGPPYSIEEDRDCTYYAELPYANHSLVAAGDDVERGQGQGHLAWLEEIDMPRELKMCSVHYGGPPISDE

SEQ ID NO: 1631 - protein, 219 aa, Zea mays subsp. mays
  peptide (1)..(219): Ceres Seq. ID no. 12355955
  misc_feature (1)..(216): Homolog of NCBI NO: 18406030 NR Description: expressed protein
  misc_feature (1)..(216): Homolog of NCBI NO: 25402861 NR Description: protein F15H18.4 [imported] - Arabidopsis
  misc_feature (1)..(216): Homolog of NCBI NO: 21536850 NR Description: unknown [Arabidopsis thaliana]
  misc_feature (1)..(216): Homolog of NCBI NO: 21618020 NR Description: unknown [Arabidopsis thaliana]
  misc_feature (1)..(216): Homolog of NCBI NO: 18394617 NR Description: expressed protein
  misc_feature (1)..(218): Homolog of NCBI NO: 15242505 NR Description: putative protein
  misc_feature (1)..(218): Homolog of NCBI NO: 10176982 NR Description: contains similarity to unknown
  misc_feature (1)..(218): Homolog of NCBI NO: 34906308 NR Description: unnamed protein product [Oryza sativa (japonica
  misc_feature (1)..(218): Homolog of NCBI NO: 15242218 NR Description: putative protein; protein id: At5g15120.1
  misc_feature (1)..(216): Homolog of NCBI NO: 29244630 NR Description: hypothetical protein [Oryza sativa (japonica
MLDRMRPEDVGLSPDLSFFRARDATRGGGTPTITHTTIYKCPNFSMVILFLPRNAVIPLHNHPGMTVFSKLLLGSMHVKSYDWLNTADPDPSSATSTTSSSSSDGPCLRLAKLVVDDVFTAPCDTSVLYPTAGGNMHRFTAMAPCAILDVLGPPYSIEEDRDCTYYAELPYANHSLVAAGDDVERGQGQGHLAWLEEIDMPRELKMCSVHYGGPPISDE

SEQ ID NO: 1632 - protein, 215 aa, Zea mays subsp. mays
  peptide (1)..(215): Ceres Seq. ID no. 12355956
  misc_feature (1)..(214): Homolog of NCBI NO: 15242218 NR Description: putative protein; protein id: At5g15120.1
  misc_feature (1)..(212): Homolog of NCBI NO: 29244630 NR Description: hypothetical protein [Oryza sativa (japonica
  misc_feature (1)..(212): Homolog of NCBI NO: 18406030 NR Description: expressed protein
  misc_feature (1)..(212): Homolog of NCBI NO: 25402861 NR Description: protein F15H18.4 [imported] - Arabidopsis
  misc_feature (1)..(212): Homolog of NCBI NO: 21536850 NR Description: unknown [Arabidopsis thaliana]
  misc_feature (1)..(212): Homolog of NCBI NO: 21618020 NR Description: unknown [Arabidopsis thaliana]
  misc_feature (1)..(212): Homolog of NCBI NO: 18394617 NR Description: expressed protein
  misc_feature (1)..(214): Homolog of NCBI NO: 15242505 NR Description: putative protein
  misc_feature (1)..(214): Homolog of NCBI NO: 10176982 NR Description: contains similarity to unknown
  misc_feature (1)..(214): Homolog of NCBI NO: 34906308 NR Description: unnamed protein product [Oryza sativa (japonica
MRPEDVGLSPDLSFFRARDATRGGGTPTITHTTIYKCPNFSMVILFLPRNAVIPLHNHPGMTVFSKLLLGSMHVKSYDWLNTADPDPSSATSTTSSSSSDGPCLRLAKLVVDDVFTAPCDTSVLYPTAGGNMHRFTAMAPCAILDVLGPPYSIEEDRDCTYYAELPYANHSLVAAGDDVERGQGQGHLAWLEEIDMPRELKMCSVHYGGPPISDE

SEQ ID NO: 1633 - DNA, 1370 bp, Zea mays subsp. mays
  misc_feature (1)..(1370): Ceres Seq. ID no. 12359684
  misc_feature: MA Experiment ID: 108528 Result: Down-regulated in Transcription
  misc_feature: MA Experiment 108528 PARAMETER Experiment Name: Zm_Imbibed_Seeds_P Parameter: Age (day) Value: 5 vs. 2
  misc_feature: MA Experiment 108528 PARAMETER Experiment Name: Zm_Imbibed_Seeds_P Parameter: Organism Value: Zea mays
  misc_feature: MA Experiment 108528 PARAMETER Experiment Name: Zm_Imbibed_Seeds_P Parameter: Plant Line Value: 35A19
  misc_feature: MA Experiment 108528 PARAMETER Experiment Name: Zm_Imbibed_Seeds_P Parameter: Tissue Value: Aerial vs. Embryo
  misc_feature: MA Experiment ID: 108530 Result: Down-regulated in Transcription
  misc_feature: MA Experiment 108530 PARAMETER Experiment Name: Zm_Imbibed_Seeds_P Parameter: Age (day) Value: 6 vs. 2
  misc_feature: MA Experiment 108530 PARAMETER Experiment Name: Zm_Imbibed_Seeds_P Parameter: Organism Value: Zea mays
  misc_feature: MA Experiment 108530 PARAMETER Experiment Name: Zm_Imbibed_Seeds_P Parameter: Plant Line Value: 35A19
  misc_feature: MA Experiment 108530 PARAMETER Experiment Name: Zm_Imbibed_Seeds_P Parameter: Tissue Value: Aerial vs. Embryo
  misc_feature: MA Experiment ID: 108535 Result: Up-regulated in Transcription
  misc_feature: MA Experiment 108535 PARAMETER Experiment Name: Zm_Meristem_P Parameter: Age (day) Value: 8
  misc_feature: MA Experiment 108535 PARAMETER Experiment Name: Zm_Meristem_P Parameter: Organism Value: Zea mays
  misc_feature: MA Experiment 108535 PARAMETER Experiment Name: Zm_Meristem_P Parameter: Plant Line Value: 35A19
  misc_feature: MA Experiment 108535 PARAMETER Experiment Name: Zm_Meristem_P Parameter: Tissue Value: Root Meristem vs. Above Root Meristem
  misc_feature: MA Experiment ID: 108547 Result: Down-regulated in Transcription
  misc_feature: MA Experiment 108547 PARAMETER Experiment Name: Zm_Imbibed_Seeds_P Parameter: Age (day) Value: 4 vs. 2
  misc_feature: MA Experiment 108547 PARAMETER Experiment Name: Zm_Imbibed_Seeds_P Parameter: Organism Value: Zea mays
  misc_feature: MA Experiment 108547 PARAMETER Experiment Name: Zm_Imbibed_Seeds_P Parameter: Plant Line Value: 35A19
  misc_feature: MA Experiment 108547 PARAMETER Experiment Name: Zm_Imbibed_Seeds_P Parameter: Tissue Value: Aerial vs. Embryo
  misc_feature: MA Experiment ID: 20000492 Result: Up-regulated in Transcription
  misc_feature: MA Experiment 20000492 PARAMETER Experiment Name: Zm_Hybrid_Seed_Dev_P Parameter: DAP Value: 12
  misc_feature: MA Experiment 20000492 PARAMETER Experiment Name: Zm_Hybrid_Seed_Dev_P Parameter: Organism Value: Zea mays
  misc_feature: MA Experiment 20000492 PARAMETER Experiment Name: Zm_Hybrid_Seed_Dev_P Parameter: Plant Line Value: 35A19
  misc_feature: MA Experiment 20000492 PARAMETER Experiment Name: Zm_Hybrid_Seed_Dev_P Parameter: Tissue Value: Fert Kernel vs. Unfert Floret
  misc_feature: MA Experiment ID: 20000633 Result: Down-regulated in Transcription
  misc_feature: MA Experiment 20000633 PARAMETER Experiment Name: Zm_Herbicide-Treatments_P Parameter: Timepoint (hr) Value: 4
  misc_feature: MA Experiment 20000633 PARAMETER Experiment Name: Zm_Herbicide-Treatments_P Parameter: Tissue Value: Aerial
  misc_feature: MA Experiment 20000633 PARAMETER Experiment Name: Zm_Herbicide-Treatments_P Parameter: Treatment Value: Trimec vs. No Treatment
gagcgagcccccgcacgtcgccacttcaccgcccccacccaaaatcgtctcgatggaaccgctgcggcgcgtgctgcgcctccgactcggacggcctctcgctataaaccccgcccactgaatacggccgttccatttttgactctattccccgcttcccgattcaagtcagcggtttttagggttcgagatctcggcatcgtgtcgcggaagccatggcgacaagcatgcttagtaccgtgaaggtgagcaatgtatcactgaaagcagcacaacgtgatataaaggaattcttttccttttctggtgacattgtgcatgttgaaatgcagagtttcgatgagctttctcaagttgcctacattacttttaaagacaaacaaggagcagagacggcaatgcttctcacgggggccaccatagttgatatggctgtaatcgtcacaccagcaaatgattatgagctaccatcttctgttttagctgctcttgagcccaaagacacaaaaccttctgcccttcaaaaggccgaggacattgttgggaccatgctggcaaagggatttatcctcggtagggatgcactggacaaagcgaaagctttggatgagaagcatcagctgacgtcgactgccacagctagagtatcttccttcgacaagagaatcggtctaagtgagaagatcagtgttggcacttcagttgtaaacgataaagtgaaggaaatggatcagaaataccaagtctctgagaagacaaagtcagcactggcagctgctgaacatagtgtctcgactgctggatctgctatcatgaagaacaggtatgtgctaaccggagctgcatgggtaactggtgctttcagcaaggtcaccagtgcagccaacgaggccggtgcaaaggctaaggaaaaaatagcagtcgagcaggagcacaagaatgctgagggtggacctgcacaagcgaacatctcagagacccatgaagcgcacaggggtttggacggcggattctcaaggctacatgactctgaaacccctgaagatatccccatctctactgcgagtgtcccagctgttacggatgaggagcccagcaaggcttctccaccagctggtgttcctgaaaagccagaagctgcgcacgaattggtactataattgatgcggttttgcttcatacatgcatgtaaatagacatgaaatgggatagccctggaactcattctgtggtcttgtggttggcatcttcagattgaaaacctctttgaaggttgaaagttattgggatctaaaggagtttgcaatttgtacctggtctttttgatcaattagtaatcagtattacccggcagtggggaaatgaacttc

SEQ ID NO: 1634 - protein, 314 aa, Zea mays subsp. mays
  peptide (1)..(314): Ceres Seq. ID no. 12359685
  misc_feature (9)..(76): Pfam Name: RNA recognition motif. (a.k.a. RRM, RBD, or RNP domain) Pfam Description: RNA recognition motif. (a.k.a. RRM, RBD, or RNP
  misc_feature (4)..(273): Homolog of NCBI NO: 21592997 NR Description: unknown [Arabidopsis thaliana]
  misc_feature (4)..(273): Homolog of NCBI NO: 15237419 NR Description: RRM-containing protein
  misc_feature (1)..(248): Homolog of NCBI NO: 34897896 NR Description: ESTs D15336(C0474),C98053(C0474) correspond to a of the predicted gene.~Similar to Arabidopsis thaliana DNA
  misc_feature (8)..(276): Homolog of NCBI NO: 8809670 NR Description: gene_id:MSD23.5~pir||C71447~similar to unknown
  misc_feature (4)..(276): Homolog of NCBI NO: 30695063 NR Description: RNA recognition motif (RRM)-containing protein
  misc_feature (6)..(306): Homolog of NCBI NO: 7485085 NR Description: hypothetical protein - Arabidopsis thaliana
  misc_feature (6)..(306): Homolog of NCBI NO: 18414951 NR Description: RRM-containing protein
  misc_feature (5)..(292): Homolog of NCBI NO: 38344181 NR Description: OSJNBa0053K19.20 [Oryza sativa (japonica
  misc_feature (57)..(294): Homolog of NCBI NO: 18542166 NR Description: putative aldose reductase-related protein [Zea
  misc_feature (1)..(314): Homolog of NCBI NO: 38347069 NR Description: OSJNBa0006A01.10 [Oryza sativa (japonica
MATSMLSTVKVSNVSLKAAQRDIKEFFSFSGDIVHVEMQSFDELSQVAYITFKDKQGAETAMLLTGATIVDMAVIVTPANDYELPSSVLAALEPKDTKPSALQKAEDIVGTMLAKGFILGRDALDKAKALDEKHQLTSTATARVSSFDKRIGLSEKISVGTSVVNDKVKEMDQKYQVSEKTKSALAAAEHSVSTAGSAIMKNRYVLTGAAWVTGAFSKVTSAANEAGAKAKEKIAVEQEHKNAEGGPAQANISETHEAHRGLDGGFSRLHDSETPEDIPISTASVPAVTDEEPSKASPPAGVPEKPEAAHELVL

SEQ ID NO: 1635 - protein, 310 aa, Zea mays subsp. mays
  peptide (1)..(310): Ceres Seq. ID no. 12359686
  misc_feature (5)..(72): Pfam Name: RNA recognition motif. (a.k.a. RRM, RBD, or RNP domain) Pfam Description: RNA recognition motif. (a.k.a. RRM, RBD, or RNP
  misc_feature (1)..(269): Homolog of NCBI NO: 21592997 NR Description: unknown [Arabidopsis thaliana]
  misc_feature (1)..(269): Homolog of NCBI NO: 15237419 NR Description: RRM-containing protein
  misc_feature (1)..(244): Homolog of NCBI NO: 34897896 NR Description: ESTs D15336(C0474),C98053(C0474) correspond to a of the predicted gene.~Similar to Arabidopsis thaliana DNA
  misc_feature (4)..(272): Homolog of NCBI NO: 8809670 NR Description: gene_id:MSD23.5~pir||C71447~similar to unknown
  misc_feature (1)..(272): Homolog of NCBI NO: 30695063 NR Description: RNA recognition motif (RRM)-containing protein
  misc_feature (2)..(302): Homolog of NCBI NO: 7485085 NR Description: hypothetical protein - Arabidopsis thaliana
  misc_feature (2)..(302): Homolog of NCBI NO: 18414951 NR Description: RRM-containing protein
  misc_feature (1)..(288): Homolog of NCBI NO: 38344181 NR Description: OSJNBa0053K19.20 [Oryza sativa (japonica
  misc_feature (53)..(290): Homolog of NCBI NO: 18542166 NR Description: putative aldose reductase-related protein [Zea
  misc_feature (1)..(310): Homolog of NCBI NO: 38347069 NR Description: OSJNBa0006A01.10 [Oryza sativa (japonica
MLSTVKVSNVSLKAAQRDIKEFFSFSGDIVHVEMQSFDELSQVAYITFKDKQGAETAMLLTGATIVDMAVIVTPANDYELPSSVLAALEPKDTKPSALQKAEDIVGTMLAKGFILGRDALDKAKALDEKHQLTSTATARVSSFDKRIGLSEKISVGTSVVNDKVKEMDQKYQVSEKTKSALAAAEHSVSTAGSAIMKNRYVLTGAAWVTGAFSKVTSAANEAGAKAKEKIAVEQEHKNAEGGPAQANISETHEAHRGLDGGFSRLHDSETPEDIPISTASVPAVTDEEPSKASPPAGVPEKPEAAHELVL

SEQ ID NO: 1636 - protein, 277 aa, Zea mays subsp. mays
  peptide (1)..(277): Ceres Seq. ID no. 12359687
  misc_feature (1)..(236): Homolog of NCBI NO: 21592997 NR Description: unknown [Arabidopsis thaliana]
  misc_feature (1)..(236): Homolog of NCBI NO: 15237419 NR Description: RRM-containing protein
  misc_feature (1)..(211): Homolog of NCBI NO: 34897896 NR Description: ESTs D15336(C0474),C98053(C0474) correspond to a of the predicted gene.~Similar to Arabidopsis thaliana DNA
  misc_feature (1)..(239): Homolog of NCBI NO: 8809670 NR Description: gene_id:MSD23.5~pir||C71447~similar to unknown
  misc_feature (1)..(239): Homolog of NCBI NO: 30695063 NR Description: RNA recognition motif (RRM)-containing protein
  misc_feature (1)..(269): Homolog of NCBI NO: 7485085 NR Description: hypothetical protein - Arabidopsis thaliana
  misc_feature (1)..(269): Homolog of NCBI NO: 18414951 NR Description: RRM-containing protein
  misc_feature (1)..(255): Homolog of NCBI NO: 38344181 NR Description: OSJNBa0053K19.20 [Oryza sativa (japonica
  misc_feature (20)..(257): Homolog of NCBI NO: 18542166 NR Description: putative aldose reductase-related protein [Zea
  misc_feature (1)..(277): Homolog of NCBI NO: 38347069 NR Description: OSJNBa0006A01.10 [Oryza sativa (japonica
MQSFDELSQVAYITFKDKQGAETAMLLTGATIVDMAVIVTPANDYELPSSVLAALEPKDTKPSALQKAEDIVGTMLAKGFILGRDALDKAKALDEKHQLTSTATARVSSFDKRIGLSEKISVGTSVVNDKVKEMDQKYQVSEKTKSALAAAEHSVSTAGSAIMKNRYVLTGAAWVTGAFSKVTSAANEAGAKAKEKIAVEQEHKNAEGGPAQANISETHEAHRGLDGGFSRLHDSETPEDIPISTASVPAVTDEEPSKASPPAGVPEKPEAAHELVL

SEQ ID NO: 1637 - DNA, 1607 bp, Zea mays subsp. mays
  misc_feature (1)..(1607): Ceres Seq. ID no. 12351896
  misc_feature: MA Experiment ID: 108504 Result: Down-regulated in Transcription
  misc_feature: MA Experiment 108504 PARAMETER Experiment Name: Zm_Drought_P Parameter: Age (day) Value: 8
  misc_feature: MA Experiment 108504 PARAMETER Experiment Name: Zm_Drought_P Parameter: Organism Value: Zea mays
  misc_feature: MA Experiment 108504 PARAMETER Experiment Name: Zm_Drought_P Parameter: Plant Line Value: 35A19
  misc_feature: MA Experiment 108504 PARAMETER Experiment Name: Zm_Drought_P Parameter: Timepoint (hr) Value: 12
  misc_feature: MA Experiment 108504 PARAMETER Experiment Name: Zm_Drought_P Parameter: Tissue Value: Aerial
  misc_feature: MA Experiment 108504 PARAMETER Experiment Name: Zm_Drought_P Parameter: Treatment Value: Drought vs. No Drought
  misc_feature: MA Experiment ID: 108522 Result: Down-regulated in Transcription
  misc_feature: MA Experiment 108522 PARAMETER Experiment Name: Zm_42deg_Heat_P Parameter: Age (day) Value: 8
  misc_feature: MA Experiment 108522 PARAMETER Experiment Name: Zm_42deg_Heat_P Parameter: Organism Value: Zea mays
  misc_feature: MA Experiment 108522 PARAMETER Experiment Name: Zm_42deg_Heat_P Parameter: Plant Line Value: 35A19
  misc_feature: MA Experiment 108522 PARAMETER Experiment Name: Zm_42deg_Heat_P Parameter: Temperature (deg C) Value: 42 vs. 22
  misc_feature: MA Experiment 108522 PARAMETER Experiment Name: Zm_42deg_Heat_P Parameter: Timepoint (hr) Value: 1
  misc_feature: MA Experiment 108522 PARAMETER Experiment Name: Zm_42deg_Heat_P Parameter: Tissue Value: Aerial
  misc_feature: MA Experiment ID: 108523 Result: Down-regulated in Transcription
  misc_feature: MA Experiment 108523 PARAMETER Experiment Name: Zm_42deg_Heat_P Parameter: Age (day) Value: 8
  misc_feature: MA Experiment 108523 PARAMETER Experiment Name: Zm_42deg_Heat_P Parameter: Organism Value: Zea mays
  misc_feature: MA Experiment 108523 PARAMETER Experiment Name: Zm_42deg_Heat_P Parameter: Plant Line Value: 35A19
  misc_feature: MA Experiment 108523 PARAMETER Experiment Name: Zm_42deg_Heat_P Parameter: Temperature (deg C) Value: 42 vs. 22
  misc_feature: MA Experiment 108523 PARAMETER Experiment Name: Zm_42deg_Heat_P Parameter: Timepoint (hr) Value: 6
  misc_feature: MA Experiment 108523 PARAMETER Experiment Name: Zm_42deg_Heat_P Parameter: Tissue Value: Aerial
  misc_feature: MA Experiment ID: 108527 Result: Down-regulated in Transcription
  misc_feature: MA Experiment 108527 PARAMETER Experiment Name: Zm_5mM_NO_P Parameter: Age (day) Value: 8
  misc_feature: MA Experiment 108527 PARAMETER Experiment Name: Zm_5mM_NO_P Parameter: Organism Value: Zea mays
  misc_feature: MA Experiment 108527 PARAMETER Experiment Name: Zm_5mM_NO_P Parameter: Plant Line Value: 35A19
  misc_feature: MA Experiment 108527 PARAMETER Experiment Name: Zm_5mM_NO_P Parameter: Timepoint (hr) Value: 6
  misc_feature: MA Experiment 108527 PARAMETER Experiment Name: Zm_5mM_NO_P Parameter: Tissue Value: Aerial
  misc_feature: MA Experiment 108527 PARAMETER Experiment Name: Zm_5mM_NO_P Parameter: Treatment Value: 5mM NO vs. No Treatment
  misc_feature: MA Experiment ID: 108528 Result: Up-regulated in Transcription
  misc_feature: MA Experiment 108528 PARAMETER Experiment Name: Zm_Imbibed_Seeds_P Parameter: Age (day) Value: 5 vs. 2
  misc_feature: MA Experiment 108528 PARAMETER Experiment Name: Zm_Imbibed_Seeds_P Parameter: Organism Value: Zea mays
  misc_feature: MA Experiment 108528 PARAMETER Experiment Name: Zm_Imbibed_Seeds_P Parameter: Plant Line Value: 35A19
  misc_feature: MA Experiment 108528 PARAMETER Experiment Name: Zm_Imbibed_Seeds_P Parameter: Tissue Value: Aerial vs. Embryo
  misc_feature: MA Experiment ID: 108529 Result: Down-regulated in Transcription
  misc_feature: MA Experiment 108529 PARAMETER Experiment Name: Zm_Imbibed_Seeds_P Parameter: Age (day) Value: 5 vs. 2
  misc_feature: MA Experiment 108529 PARAMETER Experiment Name: Zm_Imbibed_Seeds_P Parameter: Organism Value: Zea mays
  misc_feature: MA Experiment 108529 PARAMETER Experiment Name: Zm_Imbibed_Seeds_P Parameter: Plant Line Value: 35A19
  misc_feature: MA Experiment 108529 PARAMETER Experiment Name: Zm_Imbibed_Seeds_P Parameter: Tissue Value: Roots vs. Embryo
  misc_feature: MA Experiment ID: 108535 Result: Up-regulated in Transcription
  misc_feature: MA Experiment 108535 PARAMETER Experiment Name: Zm_Meristem_P Parameter: Age (day) Value: 8
  misc_feature: MA Experiment 108535 PARAMETER Experiment Name: Zm_Meristem_P Parameter: Organism Value: Zea mays
  misc_feature: MA Experiment 108535 PARAMETER Experiment Name: Zm_Meristem_P Parameter: Plant Line Value: 35A19
  misc_feature: MA Experiment 108535 PARAMETER Experiment Name: Zm_Meristem_P Parameter: Tissue Value: Root Meristem vs. Above Root Meristem
  misc_feature: MA Experiment ID: 108536 Result: Down-regulated in Transcription
  misc_feature: MA Experiment 108536 PARAMETER Experiment Name: Zm_Meristem_P Parameter: Age (day) Value: 8
  misc_feature: MA Experiment 108536 PARAMETER Experiment Name: Zm_Meristem_P Parameter: Organism Value: Zea mays
  misc_feature: MA Experiment 108536 PARAMETER Experiment Name: Zm_Meristem_P Parameter: Plant Line Value: 35A19
  misc_feature: MA Experiment 108536 PARAMETER Experiment Name: Zm_Meristem_P Parameter: Tissue Value: Shoot Meristem vs. Above Shoot Meristem
  misc_feature: MA Experiment ID: 108543 Result: Up-regulated in Transcription
  misc_feature: MA Experiment ID: 108544 Result: Down-regulated in Transcription
  misc_feature: MA Experiment ID: 108545 Result: Up-regulated in Transcription
  misc_feature: MA Experiment 108545 PARAMETER Experiment Name: Zm_Imbibed_Seeds_P Parameter: Age (day) Value: 3 vs. 2
  misc_feature: MA Experiment 108545 PARAMETER Experiment Name: Zm_Imbibed_Seeds_P Parameter: Organism Value: Zea mays
  misc_feature: MA Experiment 108545 PARAMETER Experiment Name: Zm_Imbibed_Seeds_P Parameter: Plant Line Value: 35A19
  misc_feature: MA Experiment 108545 PARAMETER Experiment Name: Zm_Imbibed_Seeds_P Parameter: Tissue Value: Aerial vs. Embryo
  misc_feature: MA Experiment ID: 108546 Result: Down-regulated in Transcription
  misc_feature: MA Experiment 108546 PARAMETER Experiment Name: Zm_Imbibed_Seeds_P Parameter: Age (day) Value: 3 vs. 2
  misc_feature: MA Experiment 108546 PARAMETER Experiment Name: Zm_Imbibed_Seeds_P Parameter: Organism Value: Zea mays
  misc_feature: MA Experiment 108546 PARAMETER Experiment Name: Zm_Imbibed_Seeds_P Parameter: Plant Line Value: 35A19
  misc_feature: MA Experiment 108546 PARAMETER Experiment Name: Zm_Imbibed_Seeds_P Parameter: Tissue Value: Roots vs. Embryo
  misc_feature: MA Experiment ID: 108556 Result: Down-regulated in Transcription
  misc_feature: MA Experiment 108556 PARAMETER Experiment Name: Zm_Drought_P Parameter: Age (day) Value: 9
  misc_feature: MA Experiment 108556 PARAMETER Experiment Name: Zm_Drought_P Parameter: Organism Value: Zea mays
  misc_feature: MA Experiment 108556 PARAMETER Experiment Name: Zm_Drought_P Parameter: Plant Line Value: 35A19
  misc_feature: MA Experiment 108556 PARAMETER Experiment Name: Zm_Drought_P Parameter: Timepoint (hr) Value: 24
  misc_feature: MA Experiment 108556 PARAMETER Experiment Name: Zm_Drought_P Parameter: Tissue Value: Aerial
  misc_feature: MA Experiment 108556 PARAMETER Experiment Name: Zm_Drought_P Parameter: Treatment Value: Drought vs. No Drought
  misc_feature: MA Experiment ID: 108559 Result: Down-regulated in Transcription
  misc_feature: MA Experiment 108559 PARAMETER Experiment Name: Zm_5mM_NO_P Parameter: Age (day) Value: 8
  misc_feature: MA Experiment 108559 PARAMETER Experiment Name: Zm_5mM_NO_P Parameter: Organism Value: Zea mays
  misc_feature: MA Experiment 108559 PARAMETER Experiment Name: Zm_5mM_NO_P Parameter: Plant Line Value: 35A19
  misc_feature: MA Experiment 108559 PARAMETER Experiment Name: Zm_5mM_NO_P Parameter: Timepoint (hr) Value: 12
  misc_feature: MA Experiment 108559 PARAMETER Experiment Name: Zm_5mM_NO_P Parameter: Tissue Value: Aerial
  misc_feature: MA Experiment 108559 PARAMETER Experiment Name: Zm_5mM_NO_P Parameter: Treatment Value: 5mM NO vs. No Treatment
  misc_feature: MA Experiment ID: 108597 Result: Down-regulated in Transcription
  misc_feature: MA Experiment 108597 PARAMETER Experiment Name: Zm_100uM_ABA_P Parameter: Age (day) Value: 9
  misc_feature: MA Experiment 108597 PARAMETER Experiment Name: Zm_100uM_ABA_P Parameter: Organism Value: Zea mays
  misc_feature: MA Experiment 108597 PARAMETER Experiment Name: Zm_100uM_ABA_P Parameter: Plant Line Value: 35A19
  misc_feature: MA Experiment 108597 PARAMETER Experiment Name: Zm_100uM_ABA_P Parameter: Timepoint (hr) Value: 24
  misc_feature: MA Experiment 108597 PARAMETER Experiment Name: Zm_100uM_ABA_P Parameter: Tissue Value: Aerial
  misc_feature: MA Experiment 108597 PARAMETER Experiment Name: Zm_100uM_ABA_P Parameter: Treatment Value: 100uM ABA vs. No Treatment
  misc_feature: MA Experiment ID: 20000480 Result: Down-regulated in Transcription
  misc_feature: MA Experiment 20000480 PARAMETER Experiment Name: Zm_Drought_P Parameter: Age (day) Value: 11
  misc_feature: MA Experiment 20000480 PARAMETER Experiment Name: Zm_Drought_P Parameter: Organism Value: Zea mays
  misc_feature: MA Experiment 20000480 PARAMETER Experiment Name: Zm_Drought_P Parameter: Plant Line Value: 35A19
  misc_feature: MA Experiment 20000480 PARAMETER Experiment Name: Zm_Drought_P Parameter: Timepoint (hr) Value: 72
  misc_feature: MA Experiment 20000480 PARAMETER Experiment Name: Zm_Drought_P Parameter: Tissue Value: Aerial
  misc_feature: MA Experiment 20000480 PARAMETER Experiment Name: Zm_Drought_P Parameter: Treatment Value: Drought vs. No Drought
  misc_feature: MA Experiment ID: 20000532 Result: Down-regulated in Transcription
  misc_feature: MA Experiment 20000532 PARAMETER Experiment Name: Zm_0.001percent_MeJA_P Parameter: Age (day) Value: 10
  misc_feature: MA Experiment 20000532 PARAMETER Experiment Name: Zm_0.001percent_MeJA_P Parameter: Organism Value: Zea mays
  misc_feature: MA Experiment 20000532 PARAMETER Experiment Name: Zm_0.001percent_MeJA_P Parameter: Plant Line Value: 35A19
  misc_feature: MA Experiment 20000532 PARAMETER Experiment Name: Zm_0.001percent_MeJA_P Parameter: Timepoint (hr) Value: 48
  misc_feature: MA Experiment 20000532 PARAMETER Experiment Name: Zm_0.001percent_MeJA_P Parameter: Tissue Value: Aerial
  misc_feature: MA Experiment 20000532 PARAMETER Experiment Name: Zm_0.001percent_MeJA_P Parameter: Treatment Value: 0.001percent MeJA vs. No Treatment
  misc_feature: MA Experiment ID: 20000533 Result: Down-regulated in Transcription
  misc_feature: MA Experiment 20000533 PARAMETER Experiment Name: Zm_0.001percent_MeJA_P Parameter: Age (day) Value: 11
  misc_feature: MA Experiment 20000533 PARAMETER Experiment Name: Zm_0.001percent_MeJA_P Parameter: Organism Value: Zea mays
  misc_feature: MA Experiment 20000533 PARAMETER Experiment Name: Zm_0.001percent_MeJA_P Parameter: Plant Line Value: 35A19
  misc_feature: MA Experiment 20000533 PARAMETER Experiment Name: Zm_0.001percent_MeJA_P Parameter: Timepoint (hr) Value: 72
  misc_feature: MA Experiment 20000533 PARAMETER Experiment Name: Zm_0.001percent_MeJA_P Parameter: Tissue Value: Aerial
  misc_feature: MA Experiment 20000533 PARAMETER Experiment Name: Zm_0.001percent_MeJA_P Parameter: Treatment Value: 0.001percent MeJA vs. No Treatment
  misc_feature: MA Experiment ID: 20000535 Result: Down-regulated in Transcription
  misc_feature: MA Experiment 20000535 PARAMETER Experiment Name: Zm_Hybrid_Seed_Dev_P Parameter: DAP Value: 30 vs. 12
  misc_feature: MA Experiment 20000535 PARAMETER Experiment Name: Zm_Hybrid_Seed_Dev_P Parameter: Organism Value: Zea mays
  misc_feature: MA Experiment 20000535 PARAMETER Experiment Name: Zm_Hybrid_Seed_Dev_P Parameter: Plant Line Value: 35A19
  misc_feature: MA Experiment 20000535 PARAMETER Experiment Name: Zm_Hybrid_Seed_Dev_P Parameter: Tissue Value: Embryo vs. Unfert Floret
  misc_feature: MA Experiment ID: 20000626 Result: Down-regulated in Transcription
  misc_feature: MA Experiment 20000626 PARAMETER Experiment Name: Zm_Herbicide-Treatments_P Parameter: Timepoint (hr) Value: 12
  misc_feature: MA Experiment 20000626 PARAMETER Experiment Name: Zm_Herbicide-Treatments_P Parameter: Tissue Value: Aerial
  misc_feature: MA Experiment 20000626 PARAMETER Experiment Name: Zm_Herbicide-Treatments_P Parameter: Treatment Value: Roundup vs. No Treatment
atcatctcttcgacactctcacatgcatcggaagattccgctgacactaaaaagatcgaaatggcgccgggatcgtcgtcgtctcgtaaggccaaggccctcaaggcatcgtaccggctcgtcgccgacaacttcctcgccgtcctcgccatggtttctgtcgtcgccgtgctcttcgctgcatggccgatcagcatcgaggaccttgcctgccggctgcacgcggtgcggccactccacgtcctcacggcggcgatcctgacggcggccctcgcgaagctgaggcgcatgagccggccgagcgacgtgtatctcgtggagtacggctgcttctggcccaagccgtgcttccgggcgccgttcgcgacgtgcctggagcacgtgcggctcttgccgtacctggtcaacgaggacgacatcagctggggctggcggctcctccagcggtccgggatcggcgaggagacctgcgtgccgtacgcctaccactacctgcccccggaccgcagctttagggcctccctggacgagaccgagctggtcatcttctccgccgtcgacgatgtgttcgcccggacgacggccgtgacgcccgcggacatcggcgtggtgatcgtgaactgcagcatcttcacgcccacgccggtgttcacggacatgatcgtgaacaggtacaagctgcgcgccgacgtgcggagcgtgaacctgtccgggatggggtgcagcgcggcgctcatctcgatcggtctcgccaggaacatgctgcaggtggcgccgccgggcacgcacgcgctgatcgtgtccacggagatcctctcgtcgcagtactacgtcggcatggaccgctccatgctcctgcccaactgcctcttccgcatgggcgccgccgccatgatcatgtccaacaccgcggcccgaggcgcgcggttccggctcgcccgcgtcgtgcgcacggtggcctccgcgcgggacgccgcctaccggtgcgtgttccaggtggaggacgaggagagcaacacggggatccggctctccaaggacctcgtgcccactgccgcccagaccctgaaaagcaacatcgtcgccttcgggcccctggtcctgcctgcctcggagaagctcctcgtcgctctgtccatcctgaggcggaggctagtacagagcagccgggggagggtgtaccgcccggacttccgcaccgcgttcgagcacttctgcatccacgccggcgggcgcggggtcatcgacgaggtgcagcgcggcctcggcctctccgacgaggacgtggaggcgtcgcggatgacgctgcaccggttcgggaacacgtccagcagttcggtggtgtacgagctggcgtacatcgaggccaagggcagcatgaggaagggagaccgcgtgtggatgatctccttcggcgccggcttcgactgcagcagcgtggcgtgggagtgcatcgagcccgccgccgacgctgctgggccgtgggccgactgtatccaccgctacccagtgcagctccctaaattgatggaggcccttgattgaatccgtacatgtagacgtgaagtggcataatcaatcaatgttgtactgtatctttaatgtcc

SEQ ID NO: 1638 - protein, 514 aa, Zea mays subsp. mays
  peptide (1)..(514): Ceres Seq. ID no. 12351897
  misc_feature (341)..(486): Pfam Name: Chalcone and stilbene synthases, C-terminal domain Pfam Description: Chalcone and stilbene synthases, C-terminal
  misc_feature (24)..(506): Homolog of NCBI NO: 15236133 NR Description: putative ketoacyl-CoA synthase; protein id:
  misc_feature (23)..(506): Homolog of NCBI NO: 15226724 NR Description: putative beta-ketoacyl-CoA synthase; protein id:
  misc_feature (17)..(506): Homolog of NCBI NO: 15223556 NR Description: very-long-chain fatty acid condensing enzyme
  misc_feature (23)..(511): Homolog of NCBI NO: 21593111 NR Description: very-long-chain fatty acid condensing enzyme CUT1
  misc_feature (23)..(511): Homolog of NCBI NO: 15221431 NR Description: very-long-chain fatty acid condensing enzyme
  misc_feature (26)..(511): Homolog of NCBI NO: 28393607 NR Description: putative fatty acid condensing enzyme CUT1
  misc_feature (26)..(511): Homolog of NCBI NO: 15222592 NR Description: fatty acid condensing enzyme CUT1, putative
  misc_feature (23)..(511): Homolog of NCBI NO: 17979464 NR Description: At1g68530/T26J14_10 [Arabidopsis thaliana]
  misc_feature (26)..(511): Homolog of NCBI NO: 21618184 NR Description: fatty acid condensing enzyme CUT1, putative
  misc_feature (34)..(509): Homolog of NCBI NO: 34913436 NR Description: putative fatty acid condensing enzyme CUT1
IISSTLSHASEDSADTKKIEMAPGSSSSRKAKALKASYRLVADNFLAVLAMVSVVAVLFAAWPISIEDLACRLHAVRPLHVLTAAILTAALAKLRRMSRPSDVYLVEYGCFWPKPCFRAPFATCLEHVRLLPYLVNEDDISWGWRLLQRSGIGEETCVPYAYHYLPPDRSFRASLDETELVIFSAVDDVFARTTAVTPADIGVVIVNCSIFTPTPVFTDMIVNRYKLRADVRSVNLSGMGCSAALISIGLARNMLQVAPPGTHALIVSTEILSSQYYVGMDRSMLLPNCLFRMGAAAMIMSNTAARGARFRLARVVRTVASARDAAYRCVFQVEDEESNTGIRLSKDLVPTAAQTLKSNIVAFGPLVLPASEKLLVALSILRRRLVQSSRGRVYRPDFRTAFEHFCIHAGGRGVIDEVQRGLGLSDEDVEASRMTLHRFGNTSSSSVVYELAYIEAKGSMRKGDRVWMISFGAGFDCSSVAWECIEPAADAAGPWADCIHRYPVQLPKLMEALD

SEQ ID NO: 1639 - protein, 494 aa, Zea mays subsp. mays
  peptide (1)..(494): Ceres Seq. ID no. 12351898
  misc_feature (321)..(466): Pfam Name: Chalcone and stilbene synthases, C-terminal domain Pfam Description: Chalcone and stilbene synthases, C-terminal
  misc_feature (4)..(486): Homolog of NCBI NO: 15236133 NR Description: putative ketoacyl-CoA synthase; protein id:
  misc_feature (3)..(486): Homolog of NCBI NO: 15226724 NR Description: putative beta-ketoacyl-CoA synthase; protein id:
  misc_feature (1)..(486): Homolog of NCBI NO: 15223556 NR Description: very-long-chain fatty acid condensing enzyme
  misc_feature (3)..(491): Homolog of NCBI NO: 21593111 NR Description: very-long-chain fatty acid condensing enzyme CUT1
  misc_feature (3)..(491): Homolog of NCBI NO: 15221431 NR Description: very-long-chain fatty acid condensing enzyme
  misc_feature (6)..(491): Homolog of NCBI NO: 28393607 NR Description: putative fatty acid condensing enzyme CUT1
  misc_feature (6)..(491): Homolog of NCBI NO: 15222592 NR Description: fatty acid condensing enzyme CUT1, putative
  misc_feature (3)..(491): Homolog of NCBI NO: 17979464 NR Description: At1g68530/T26J14_10 [Arabidopsis thaliana]
  misc_feature (6)..(491): Homolog of NCBI NO: 21618184 NR Description: fatty acid condensing enzyme CUT1, putative
  misc_feature (14)..(489): Homolog of NCBI NO: 34913436 NR Description: putative fatty acid condensing enzyme CUT1
MAPGSSSSRKAKALKASYRLVADNFLAVLAMVSVVAVLFAAWPISIEDLACRLHAVRPLHVLTAAILTAALAKLRRMSRPSDVYLVEYGCFWPKPCFRAPFATCLEHVRLLPYLVNEDDISWGWRLLQRSGIGEETCVPYAYHYLPPDRSFRASLDETELVIFSAVDDVFARTTAVTPADIGVVIVNCSIFTPTPVFTDMIVNRYKLRADVRSVNLSGMGCSAALISIGLARNMLQVAPPGTHALIVSTEILSSQYYVGMDRSMLLPNCLFRMGAAAMIMSNTAARGARFRLARVVRTVASARDAAYRCVFQVEDEESNTGIRLSKDLVPTAAQTLKSNIVAFGPLVLPASEKLLVALSILRRRLVQSSRGRVYRPDFRTAFEHFCIHAGGRGVIDEVQRGLGLSDEDVEASRMTLHRFGNTSSSSVVYELAYIEAKGSMRKGDRVWMISFGAGFDCSSVAWECIEPAADAAGPWADCIHRYPVQLPKLMEALD

SEQ ID NO: 1640 - protein, 464 aa, Zea mays subsp. mays
  peptide (1)..(464): Ceres Seq. ID no. 12351899
  misc_feature (291)..(436): Pfam Name: Chalcone and stilbene synthases, C-terminal domain Pfam Description: Chalcone and stilbene synthases, C-terminal
  misc_feature (1)..(456): Homolog of NCBI NO: 15236133 NR Description: putative ketoacyl-CoA synthase; protein id:
  misc_feature (1)..(456): Homolog of NCBI NO: 15226724 NR Description: putative beta-ketoacyl-CoA synthase; protein id:
  misc_feature (1)..(456): Homolog of NCBI NO: 15223556 NR Description: very-long-chain fatty acid condensing enzyme
  misc_feature (1)..(461): Homolog of NCBI NO: 21593111 NR Description: very-long-chain fatty acid condensing enzyme CUT1
  misc_feature (1)..(461): Homolog of NCBI NO: 15221431 NR Description: very-long-chain fatty acid condensing enzyme
  misc_feature (1)..(461): Homolog of NCBI NO: 28393607 NR Description: putative fatty acid condensing enzyme CUT1
  misc_feature (1)..(461): Homolog of NCBI NO: 15222592 NR Description: fatty acid condensing enzyme CUT1, putative
  misc_feature (1)..(461): Homolog of NCBI NO: 17979464 NR Description: At1g68530/T26J14_10 [Arabidopsis thaliana]
  misc_feature (1)..(461): Homolog of NCBI NO: 21618184 NR Description: fatty acid condensing enzyme CUT1, putative
  misc_feature (1)..(459): Homolog of NCBI NO: 34913436 NR Description: putative fatty acid condensing enzyme CUT1
MVSVVAVLFAAWPISIEDLACRLHAVRPLHVLTAAILTAALAKLRRMSRPSDVYLVEYGCFWPKPCFRAPFATCLEHVRLLPYLVNEDDISWGWRLLQRSGIGEETCVPYAYHYLPPDRSFRASLDETELVIFSAVDDVFARTTAVTPADIGVVIVNCSIFTPTPVFTDMIVNRYKLRADVRSVNLSGMGCSAALISIGLARNMLQVAPPGTHALIVSTEILSSQYYVGMDRSMLLPNCLFRMGAAAMIMSNTAARGARFRLARVVRTVASARDAAYRCVFQVEDEESNTGIRLSKDLVPTAAQTLKSNIVAFGPLVLPASEKLLVALSILRRRLVQSSRGRVYRPDFRTAFEHFCIHAGGRGVIDEVQRGLGLSDEDVEASRMTLHRFGNTSSSSVVYELAYIEAKGSMRKGDRVWMISFGAGFDCSSVAWECIEPAADAAGPWADCIHRYPVQLPKLMEALD

SEQ ID NO: 1641 - DNA, 1024 bp, Zea mays subsp. mays
  misc_feature (1)..(1024): Ceres Seq. ID no. 12341440
  misc_feature: MA Experiment ID: 108530 Result: Down-regulated in Transcription
  misc_feature: MA Experiment 108530 PARAMETER Experiment Name: Zm_Imbibed_Seeds_P Parameter: Age (day) Value: 6 vs. 2
  misc_feature: MA Experiment 108530 PARAMETER Experiment Name: Zm_Imbibed_Seeds_P Parameter: Organism Value: Zea mays
  misc_feature: MA Experiment 108530 PARAMETER Experiment Name: Zm_Imbibed_Seeds_P Parameter: Plant Line Value: 35A19
  misc_feature: MA Experiment 108530 PARAMETER Experiment Name: Zm_Imbibed_Seeds_P Parameter: Tissue Value: Aerial vs. Embryo
  misc_feature: MA Experiment ID: 108535 Result: Up-regulated in Transcription
  misc_feature: MA Experiment 108535 PARAMETER Experiment Name: Zm_Meristem_P Parameter: Age (day) Value: 8
  misc_feature: MA Experiment 108535 PARAMETER Experiment Name: Zm_Meristem_P Parameter: Organism Value: Zea mays
  misc_feature: MA Experiment 108535 PARAMETER Experiment Name: Zm_Meristem_P Parameter: Plant Line Value: 35A19
  misc_feature: MA Experiment 108535 PARAMETER Experiment Name: Zm_Meristem_P Parameter: Tissue Value: Root Meristem vs. Above Root Meristem
  misc_feature: MA Experiment ID: 108544 Result: Down-regulated in Transcription
  misc_feature: MA Experiment ID: 20000487 Result: Up-regulated in Transcription
  misc_feature: MA Experiment 20000487 PARAMETER Experiment Name: Zm_50mM_NH4NO3_L_to_H_P Parameter: Organism Value: Zea mays
  misc_feature: MA Experiment 20000487 PARAMETER Experiment Name: Zm_50mM_NH4NO3_L_to_H_P Parameter: Timepoint (hr) Value: 4
  misc_feature: MA Experiment 20000487 PARAMETER Experiment Name: Zm_50mM_NH4NO3_L_to_H_P Parameter: Tissue Value: Leaves
  misc_feature: MA Experiment 20000487 PARAMETER Experiment Name: Zm_50mM_NH4NO3_L_to_H_P Parameter: Treatment Value: 50mM NH4NO3 vs. 100mM Mannitol
  misc_feature: MA Experiment ID: 20000488 Result: Up-regulated in Transcription
  misc_feature: MA Experiment 20000488 PARAMETER Experiment Name: Zm_50mM_NH4NO3_L_to_H_P Parameter: Organism Value: Zea mays
  misc_feature: MA Experiment 20000488 PARAMETER Experiment Name: Zm_50mM_NH4NO3_L_to_H_P Parameter: Timepoint (hr) Value: 8
  misc_feature: MA Experiment 20000488 PARAMETER Experiment Name: Zm_50mM_NH4NO3_L_to_H_P Parameter: Tissue Value: Leaves
  misc_feature: MA Experiment 20000488 PARAMETER Experiment Name: Zm_50mM_NH4NO3_L_to_H_P Parameter: Treatment Value: 50mM NH4NO3 vs. 100mM Mannitol
  misc_feature: MA Experiment ID: 20000535 Result: Up-regulated in Transcription
  misc_feature: MA Experiment 20000535 PARAMETER Experiment Name: Zm_Hybrid_Seed_Dev_P Parameter: DAP Value: 30 vs. 12
  misc_feature: MA Experiment 20000535 PARAMETER Experiment Name: Zm_Hybrid_Seed_Dev_P Parameter: Organism Value: Zea mays
  misc_feature: MA Experiment 20000535 PARAMETER Experiment Name: Zm_Hybrid_Seed_Dev_P Parameter: Plant Line Value: 35A19
  misc_feature: MA Experiment 20000535 PARAMETER Experiment Name: Zm_Hybrid_Seed_Dev_P Parameter: Tissue Value: Embryo vs. Unfert Floret
  misc_feature: MA Experiment ID: 20001612 Result: Up-regulated in Transcription
  misc_feature: MA Experiment 20001612 PARAMETER Experiment Name: Zm_50ppm_KNO3_L-to-H_P Parameter: Age (day) Value: 19
  misc_feature: MA Experiment 20001612 PARAMETER Experiment Name: Zm_50ppm_KNO3_L-to-H_P Parameter: Organism Value: Zea mays
  misc_feature: MA Experiment 20001612 PARAMETER Experiment Name: Zm_50ppm_KNO3_L-to-H_P Parameter: Plant Line Value: 35A19
  misc_feature: MA Experiment 20001612 PARAMETER Experiment Name: Zm_50ppm_KNO3_L-to-H_P Parameter: Timepoint (hr) Value: 8
  misc_feature: MA Experiment 20001612 PARAMETER Experiment Name: Zm_50ppm_KNO3_L-to-H_P Parameter: Tissue Value: Roots
  misc_feature: MA Experiment 20001612 PARAMETER Experiment Name: Zm_50ppm_KNO3_L-to-H_P Parameter: Treatment Value: 50ppm KNO3 vs. 50ppm KCl
  misc_feature: Phenotype: ROSETTE LEAVES Shape-Lanceolate
  misc_feature: Phenotype: WHOLE PLANT Color-Yellow-Green Viable 1
  misc_feature: Phenotype: CAULINE LEAVES Curled-Curled 1
  misc_feature: Phenotype: INFLORESCENCE Branching-Asecondary
  misc_feature: Phenotype: INFLORESCENCE Branching-No Branching
  misc_feature: Phenotype: INFLORESCENCE Height-Short
  misc_feature: Phenotype: INFLORESCENCE Other
  misc_feature: Phenotype: ROSETTE LEAVES Shape-Lanceolate
  misc_feature: Phenotype: WHOLE PLANT Size-Small
  misc_feature: Phenotype: INFLORESCENCE Branching-Asecondary
  misc_feature: Phenotype: INFLORESCENCE Branching-No Branching
  misc_feature: Phenotype: ROSETTE LEAVES Shape-Lanceolate
  misc_feature: Phenotype: ROSETTE LEAVES Other
  misc_feature: Phenotype: WHOLE PLANT Size-Small
  misc_feature: Phenotype: INFLORESCENCE Branching-Asecondary
  misc_feature: Phenotype: INFLORESCENCE Branching-No Branching
  misc_feature: Phenotype: ROSETTE LEAVES Curled-Curled 2
  misc_feature: Phenotype: ROSETTE LEAVES Disorganized Rosette-Disorganized Rosette
ataaattcctccgctccccttcgccgcttcctgtcgcgccgccgctcccctcccaacccactagctcaaaaccctagagctctcgcctgctcgcctccgccgccggagcgagctccccatcttcatccgtcaaccatggcgacccagatcagcaagaagaagaagttcgtcagcgacggtgttttctacgccgagctcaatgagatgctgacgcgggagctggcggaggacggctactctggcgtggaggtgcgcgtcacgccgatgcgcacggagatcatcatccgcgccacgcgcacgcagaacgtgctcggcgagaagggccgtaggatcagggagctcacctccgtcgtccagaagaggttcaacttccctgagaatggcgttgagctttatgccgagaaggtcgtcaaccgtgggctctgtgccatcgcgcaggccgagtccctccgttacaagctcctcggtggccttgccgtccgcagggcttgctacggtgttcttcgttatgttatggagagtggtgccaagggttgtgaggtgatcgtgagtggaaagctcagggcccaaagagccaagtccatgaagttcaaggatggctacatgatctcatctggtcaaccagtgaacgagtacattgactcggctgtgagacacgttcttctcagacagggtgttcttggcatcaaggtgaagatcatgcttgactgggacccgaagggcaaggttggcccgatcactcctcttccggacctggtgaccatccacaccccgaaggacgaggacgagccgcgccctccggtcttggcacctcctgaggtgtaaggtcccaactgtgtccttgaaatggcagtttgatcgggtcctagataggtttctatcttacgataaggacaatgctaaggcagttggttaccttaatctttatggacagatgctatgtgttgcttctgtggcacttttgtttaagctaagttttgcggagacaagatacttatatatgttcccgatgaaattatggttc

SEQ ID NO: 1642 - protein, 274 aa, Zea mays subsp. mays
  peptide (1)..(274): Ceres Seq. ID no. 12341441
  misc_feature (149)..(233): Pfam Name: Ribosomal protein S3, C-terminal domain Pfam Description: Ribosomal protein S3, C-terminal domain
  misc_feature (46)..(274): Homolog of NCBI NO: 37595356 NR Description: ribosomal protein S3 [Danio rerio]
  misc_feature (46)..(261): Homolog of NCBI NO: 15225107 NR Description: 40S ribosomal protein S3, putative
  misc_feature (46)..(274): Homolog of NCBI NO: 15232352 NR Description: 40S ribosomal protein S3, putative
  misc_feature (46)..(274): Homolog of NCBI NO: 28374213 NR Description: similar to 40S ribosomal protein S3 [Danio rerio]
  misc_feature (46)..(268): Homolog of NCBI NO: 12847921 NR Description: unnamed protein product [Mus musculus]
  misc_feature (46)..(268): Homolog of NCBI NO: 133940 NR Description: 40S ribosomal protein S3A (S1A)
  misc_feature (46)..(268): Homolog of NCBI NO: 27735393 NR Description: Similar to ribosomal protein S3 [Xenopus laevis]
  misc_feature (46)..(262): Homolog of NCBI NO: 15238533 NR Description: 40S ribosomal protein S3
  misc_feature (48)..(270): Homolog of NCBI NO: 14192875 NR Description: Putative 40S ribosomal protein; contains
  misc_feature (46)..(269): Homolog of NCBI NO: 22204124 NR Description: putative 40S ribosomal protein S3 [Triticum
INSSAPLRRFLSRRRSPPNPLAQNPRALACSPPPPERAPHLHPSTMATQISKKKKFVSDGVFYAELNEMLTRELAEDGYSGVEVRVTPMRTEIIIRATRTQNVLGEKGRRIRELTSVVQKRFNFPENGVELYAEKVVNRGLCAIAQAESLRYKLLGGLAVRRACYGVLRYVMESGAKGCEVIVSGKLRAQRAKSMKFKDGYMISSGQPVNEYIDSAVRHVLLRQGVLGIKVKIMLDWDPKGKVGPITPLPDLVTIHTPKDEDEPRPPVLAPPEV

SEQ ID NO: 1643 - protein, 229 aa, Zea mays subsp. mays
  peptide (1)..(229): Ceres Seq. ID no. 12341442
  misc_feature (104)..(188): Pfam Name: Ribosomal protein S3, C-terminal domain Pfam Description: Ribosomal protein S3, C-terminal domain
  misc_feature (1)..(229): Homolog of NCBI NO: 28374213 NR Description: similar to 40S ribosomal protein S3 [Danio rerio]
  misc_feature (1)..(223): Homolog of NCBI NO: 12847921 NR Description: unnamed protein product [Mus musculus]
  misc_feature (1)..(223): Homolog of NCBI NO: 27735393 NR Description: Similar to ribosomal protein S3 [Xenopus laevis]
  misc_feature (1)..(223): Homolog of NCBI NO: 133940 NR Description: 40S ribosomal protein S3A (S1A)
  misc_feature (1)..(229): Homolog of NCBI NO: 37595356 NR Description: ribosomal protein S3 [Danio rerio]
  misc_feature (1)..(216): Homolog of NCBI NO: 15225107 NR Description: 40S ribosomal protein S3, putative
  misc_feature (1)..(229): Homolog of NCBI NO: 15232352 NR Description: 40S ribosomal protein S3, putative
  misc_feature (1)..(217): Homolog of NCBI NO: 15238533 NR Description: 40S ribosomal protein S3
  misc_feature (3)..(225): Homolog of NCBI NO: 14192875 NR Description: Putative 40S ribosomal protein; contains
  misc_feature (1)..(224): Homolog of NCBI NO: 22204124 NR Description: putative 40S ribosomal protein S3 [Triticum
MATQISKKKKFVSDGVFYAELNEMLTRELAEDGYSGVEVRVTPMRTEIIIRATRTQNVLGEKGRRIRELTSVVQKRFNFPENGVELYAEKVVNRGLCAIAQAESLRYKLLGGLAVRRACYGVLRYVMESGAKGCEVIVSGKLRAQRAKSMKFKDGYMISSGQPVNEYIDSAVRHVLLRQGVLGIKVKIMLDWDPKGKVGPITPLPDLVTIHTPKDEDEPRPPVLAPPEV

SEQ ID NO: 1644 - protein, 206 aa, Zea mays subsp. mays
  peptide (1)..(206): Ceres Seq. ID no. 12341443
  misc_feature (81)..(165): Pfam Name: Ribosomal protein S3, C-terminal domain Pfam Description: Ribosomal protein S3, C-terminal domain
  misc_feature (1)..(206): Homolog of NCBI NO: 28374213 NR Description: similar to 40S ribosomal protein S3 [Danio rerio]
  misc_feature (1)..(200): Homolog of NCBI NO: 27735393 NR Description: Similar to ribosomal protein S3 [Xenopus laevis]
  misc_feature (1)..(200): Homolog of NCBI NO: 12847921 NR Description: unnamed protein product [Mus musculus]
  misc_feature (1)..(200): Homolog of NCBI NO: 133940 NR Description: 40S ribosomal protein S3A (S1A)
  misc_feature (1)..(206): Homolog of NCBI NO: 37595356 NR Description: ribosomal protein S3 [Danio rerio]
  misc_feature (1)..(193): Homolog of NCBI NO: 15225107 NR Description: 40S ribosomal protein S3, putative
  misc_feature (1)..(206): Homolog of NCBI NO: 15232352 NR Description: 40S ribosomal protein S3, putative
  misc_feature (1)..(194): Homolog of NCBI NO: 15238533 NR Description: 40S ribosomal protein S3
  misc_feature (1)..(202): Homolog of NCBI NO: 14192875 NR Description: Putative 40S ribosomal protein; contains
  misc_feature (1)..(201): Homolog of NCBI NO: 22204124 NR Description: putative 40S ribosomal protein S3 [Triticum
MLTRELAEDGYSGVEVRVTPMRTEIIIRATRTQNVLGEKGRRIRELTSVVQKRFNFPENGVELYAEKVVNRGLCAIAQAESLRYKLLGGLAVRRACYGVLRYVMESGAKGCEVIVSGKLRAQRAKSMKFKDGYMISSGQPVNEYIDSAVRHVLLRQGVLGIKVKIMLDWDPKGKVGPITPLPDLVTIHTPKDEDEPRPPVLAPPEV

SEQ ID NO: 1645 - DNA, 1515 bp, Zea mays subsp. mays
  misc_feature (1)..(1515): Ceres Seq. ID no. 12405850
  misc_feature: MA Experiment ID: 108504 Result: Up-regulated in Transcription
  misc_feature: MA Experiment 108504 PARAMETER Experiment Name: Zm_Drought_P Parameter: Age (day) Value: 8
  misc_feature: MA Experiment 108504 PARAMETER Experiment Name: Zm_Drought_P Parameter: Organism Value: Zea mays
  misc_feature: MA Experiment 108504 PARAMETER Experiment Name: Zm_Drought_P Parameter: Plant Line Value: 35A19
  misc_feature: MA Experiment 108504 PARAMETER Experiment Name: Zm_Drought_P Parameter: Timepoint (hr) Value: 12
  misc_feature: MA Experiment 108504 PARAMETER Experiment Name: Zm_Drought_P Parameter: Tissue Value: Aerial
  misc_feature: MA Experiment 108504 PARAMETER Experiment Name: Zm_Drought_P Parameter: Treatment Value: Drought vs. No Drought
  misc_feature: MA Experiment ID: 108523 Result: Up-regulated in Transcription
  misc_feature: MA Experiment 108523 PARAMETER Experiment Name: Zm_42deg_Heat_P Parameter: Age (day) Value: 8
  misc_feature: MA Experiment 108523 PARAMETER Experiment Name: Zm_42deg_Heat_P Parameter: Organism Value: Zea mays
  misc_feature: MA Experiment 108523 PARAMETER Experiment Name: Zm_42deg_Heat_P Parameter: Plant Line Value: 35A19
  misc_feature: MA Experiment 108523 PARAMETER Experiment Name: Zm_42deg_Heat_P Parameter: Temperature (deg C) Value: 42 vs. 22
  misc_feature: MA Experiment 108523 PARAMETER Experiment Name: Zm_42deg_Heat_P Parameter: Timepoint (hr) Value: 6
  misc_feature: MA Experiment 108523 PARAMETER Experiment Name: Zm_42deg_Heat_P Parameter: Tissue Value: Aerial
  misc_feature: MA Experiment ID: 108536 Result: Up-regulated in Transcription
  misc_feature: MA Experiment 108536 PARAMETER Experiment Name: Zm_Meristem_P Parameter: Age (day) Value: 8
  misc_feature: MA Experiment 108536 PARAMETER Experiment Name: Zm_Meristem_P Parameter: Organism Value: Zea mays
  misc_feature: MA Experiment 108536 PARAMETER Experiment Name: Zm_Meristem_P Parameter: Plant Line Value: 35A19
  misc_feature: MA Experiment 108536 PARAMETER Experiment Name: Zm_Meristem_P Parameter: Tissue Value: Shoot Meristem vs. Above Shoot Meristem
  misc_feature: MA Experiment ID: 108540 Result: Up-regulated in Transcription
  misc_feature: MA Experiment 108540 PARAMETER Experiment Name: Zm_20percent_PEG_P Parameter: Age (day) Value: 8
  misc_feature: MA Experiment 108540 PARAMETER Experiment Name: Zm_20percent_PEG_P Parameter: Organism Value: Zea mays
  misc_feature: MA Experiment 108540 PARAMETER Experiment Name: Zm_20percent_PEG_P Parameter: Plant Line Value: 35A19
  misc_feature: MA Experiment 108540 PARAMETER Experiment Name: Zm_20percent_PEG_P Parameter: Timepoint (hr) Value: 6
  misc_feature: MA Experiment 108540 PARAMETER Experiment Name: Zm_20percent_PEG_P Parameter: Tissue Value: Aerial
  misc_feature: MA Experiment 108540 PARAMETER Experiment Name: Zm_20percent_PEG_P Parameter: Treatment Value: 20percent PEG vs. No Treatment
  misc_feature: MA Experiment ID: 108542 Result: Up-regulated in Transcription
  misc_feature: MA Experiment 108542 PARAMETER Experiment Name: Zm_150mM_NaCl_P Parameter: Age (day) Value: 8
  misc_feature: MA Experiment 108542 PARAMETER Experiment Name: Zm_150mM_NaCl_P Parameter: Organism Value: Zea mays
  misc_feature: MA Experiment 108542 PARAMETER Experiment Name: Zm_150mM_NaCl_P Parameter: Plant Line Value: 35A19
  misc_feature: MA Experiment 108542 PARAMETER Experiment Name: Zm_150mM_NaCl_P Parameter: Timepoint (hr) Value: 6
  misc_feature: MA Experiment 108542 PARAMETER Experiment Name: Zm_150mM_NaCl_P Parameter: Tissue Value: Aerial
  misc_feature: MA Experiment 108542 PARAMETER Experiment Name: Zm_150mM_NaCl_P Parameter: Treatment Value: 150mM NaCl vs. No Treatment
  misc_feature: MA Experiment ID: 108556 Result: Up-regulated in Transcription
  misc_feature: MA Experiment 108556 PARAMETER Experiment Name: Zm_Drought_P Parameter: Age (day) Value: 9
  misc_feature: MA Experiment 108556 PARAMETER Experiment Name: Zm_Drought_P Parameter: Organism Value: Zea mays
  misc_feature: MA Experiment 108556 PARAMETER Experiment Name: Zm_Drought_P Parameter: Plant Line Value: 35A19
  misc_feature: MA Experiment 108556 PARAMETER Experiment Name: Zm_Drought_P Parameter: Timepoint (hr) Value: 24
  misc_feature: MA Experiment 108556 PARAMETER Experiment Name: Zm_Drought_P Parameter: Tissue Value: Aerial
  misc_feature: MA Experiment 108556 PARAMETER Experiment Name: Zm_Drought_P Parameter: Treatment Value: Drought vs. No Drought
  misc_feature: MA Experiment ID: 108559 Result: Up-regulated in Transcription
  misc_feature: MA Experiment 108559 PARAMETER Experiment Name: Zm_5mM_NO_P Parameter: Age (day) Value: 8
  misc_feature: MA Experiment 108559 PARAMETER Experiment Name: Zm_5mM_NO_P Parameter: Organism Value: Zea mays
  misc_feature: MA Experiment 108559 PARAMETER Experiment Name: Zm_5mM_NO_P Parameter: Plant Line Value: 35A19
  misc_feature: MA Experiment 108559 PARAMETER Experiment Name: Zm_5mM_NO_P Parameter: Timepoint (hr) Value: 12
  misc_feature: MA Experiment 108559 PARAMETER Experiment Name: Zm_5mM_NO_P Parameter: Tissue Value: Aerial
  misc_feature: MA Experiment 108559 PARAMETER Experiment Name: Zm_5mM_NO_P Parameter: Treatment Value: 5mM NO vs. No Treatment
  misc_feature: MA Experiment ID: 108597 Result: Up-regulated in Transcription
  misc_feature: MA Experiment 108597 PARAMETER Experiment Name: Zm_100uM_ABA_P Parameter: Age (day) Value: 9
  misc_feature: MA Experiment 108597 PARAMETER Experiment Name: Zm_100uM_ABA_P Parameter: Organism Value: Zea mays
  misc_feature: MA Experiment 108597 PARAMETER Experiment Name: Zm_100uM_ABA_P Parameter: Plant Line Value: 35A19
  misc_feature: MA Experiment 108597 PARAMETER Experiment Name: Zm_100uM_ABA_P Parameter: Timepoint (hr) Value: 24
  misc_feature: MA Experiment 108597 PARAMETER Experiment Name: Zm_100uM_ABA_P Parameter: Tissue Value: Aerial
  misc_feature: MA Experiment 108597 PARAMETER Experiment Name: Zm_100uM_ABA_P Parameter: Treatment Value: 100uM ABA vs. No Treatment
  misc_feature: MA Experiment ID: 20000478 Result: Up-regulated in Transcription
  misc_feature: MA Experiment 20000478 PARAMETER Experiment Name: Zm_5mM_SA_P Parameter: Age (day) Value: 11
  misc_feature: MA Experiment 20000478 PARAMETER Experiment Name: Zm_5mM_SA_P Parameter: Organism Value: Zea mays
  misc_feature: MA Experiment 20000478 PARAMETER Experiment Name: Zm_5mM_SA_P Parameter: Plant Line Value: 35A19
  misc_feature: MA Experiment 20000478 PARAMETER Experiment Name: Zm_5mM_SA_P Parameter: Timepoint (hr) Value: 72
  misc_feature: MA Experiment 20000478 PARAMETER Experiment Name: Zm_5mM_SA_P Parameter: Tissue Value: Aerial
  misc_feature: MA Experiment 20000478 PARAMETER Experiment Name: Zm_5mM_SA_P Parameter: Treatment Value: 5mM SA vs. No Treatment
  misc_feature: MA Experiment ID: 20000480 Result: Up-regulated in Transcription
  misc_feature: MA Experiment 20000480 PARAMETER Experiment Name: Zm_Drought_P Parameter: Age (day) Value: 11
  misc_feature: MA Experiment 20000480 PARAMETER Experiment Name: Zm_Drought_P Parameter: Organism Value: Zea mays
  misc_feature: MA Experiment 20000480 PARAMETER Experiment Name: Zm_Drought_P Parameter: Plant Line Value: 35A19
  misc_feature: MA Experiment 20000480 PARAMETER Experiment Name: Zm_Drought_P Parameter: Timepoint (hr) Value: 72
  misc_feature: MA Experiment 20000480 PARAMETER Experiment Name: Zm_Drought_P Parameter: Tissue Value: Aerial
  misc_feature: MA Experiment 20000480 PARAMETER Experiment Name: Zm_Drought_P Parameter: Treatment Value: Drought vs. No Drought
  misc_feature: MA Experiment ID: 20000535 Result: Up-regulated in Transcription
  misc_feature: MA Experiment 20000535 PARAMETER Experiment Name: Zm_Hybrid_Seed_Dev_P Parameter: DAP Value: 30 vs. 12
  misc_feature: MA Experiment 20000535 PARAMETER Experiment Name: Zm_Hybrid_Seed_Dev_P Parameter: Organism Value: Zea mays
  misc_feature: MA Experiment 20000535 PARAMETER Experiment Name: Zm_Hybrid_Seed_Dev_P Parameter: Plant Line Value: 35A19
  misc_feature: MA Experiment 20000535 PARAMETER Experiment Name: Zm_Hybrid_Seed_Dev_P Parameter: Tissue Value: Embryo vs. Unfert Floret
agtcagtcgcagttcacaactgcgactaaaaaccatctttggggcccttcgccgcgatttgcttcgcttctcggactaggttaagttgccttttcgattctcagaaaaagactggctctgcactcggataattttaaaatggatagtgcacagcagcccactggggaattgaacaattcgttcgatactcttatggtttctggaggtgaccagagtcgacagcctcaggatgctggcaatgaaacgagcttcacgaattggaaagacctccccatggagctgctcctgcgtatcatttcactagttggagatgacaggatagtcattgtggcctccggtgtatgcacaggatggcgtgacaccttggggtggggggttgcaaatctttcactatcatggtgccaggaccgcatgaatgacttggtgatatcactggctcacaaattcacgaagctgcaagttctatctctacgccagatcaggcctcagctagaagacagcggcgtggaggccgtggcaaaccactgccacgacctgcgcgagctggatctcagcagaagcttcaggctgagcgaccggtccttgtacgccctggcgcacgggtgccctcagcttaccaggctcaacatcagcgggtgctccagtttcagcgacgtggcgctcgtgttcctctccagccagtgcgggaacctgagatgcctgaacctgtgcgggtgtgtgagggcggcctctgacagagcgctacaggccatcgcctgttactgtggccagctgcagtcgttgaacctgggctggtgtgatggcatcactgacaagggggtgaccagcctggcttcgggatgccctgaactcagggccgtcgacctgtgcggctgtgttcttataacagatgagagcgtggttgcgctggcgaacggctgccttcacctgcgctccctgggtctctactactgccagaacatcacggaccgcgccatgtactccctggccgccaacagccgcgtgaggagtcggggccggggctgggacgcgacagcgaagagcggcggcggtggcaaggaccgggagcgggacggactggcgagcctgaacatcagccagtgcacggcgctgaccccgcccgcggtgcaggcggtgtgcgactcgttcccggcgctgcacacgtgcccggagcggcactcgctcaacatcagcgggtgcctcagcctaacctccgtgcactgcgcctgtgcgctgcaccctcaccggggccgggcgagtcatcctctccaaccacgcctactgaacgcaatgcgtgaataggcggcgatgctcagatgtgtggataggccgttcaaccgtgagcgacggtgtccgctgtttatgtgaggtgcttgttttgtgtttaggcgtcaaggcgtgtacttggggtctctactctctagggaaccgtgtagaagcaaccgagttgagttcatcgtctgtaaaaacatggactgtatctgactatctgttgtcatgtcttttgagatcttt

SEQ ID NO: 1646 - protein, 387 aa, Zea mays subsp. mays
  peptide (1)..(387): Ceres Seq. ID no. 12405851
  misc_feature (77)..(286): Homolog of NCBI NO: 27734755 NR Description: hypothetical protein MGC15482 [Homo sapiens]
  misc_feature (77)..(286): Homolog of NCBI NO: 38503178 NR Description: F-box/LRR-repeat protein 2-like
  misc_feature (77)..(286): Homolog of NCBI NO: 12848653 NR Description: unnamed protein product [Mus musculus]
  misc_feature (20)..(290): Homolog of NCBI NO: 11560093 NR Description: F-box protein FBL2 [Rattus norvegicus]
  misc_feature (106)..(343): Homolog of NCBI NO: 7512791 NR Description: hypothetical protein DKFZp564P0622.1 - human
  misc_feature (230)..(376): Homolog of NCBI NO: 26450797 NR Description: unknown protein [Arabidopsis thaliana]
  misc_feature (39)..(376): Homolog of NCBI NO: 18411319 NR Description: F-box protein family, AtFBL5
  misc_feature (19)..(376): Homolog of NCBI NO: 21554029 NR Description: F-box protein AtFBL5 [Arabidopsis thaliana]
  misc_feature (19)..(376): Homolog of NCBI NO: 18394987 NR Description: F-box protein family
  misc_feature (1)..(373): Homolog of NCBI NO: 34907434 NR Description: P0018C10.44 [Oryza sativa (japonica
MDSAQQPTGELNNSFDTLMVSGGDQSRQPQDAGNETSFTNWKDLPMELLLRIISLVGDDRIVIVASGVCTGWRDTLGWGVANLSLSWCQDRMNDLVISLAHKFTKLQVLSLRQIRPQLEDSGVEAVANHCHDLRELDLSRSFRLSDRSLYALAHGCPQLTRLNISGCSSFSDVALVFLSSQCGNLRCLNLCGCVRAASDRALQAIACYCGQLQSLNLGWCDGITDKGVTSLASGCPELRAVDLCGCVLITDESVVALANGCLHLRSLGLYYCQNITDRAMYSLAANSRVRSRGRGWDATAKSGGGGKDRERDGLASLNISQCTALTPPAVQAVCDSFPALHTCPERHSLNISGCLSLTSVHCACALHPHRGRASHPLQPRLLNAMRE

SEQ ID NO: 1647 - protein, 369 aa, Zea mays subsp. mays
  peptide (1)..(369): Ceres Seq. ID no. 12405852
  misc_feature (59)..(268): Homolog of NCBI NO: 27734755 NR Description: hypothetical protein MGC15482 [Homo sapiens]
  misc_feature (59)..(268): Homolog of NCBI NO: 38503178 NR Description: F-box/LRR-repeat protein 2-like
  misc_feature (59)..(268): Homolog of NCBI NO: 12848653 NR Description: unnamed protein product [Mus musculus]
  misc_feature (2)..(272): Homolog of NCBI NO: 11560093 NR Description: F-box protein FBL2 [Rattus norvegicus]
  misc_feature (88)..(325): Homolog of NCBI NO: 7512791 NR Description: hypothetical protein DKFZp564P0622.1 - human
  misc_feature (212)..(358): Homolog of NCBI NO: 26450797 NR Description: unknown protein [Arabidopsis thaliana]
  misc_feature (21)..(358): Homolog of NCBI NO: 18411319 NR Description: F-box protein family, AtFBL5
  misc_feature (1)..(358): Homolog of NCBI NO: 21554029 NR Description: F-box protein AtFBL5 [Arabidopsis thaliana]
  misc_feature (1)..(358): Homolog of NCBI NO: 18394987 NR Description: F-box protein family
  misc_feature (1)..(355): Homolog of NCBI NO: 34907434 NR Description: P0018C10.44 [Oryza sativa (japonica
MVSGGDQSRQPQDAGNETSFTNWKDLPMELLLRIISLVGDDRIVIVASGVCTGWRDTLGWGVANLSLSWCQDRMNDLVISLAHKFTKLQVLSLRQIRPQLEDSGVEAVANHCHDLRELDLSRSFRLSDRSLYALAHGCPQLTRLNISGCSSFSDVALVFLSSQCGNLRCLNLCGCVRAASDRALQAIACYCGQLQSLNLGWCDGITDKGVTSLASGCPELRAVDLCGCVLITDESVVALANGCLHLRSLGLYYCQNITDRAMYSLAANSRVRSRGRGWDATAKSGGGGKDRERDGLASLNISQCTALTPPAVQAVCDSFPALHTCPERHSLNISGCLSLTSVHCACALHPHRGRASHPLQPRLLNAMRE

SEQ ID NO: 1648 - protein, 342 aa, Zea mays subsp. mays
  peptide (1)..(342): Ceres Seq. ID no. 12405853
  misc_feature (32)..(241): Homolog of NCBI NO: 27734755 NR Description: hypothetical protein MGC15482 [Homo sapiens]
  misc_feature (32)..(241): Homolog of NCBI NO: 38503178 NR Description: F-box/LRR-repeat protein 2-like
  misc_feature (32)..(241): Homolog of NCBI NO: 12848653 NR Description: unnamed protein product [Mus musculus]
  misc_feature (1)..(245): Homolog of NCBI NO: 11560093 NR Description: F-box protein FBL2 [Rattus norvegicus]
  misc_feature (61)..(298): Homolog of NCBI NO: 7512791 NR Description: hypothetical protein DKFZp564P0622.1 - human
  misc_feature (185)..(331): Homolog of NCBI NO: 26450797 NR Description: unknown protein [Arabidopsis thaliana]
  misc_feature (1)..(331): Homolog of NCBI NO: 18411319 NR Description: F-box protein family, AtFBL5
  misc_feature (1)..(331): Homolog of NCBI NO: 21554029 NR Description: F-box protein AtFBL5 [Arabidopsis thaliana]
  misc_feature (1)..(331): Homolog of NCBI NO: 18394987 NR Description: F-box protein family
  misc_feature (1)..(328): Homolog of NCBI NO: 34907434 NR Description: P0018C10.44 [Oryza sativa (japonica
MELLLRIISLVGDDRIVIVASGVCTGWRDTLGWGVANLSLSWCQDRMNDLVISLAHKFTKLQVLSLRQIRPQLEDSGVEAVANHCHDLRELDLSRSFRLSDRSLYALAHGCPQLTRLNISGCSSFSDVALVFLSSQCGNLRCLNLCGCVRAASDRALQAIACYCGQLQSLNLGWCDGITDKGVTSLASGCPELRAVDLCGCVLITDESVVALANGCLHLRSLGLYYCQNITDRAMYSLAANSRVRSRGRGWDATAKSGGGGKDRERDGLASLNISQCTALTPPAVQAVCDSFPALHTCPERHSLNISGCLSLTSVHCACALHPHRGRASHPLQPRLLNAMRE

SEQ ID NO: 1649 - DNA, 1548 bp, Zea mays subsp. mays
  misc_feature (1)..(1548): Ceres Seq. ID no. 12341545
  misc_feature: MA Experiment ID: 108543 Result: Up-regulated in Transcription
  misc_feature: MA Experiment ID: 108556 Result: Down-regulated in Transcription
  misc_feature: MA Experiment 108556 PARAMETER Experiment Name: Zm_Drought_P Parameter: Age (day) Value: 9
  misc_feature: MA Experiment 108556 PARAMETER Experiment Name: Zm_Drought_P Parameter: Organism Value: Zea mays
  misc_feature: MA Experiment 108556 PARAMETER Experiment Name: Zm_Drought_P Parameter: Plant Line Value: 35A19
  misc_feature: MA Experiment 108556 PARAMETER Experiment Name: Zm_Drought_P Parameter: Timepoint (hr) Value: 24
  misc_feature: MA Experiment 108556 PARAMETER Experiment Name: Zm_Drought_P Parameter: Tissue Value: Aerial
  misc_feature: MA Experiment 108556 PARAMETER Experiment Name: Zm_Drought_P Parameter: Treatment Value: Drought vs. No Drought
  misc_feature: MA Experiment ID: 108689 Result: Down-regulated in Transcription
  misc_feature: MA Experiment 108689 PARAMETER Experiment Name: Zm_Drought_Roots_P Parameter: Age (day) Value: 9
  misc_feature: MA Experiment 108689 PARAMETER Experiment Name: Zm_Drought_Roots_P Parameter: Organism Value: Zea mays
  misc_feature: MA Experiment 108689 PARAMETER Experiment Name: Zm_Drought_Roots_P Parameter: Plant Line Value: 35A19
  misc_feature: MA Experiment 108689 PARAMETER Experiment Name: Zm_Drought_Roots_P Parameter: Timepoint (hr) Value: 24
  misc_feature: MA Experiment 108689 PARAMETER Experiment Name: Zm_Drought_Roots_P Parameter: Tissue Value: Roots
  misc_feature: MA Experiment 108689 PARAMETER Experiment Name: Zm_Drought_Roots_P Parameter: Treatment Value: Drought vs. No Drought
  misc_feature: MA Experiment ID: 20000479 Result: Down-regulated in Transcription
  misc_feature: MA Experiment 20000479 PARAMETER Experiment Name: Zm_Drought_P Parameter: Age (day) Value: 10
  misc_feature: MA Experiment 20000479 PARAMETER Experiment Name: Zm_Drought_P Parameter: Organism Value: Zea mays
  misc_feature: MA Experiment 20000479 PARAMETER Experiment Name: Zm_Drought_P Parameter: Plant Line Value: 35A19
  misc_feature: MA Experiment 20000479 PARAMETER Experiment Name: Zm_Drought_P Parameter: Timepoint (hr) Value: 48
  misc_feature: MA Experiment 20000479 PARAMETER Experiment Name: Zm_Drought_P Parameter: Tissue Value: Aerial
  misc_feature: MA Experiment 20000479 PARAMETER Experiment Name: Zm_Drought_P Parameter: Treatment Value: Drought vs. No Drought
  misc_feature: MA Experiment ID: 20000480 Result: Down-regulated in Transcription
  misc_feature: MA Experiment 20000480 PARAMETER Experiment Name: Zm_Drought_P Parameter: Age (day) Value: 11
  misc_feature: MA Experiment 20000480 PARAMETER Experiment Name: Zm_Drought_P Parameter: Organism Value: Zea mays
  misc_feature: MA Experiment 20000480 PARAMETER Experiment Name: Zm_Drought_P Parameter: Plant Line Value: 35A19
  misc_feature: MA Experiment 20000480 PARAMETER Experiment Name: Zm_Drought_P Parameter: Timepoint (hr) Value: 72
  misc_feature: MA Experiment 20000480 PARAMETER Experiment Name: Zm_Drought_P Parameter: Tissue Value: Aerial
  misc_feature: MA Experiment 20000480 PARAMETER Experiment Name: Zm_Drought_P Parameter: Treatment Value: Drought vs. No Drought
gtgtctcttccccccaccactccgccaccggcgccgaagcagagcagccatggccggctccgagcagcgcgtcgtcgccgtcatcatggtcggcggccccaccaaagggacgcggttccggccgctgtcgctgaacgtgcccaagccgctcttccctatcgccggccagcccatggtgcaccaccccatctccgcctgcagccggatcccccacctggcacagatatacctcatcgggttctatgaggagcgggagttcgcgctctatgtctcgtctatctcccacgagctcaggatccctgtcaggtacctacgagaggataagcctcacgggtcagctggagggctctacagctttagagattacatcatggaagacagtccgtcacacatagttctgctgaattgcgacgtctgttctagcttccctcttccagacatgctagaggcccataaaaagtatggaggaatgggtactttactagtcaacaaggtatcagcagagtcagcaaaccagttcggcgagttggtagctgatcctgaaacaaatgaactgctgcactatacggaaaagccggagacttttgtgagtgatctcataaattgcggagtatatatatttactcccgatatccttagcgccattgaggatgtcttaaaacagaaaaaagacagagcaaatttgcggcgtgtatctagcattgaagctcttcattcagcaactaaggcgcttccaccagactttgttaggttagatcaagacattttatcccctcgagcgggaaagaaggagctgtacacataccagacacttgatttctgggaacagatcaaaaccccagggatgtctttgagatgctctgggttatatctctctcagtttcgccatacctctcctcatcttttagcctcaggagatggcaaaagaactgccactattgttggcgatgtctatatctatccatctgccaaggtgcatcctacttcaaagattggcccaaatgtctctatatcagcaaatgcacgcgttggagctggtgccaggcttatcaattgcataattctggatgatgttgaaattatggaaaatgctgttgttatacattcaattgtagggtggaaatcatccattggaaaatggtcacgtgtacagggcgaaggtgatcacaatgccaaacttggcattactattcttggtgaagccgttgatgttgaagatgaagtagttgtagttaacagcatcgtgctcccaaataaaactctcaatgtcagtgtccaagaggagatcatcctataataaccatcgtttttttttgtctaattccatataacgtctgagtaccaatcacatagtttaagtttattcgttctcaccatgtaatgtaaccttccattagattgagattattagtttgcatttatacctgtcttgcagcatgacactgcacaatcttgacttgctatgctactttggttagcgattgtggtgatgtaaaaaatgtacaaacaggtgacaccattttttgtgagaatgactcaagacattac

SEQ ID NO: 1650 - protein, 431 aa, Zea mays subsp. mays
  peptide (1)..(431): Ceres Seq. ID no. 12341546
  misc_feature (25)..(262): Pfam Name: Nucleotidyl transferase Pfam Description: Nucleotidyl transferase
  misc_feature (26)..(431): Homolog of NCBI NO: 31881779 NR Description: GDP-mannose pyrophosphorylase A
  misc_feature (26)..(431): Homolog of NCBI NO: 28830182 NR Description: similar to Homo sapiens (Human). GDP-mannose
  misc_feature (26)..(431): Homolog of NCBI NO: 33416563 NR Description: Unknown (protein for MGC:66135) [Danio rerio]
  misc_feature (20)..(410): Homolog of NCBI NO: 25411099 NR Description: probable GDP-mannose pyrophosphorylase
  misc_feature (17)..(361): Homolog of NCBI NO: 26006499 NR Description: Putative GDP-mannose pyrophosphorylase
  misc_feature (21)..(384): Homolog of NCBI NO: 30699056 NR Description: ADP-glucose pyrophosphorylase family [Arabidopsis
  misc_feature (20)..(431): Homolog of NCBI NO: 17064890 NR Description: putative GDP-mannose pyrophosphorylase
  misc_feature (20)..(431): Homolog of NCBI NO: 22325477 NR Description: putative GDP-mannose  pyrophosphorylase
  misc_feature (21)..(431): Homolog of NCBI NO: 15222037 NR Description: putative GDP-mannose pyrophosphorylase
  misc_feature (21)..(431): Homolog of NCBI NO: 5882732 NR Description: Similar to gb|AF135422 GDP-mannose A (GMPPA) from Homo sapiens. ESTs gb|AA712990, gb|N65247, gb|T04179, gb|Z38092, gb|T76473, gb|N96403, gb|AA394551 and
CLFPPPLRHRRRSRAAMAGSEQRVVAVIMVGGPTKGTRFRPLSLNVPKPLFPIAGQPMVHHPISACSRIPHLAQIYLIGFYEEREFALYVSSISHELRIPVRYLREDKPHGSAGGLYSFRDYIMEDSPSHIVLLNCDVCSSFPLPDMLEAHKKYGGMGTLLVNKVSAESANQFGELVADPETNELLHYTEKPETFVSDLINCGVYIFTPDILSAIEDVLKQKKDRANLRRVSSIEALHSATKALPPDFVRLDQDILSPRAGKKELYTYQTLDFWEQIKTPGMSLRCSGLYLSQFRHTSPHLLASGDGKRTATIVGDVYIYPSAKVHPTSKIGPNVSISANARVGAGARLINCIILDDVEIMENAVVIHSIVGWKSSIGKWSRVQGEGDHNAKLGITILGEAVDVEDEVVVVNSIVLPNKTLNVSVQEEIIL

SEQ ID NO: 1651 - protein, 415 aa, Zea mays subsp. mays
  peptide (1)..(415): Ceres Seq. ID no. 12341547
  misc_feature (9)..(246): Pfam Name: Nucleotidyl transferase Pfam Description: Nucleotidyl transferase
  misc_feature (10)..(415): Homolog of NCBI NO: 31881779 NR Description: GDP-mannose pyrophosphorylase A
  misc_feature (10)..(415): Homolog of NCBI NO: 28830182 NR Description: similar to Homo sapiens (Human). GDP-mannose
  misc_feature (10)..(415): Homolog of NCBI NO: 33416563 NR Description: Unknown (protein for MGC:66135) [Danio rerio]
  misc_feature (4)..(394): Homolog of NCBI NO: 25411099 NR Description: probable GDP-mannose pyrophosphorylase
  misc_feature (1)..(345): Homolog of NCBI NO: 26006499 NR Description: Putative GDP-mannose pyrophosphorylase
  misc_feature (5)..(368): Homolog of NCBI NO: 30699056 NR Description: ADP-glucose pyrophosphorylase family [Arabidopsis
  misc_feature (4)..(415): Homolog of NCBI NO: 17064890 NR Description: putative GDP-mannose pyrophosphorylase
  misc_feature (4)..(415): Homolog of NCBI NO: 22325477 NR Description: putative GDP-mannose  pyrophosphorylase
  misc_feature (5)..(415): Homolog of NCBI NO: 15222037 NR Description: putative GDP-mannose pyrophosphorylase
  misc_feature (5)..(415): Homolog of NCBI NO: 5882732 NR Description: Similar to gb|AF135422 GDP-mannose A (GMPPA) from Homo sapiens. ESTs gb|AA712990, gb|N65247, gb|T04179, gb|Z38092, gb|T76473, gb|N96403, gb|AA394551 and
MAGSEQRVVAVIMVGGPTKGTRFRPLSLNVPKPLFPIAGQPMVHHPISACSRIPHLAQIYLIGFYEEREFALYVSSISHELRIPVRYLREDKPHGSAGGLYSFRDYIMEDSPSHIVLLNCDVCSSFPLPDMLEAHKKYGGMGTLLVNKVSAESANQFGELVADPETNELLHYTEKPETFVSDLINCGVYIFTPDILSAIEDVLKQKKDRANLRRVSSIEALHSATKALPPDFVRLDQDILSPRAGKKELYTYQTLDFWEQIKTPGMSLRCSGLYLSQFRHTSPHLLASGDGKRTATIVGDVYIYPSAKVHPTSKIGPNVSISANARVGAGARLINCIILDDVEIMENAVVIHSIVGWKSSIGKWSRVQGEGDHNAKLGITILGEAVDVEDEVVVVNSIVLPNKTLNVSVQEEIIL

SEQ ID NO: 1652 - protein, 403 aa, Zea mays subsp. mays
  peptide (1)..(403): Ceres Seq. ID no. 12341548
  misc_feature (1)..(234): Pfam Name: Nucleotidyl transferase Pfam Description: Nucleotidyl transferase
  misc_feature (1)..(403): Homolog of NCBI NO: 31881779 NR Description: GDP-mannose pyrophosphorylase A
  misc_feature (1)..(403): Homolog of NCBI NO: 28830182 NR Description: similar to Homo sapiens (Human). GDP-mannose
  misc_feature (1)..(403): Homolog of NCBI NO: 33416563 NR Description: Unknown (protein for MGC:66135) [Danio rerio]
  misc_feature (1)..(382): Homolog of NCBI NO: 25411099 NR Description: probable GDP-mannose pyrophosphorylase
  misc_feature (1)..(333): Homolog of NCBI NO: 26006499 NR Description: Putative GDP-mannose pyrophosphorylase
  misc_feature (1)..(356): Homolog of NCBI NO: 30699056 NR Description: ADP-glucose pyrophosphorylase family [Arabidopsis
  misc_feature (1)..(403): Homolog of NCBI NO: 17064890 NR Description: putative GDP-mannose pyrophosphorylase
  misc_feature (1)..(403): Homolog of NCBI NO: 22325477 NR Description: putative GDP-mannose  pyrophosphorylase
  misc_feature (1)..(403): Homolog of NCBI NO: 15222037 NR Description: putative GDP-mannose pyrophosphorylase
  misc_feature (1)..(403): Homolog of NCBI NO: 5882732 NR Description: Similar to gb|AF135422 GDP-mannose A (GMPPA) from Homo sapiens. ESTs gb|AA712990, gb|N65247, gb|T04179, gb|Z38092, gb|T76473, gb|N96403, gb|AA394551 and
MVGGPTKGTRFRPLSLNVPKPLFPIAGQPMVHHPISACSRIPHLAQIYLIGFYEEREFALYVSSISHELRIPVRYLREDKPHGSAGGLYSFRDYIMEDSPSHIVLLNCDVCSSFPLPDMLEAHKKYGGMGTLLVNKVSAESANQFGELVADPETNELLHYTEKPETFVSDLINCGVYIFTPDILSAIEDVLKQKKDRANLRRVSSIEALHSATKALPPDFVRLDQDILSPRAGKKELYTYQTLDFWEQIKTPGMSLRCSGLYLSQFRHTSPHLLASGDGKRTATIVGDVYIYPSAKVHPTSKIGPNVSISANARVGAGARLINCIILDDVEIMENAVVIHSIVGWKSSIGKWSRVQGEGDHNAKLGITILGEAVDVEDEVVVVNSIVLPNKTLNVSVQEEIIL

SEQ ID NO: 1653 - DNA, 1522 bp, Zea mays subsp. mays
  misc_feature (1)..(1522): Ceres Seq. ID no. 12411062
  misc_feature: MA Experiment ID: 108504 Result: Up-regulated in Transcription
  misc_feature: MA Experiment 108504 PARAMETER Experiment Name: Zm_Drought_P Parameter: Age (day) Value: 8
  misc_feature: MA Experiment 108504 PARAMETER Experiment Name: Zm_Drought_P Parameter: Organism Value: Zea mays
  misc_feature: MA Experiment 108504 PARAMETER Experiment Name: Zm_Drought_P Parameter: Plant Line Value: 35A19
  misc_feature: MA Experiment 108504 PARAMETER Experiment Name: Zm_Drought_P Parameter: Timepoint (hr) Value: 12
  misc_feature: MA Experiment 108504 PARAMETER Experiment Name: Zm_Drought_P Parameter: Tissue Value: Aerial
  misc_feature: MA Experiment 108504 PARAMETER Experiment Name: Zm_Drought_P Parameter: Treatment Value: Drought vs. No Drought
  misc_feature: MA Experiment ID: 108540 Result: Up-regulated in Transcription
  misc_feature: MA Experiment 108540 PARAMETER Experiment Name: Zm_20percent_PEG_P Parameter: Age (day) Value: 8
  misc_feature: MA Experiment 108540 PARAMETER Experiment Name: Zm_20percent_PEG_P Parameter: Organism Value: Zea mays
  misc_feature: MA Experiment 108540 PARAMETER Experiment Name: Zm_20percent_PEG_P Parameter: Plant Line Value: 35A19
  misc_feature: MA Experiment 108540 PARAMETER Experiment Name: Zm_20percent_PEG_P Parameter: Timepoint (hr) Value: 6
  misc_feature: MA Experiment 108540 PARAMETER Experiment Name: Zm_20percent_PEG_P Parameter: Tissue Value: Aerial
  misc_feature: MA Experiment 108540 PARAMETER Experiment Name: Zm_20percent_PEG_P Parameter: Treatment Value: 20percent PEG vs. No Treatment
  misc_feature: MA Experiment ID: 108556 Result: Up-regulated in Transcription
  misc_feature: MA Experiment 108556 PARAMETER Experiment Name: Zm_Drought_P Parameter: Age (day) Value: 9
  misc_feature: MA Experiment 108556 PARAMETER Experiment Name: Zm_Drought_P Parameter: Organism Value: Zea mays
  misc_feature: MA Experiment 108556 PARAMETER Experiment Name: Zm_Drought_P Parameter: Plant Line Value: 35A19
  misc_feature: MA Experiment 108556 PARAMETER Experiment Name: Zm_Drought_P Parameter: Timepoint (hr) Value: 24
  misc_feature: MA Experiment 108556 PARAMETER Experiment Name: Zm_Drought_P Parameter: Tissue Value: Aerial
  misc_feature: MA Experiment 108556 PARAMETER Experiment Name: Zm_Drought_P Parameter: Treatment Value: Drought vs. No Drought
  misc_feature: MA Experiment ID: 108559 Result: Up-regulated in Transcription
  misc_feature: MA Experiment 108559 PARAMETER Experiment Name: Zm_5mM_NO_P Parameter: Age (day) Value: 8
  misc_feature: MA Experiment 108559 PARAMETER Experiment Name: Zm_5mM_NO_P Parameter: Organism Value: Zea mays
  misc_feature: MA Experiment 108559 PARAMETER Experiment Name: Zm_5mM_NO_P Parameter: Plant Line Value: 35A19
  misc_feature: MA Experiment 108559 PARAMETER Experiment Name: Zm_5mM_NO_P Parameter: Timepoint (hr) Value: 12
  misc_feature: MA Experiment 108559 PARAMETER Experiment Name: Zm_5mM_NO_P Parameter: Tissue Value: Aerial
  misc_feature: MA Experiment 108559 PARAMETER Experiment Name: Zm_5mM_NO_P Parameter: Treatment Value: 5mM NO vs. No Treatment
  misc_feature: MA Experiment ID: 108689 Result: Up-regulated in Transcription
  misc_feature: MA Experiment 108689 PARAMETER Experiment Name: Zm_Drought_Roots_P Parameter: Age (day) Value: 9
  misc_feature: MA Experiment 108689 PARAMETER Experiment Name: Zm_Drought_Roots_P Parameter: Organism Value: Zea mays
  misc_feature: MA Experiment 108689 PARAMETER Experiment Name: Zm_Drought_Roots_P Parameter: Plant Line Value: 35A19
  misc_feature: MA Experiment 108689 PARAMETER Experiment Name: Zm_Drought_Roots_P Parameter: Timepoint (hr) Value: 24
  misc_feature: MA Experiment 108689 PARAMETER Experiment Name: Zm_Drought_Roots_P Parameter: Tissue Value: Roots
  misc_feature: MA Experiment 108689 PARAMETER Experiment Name: Zm_Drought_Roots_P Parameter: Treatment Value: Drought vs. No Drought
  misc_feature: MA Experiment ID: 20000480 Result: Up-regulated in Transcription
  misc_feature: MA Experiment 20000480 PARAMETER Experiment Name: Zm_Drought_P Parameter: Age (day) Value: 11
  misc_feature: MA Experiment 20000480 PARAMETER Experiment Name: Zm_Drought_P Parameter: Organism Value: Zea mays
  misc_feature: MA Experiment 20000480 PARAMETER Experiment Name: Zm_Drought_P Parameter: Plant Line Value: 35A19
  misc_feature: MA Experiment 20000480 PARAMETER Experiment Name: Zm_Drought_P Parameter: Timepoint (hr) Value: 72
  misc_feature: MA Experiment 20000480 PARAMETER Experiment Name: Zm_Drought_P Parameter: Tissue Value: Aerial
  misc_feature: MA Experiment 20000480 PARAMETER Experiment Name: Zm_Drought_P Parameter: Treatment Value: Drought vs. No Drought
  misc_feature: MA Experiment ID: 20000488 Result: Down-regulated in Transcription
  misc_feature: MA Experiment 20000488 PARAMETER Experiment Name: Zm_50mM_NH4NO3_L_to_H_P Parameter: Organism Value: Zea mays
  misc_feature: MA Experiment 20000488 PARAMETER Experiment Name: Zm_50mM_NH4NO3_L_to_H_P Parameter: Timepoint (hr) Value: 8
  misc_feature: MA Experiment 20000488 PARAMETER Experiment Name: Zm_50mM_NH4NO3_L_to_H_P Parameter: Tissue Value: Leaves
  misc_feature: MA Experiment 20000488 PARAMETER Experiment Name: Zm_50mM_NH4NO3_L_to_H_P Parameter: Treatment Value: 50mM NH4NO3 vs. 100mM Mannitol
  misc_feature: MA Experiment ID: 20000535 Result: Up-regulated in Transcription
  misc_feature: MA Experiment 20000535 PARAMETER Experiment Name: Zm_Hybrid_Seed_Dev_P Parameter: DAP Value: 30 vs. 12
  misc_feature: MA Experiment 20000535 PARAMETER Experiment Name: Zm_Hybrid_Seed_Dev_P Parameter: Organism Value: Zea mays
  misc_feature: MA Experiment 20000535 PARAMETER Experiment Name: Zm_Hybrid_Seed_Dev_P Parameter: Plant Line Value: 35A19
  misc_feature: MA Experiment 20000535 PARAMETER Experiment Name: Zm_Hybrid_Seed_Dev_P Parameter: Tissue Value: Embryo vs. Unfert Floret
ttccgctcgtcccgccaatcgccattattaacagctccgcggtccctccctccctcggtcggtcggcgtcggtccctccctccccacccagttagtcctcagcctatcccgtgcccgcgcagagcaccgcctctgctcgacccaccaccctctgtgcagagttaattaaccttgaggtttccgattgcccttcccttccgctcctctcgcccattcgcggcgagattcagcggcaaggatgcgcctgcacgcggaggtgcgggatgagatggaggaggggagcgaggagggggctgtgacggcttcggcggggctgtcgccaccgccactcatcggtgcggcggcgccggttccccggctagtggtggggttcgcccctcacgaagaagaaggtgaagagcttcctgcagcccaagctgctcctgctggccaggaagaatggaatcagttttgtatctattgatgagtctcttcccctctcagaacaaggcccttttgatgttattttacacaagattactaggaaggagtggcagaaggttctggaggactatcacgaagaacatccagaagttactgtccttgacccaccaaatgctatcgagcatctgaacaatcgacaatcaatgcttgaagaagtagctgatttgaacctgtcaaatttctatggagaagtttgtatcccacgccagctggtcattacgaaagatccatcctctataccaacttctgtagctatggctggactaactttgcccttggttgccaagccattggttgttgatgggacgtctaaaggtcatgaactatatcttgcatatgacgaggcatccttgtcaatgcttgatccgcctctggttctacaggaattcataaaccatggcgggatcctctttaaggtgtatatcattggtgaaacaatacaggttgtccgcaggttctctcttcctgatgttaacacatatgacttactaaacaacgttggcatctatcgattgccaagagtttcatgtgctgcagctagtgcggatgatgcagatcttgaccctcttattgcagagcttcctccaaggccacttctagagaaactgggcagggagcttcgtggccggcttggtttgagattgttcaatatagatatgattagagaacttggaaccaaagatcggtactacataattgatatcaactacttcccaggttacggcaaaatgccaggatatgagcgcatgttcacagacttcttactaagtctcgcacaaagcaagtacaaaaggtatgcttccccaccgcgccaatgtacatttgctggagacataagcataagcgggaggcttgaggaagttggcaagtctcagtgtgtgtgttcaaaatcggtggcacatgctggactggagtaggaaataaccaaggaaacgcttggatgcgctgtactcatgttgtaaaatgtttaactgaatgaacaccttcctcgtgatggctccctccatcgtaatttggcaaccatgagaattaattctgc

SEQ ID NO: 1654 - protein, 257 aa, Zea mays subsp. mays
  peptide (1)..(257): Ceres Seq. ID no. 12411063
  misc_feature (1)..(209): Pfam Name: Inositol 1, 3, 4-trisphosphate 5/6-kinase Pfam Description: Inositol 1, 3, 4-trisphosphate 5/6-kinase
  misc_feature (1)..(206): Homolog of NCBI NO: 37537118 NR Description: putative inositol 1,3,4-trisphosphate 5/6-kinase
  misc_feature (1)..(45): Homolog of NCBI NO: 7487088 NR Description: hypothetical protein T16L1.260 - Arabidopsis
  misc_feature (46)..(192): Homolog of NCBI NO: 7487088 NR Description: hypothetical protein T16L1.260 - Arabidopsis
  misc_feature (1)..(219): Homolog of NCBI NO: 30680654 NR Description: inositol 1,3,4-trisphosphate 5/6-kinase-related
  misc_feature (1)..(45): Homolog of NCBI NO: 30689810 NR Description: expressed protein [Arabidopsis thaliana]
  misc_feature (46)..(217): Homolog of NCBI NO: 30689810 NR Description: expressed protein [Arabidopsis thaliana]
  misc_feature (1)..(192): Homolog of NCBI NO: 7487925 NR Description: inositol 1,3,4-trisphosphate 5/6-kinase homolog
  misc_feature (1)..(219): Homolog of NCBI NO: 18413088 NR Description: inositol 1,3,4-trisphosphate 5/6-kinase-like
  misc_feature (1)..(220): Homolog of NCBI NO: 37530372 NR Description: putative inositol 1,3,4-trisphosphate 5/6-kinase
  misc_feature (1)..(220): Homolog of NCBI NO: 27311236 NR Description: Putative inositol 1,3,4-trisphosphate 5/6-kinase
MLEEVADLNLSNFYGEVCIPRQLVITKDPSSIPTSVAMAGLTLPLVAKPLVVDGTSKGHELYLAYDEASLSMLDPPLVLQEFINHGGILFKVYIIGETIQVVRRFSLPDVNTYDLLNNVGIYRLPRVSCAAASADDADLDPLIAELPPRPLLEKLGRELRGRLGLRLFNIDMIRELGTKDRYYIIDINYFPGYGKMPGYERMFTDFLLSLAQSKYKRYASPPRQCTFAGDISISGRLEEVGKSQCVCSKSVAHAGLE

SEQ ID NO: 1655 - protein, 220 aa, Zea mays subsp. mays
  peptide (1)..(220): Ceres Seq. ID no. 12411064
  misc_feature (1)..(172): Pfam Name: Inositol 1, 3, 4-trisphosphate 5/6-kinase Pfam Description: Inositol 1, 3, 4-trisphosphate 5/6-kinase
  misc_feature (1)..(177): Homolog of NCBI NO: 7487924 NR Description: inositol 1,3,4-trisphosphate 5/6-kinase (EC
  misc_feature (1)..(169): Homolog of NCBI NO: 27549256 NR Description: inositol phosphate kinase [Zea mays]
  misc_feature (1)..(169): Homolog of NCBI NO: 37537118 NR Description: putative inositol 1,3,4-trisphosphate 5/6-kinase
  misc_feature (9)..(155): Homolog of NCBI NO: 7487088 NR Description: hypothetical protein T16L1.260 - Arabidopsis
  misc_feature (1)..(182): Homolog of NCBI NO: 30680654 NR Description: inositol 1,3,4-trisphosphate 5/6-kinase-related
  misc_feature (9)..(180): Homolog of NCBI NO: 30689810 NR Description: expressed protein [Arabidopsis thaliana]
  misc_feature (1)..(155): Homolog of NCBI NO: 7487925 NR Description: inositol 1,3,4-trisphosphate 5/6-kinase homolog
  misc_feature (1)..(182): Homolog of NCBI NO: 18413088 NR Description: inositol 1,3,4-trisphosphate 5/6-kinase-like
  misc_feature (1)..(183): Homolog of NCBI NO: 37530372 NR Description: putative inositol 1,3,4-trisphosphate 5/6-kinase
  misc_feature (1)..(183): Homolog of NCBI NO: 27311236 NR Description: Putative inositol 1,3,4-trisphosphate 5/6-kinase
MAGLTLPLVAKPLVVDGTSKGHELYLAYDEASLSMLDPPLVLQEFINHGGILFKVYIIGETIQVVRRFSLPDVNTYDLLNNVGIYRLPRVSCAAASADDADLDPLIAELPPRPLLEKLGRELRGRLGLRLFNIDMIRELGTKDRYYIIDINYFPGYGKMPGYERMFTDFLLSLAQSKYKRYASPPRQCTFAGDISISGRLEEVGKSQCVCSKSVAHAGLE

SEQ ID NO: 1656 - protein, 186 aa, Zea mays subsp. mays
  peptide (1)..(186): Ceres Seq. ID no. 12411065
  misc_feature (1)..(138): Pfam Name: Inositol 1, 3, 4-trisphosphate 5/6-kinase Pfam Description: Inositol 1, 3, 4-trisphosphate 5/6-kinase
  misc_feature (1)..(143): Homolog of NCBI NO: 7487924 NR Description: inositol 1,3,4-trisphosphate 5/6-kinase (EC
  misc_feature (1)..(135): Homolog of NCBI NO: 27549256 NR Description: inositol phosphate kinase [Zea mays]
  misc_feature (1)..(135): Homolog of NCBI NO: 37537118 NR Description: putative inositol 1,3,4-trisphosphate 5/6-kinase
  misc_feature (1)..(121): Homolog of NCBI NO: 7487088 NR Description: hypothetical protein T16L1.260 - Arabidopsis
  misc_feature (1)..(148): Homolog of NCBI NO: 30680654 NR Description: inositol 1,3,4-trisphosphate 5/6-kinase-related
  misc_feature (1)..(146): Homolog of NCBI NO: 30689810 NR Description: expressed protein [Arabidopsis thaliana]
  misc_feature (1)..(121): Homolog of NCBI NO: 7487925 NR Description: inositol 1,3,4-trisphosphate 5/6-kinase homolog
  misc_feature (1)..(148): Homolog of NCBI NO: 18413088 NR Description: inositol 1,3,4-trisphosphate 5/6-kinase-like
  misc_feature (1)..(149): Homolog of NCBI NO: 37530372 NR Description: putative inositol 1,3,4-trisphosphate 5/6-kinase
  misc_feature (1)..(149): Homolog of NCBI NO: 27311236 NR Description: Putative inositol 1,3,4-trisphosphate 5/6-kinase
MLDPPLVLQEFINHGGILFKVYIIGETIQVVRRFSLPDVNTYDLLNNVGIYRLPRVSCAAASADDADLDPLIAELPPRPLLEKLGRELRGRLGLRLFNIDMIRELGTKDRYYIIDINYFPGYGKMPGYERMFTDFLLSLAQSKYKRYASPPRQCTFAGDISISGRLEEVGKSQCVCSKSVAHAGLE

SEQ ID NO: 1657 - DNA, 1549 bp, Zea mays subsp. mays
  misc_feature (1)..(1549): Ceres Seq. ID no. 12351900
  misc_feature: MA Experiment ID: 108523 Result: Down-regulated in Transcription
  misc_feature: MA Experiment 108523 PARAMETER Experiment Name: Zm_42deg_Heat_P Parameter: Age (day) Value: 8
  misc_feature: MA Experiment 108523 PARAMETER Experiment Name: Zm_42deg_Heat_P Parameter: Organism Value: Zea mays
  misc_feature: MA Experiment 108523 PARAMETER Experiment Name: Zm_42deg_Heat_P Parameter: Plant Line Value: 35A19
  misc_feature: MA Experiment 108523 PARAMETER Experiment Name: Zm_42deg_Heat_P Parameter: Temperature (deg C) Value: 42 vs. 22
  misc_feature: MA Experiment 108523 PARAMETER Experiment Name: Zm_42deg_Heat_P Parameter: Timepoint (hr) Value: 6
  misc_feature: MA Experiment 108523 PARAMETER Experiment Name: Zm_42deg_Heat_P Parameter: Tissue Value: Aerial
  misc_feature: MA Experiment ID: 108527 Result: Down-regulated in Transcription
  misc_feature: MA Experiment 108527 PARAMETER Experiment Name: Zm_5mM_NO_P Parameter: Age (day) Value: 8
  misc_feature: MA Experiment 108527 PARAMETER Experiment Name: Zm_5mM_NO_P Parameter: Organism Value: Zea mays
  misc_feature: MA Experiment 108527 PARAMETER Experiment Name: Zm_5mM_NO_P Parameter: Plant Line Value: 35A19
  misc_feature: MA Experiment 108527 PARAMETER Experiment Name: Zm_5mM_NO_P Parameter: Timepoint (hr) Value: 6
  misc_feature: MA Experiment 108527 PARAMETER Experiment Name: Zm_5mM_NO_P Parameter: Tissue Value: Aerial
  misc_feature: MA Experiment 108527 PARAMETER Experiment Name: Zm_5mM_NO_P Parameter: Treatment Value: 5mM NO vs. No Treatment
  misc_feature: MA Experiment ID: 108529 Result: Up-regulated in Transcription
  misc_feature: MA Experiment 108529 PARAMETER Experiment Name: Zm_Imbibed_Seeds_P Parameter: Age (day) Value: 5 vs. 2
  misc_feature: MA Experiment 108529 PARAMETER Experiment Name: Zm_Imbibed_Seeds_P Parameter: Organism Value: Zea mays
  misc_feature: MA Experiment 108529 PARAMETER Experiment Name: Zm_Imbibed_Seeds_P Parameter: Plant Line Value: 35A19
  misc_feature: MA Experiment 108529 PARAMETER Experiment Name: Zm_Imbibed_Seeds_P Parameter: Tissue Value: Roots vs. Embryo
  misc_feature: MA Experiment ID: 108535 Result: Down-regulated in Transcription
  misc_feature: MA Experiment 108535 PARAMETER Experiment Name: Zm_Meristem_P Parameter: Age (day) Value: 8
  misc_feature: MA Experiment 108535 PARAMETER Experiment Name: Zm_Meristem_P Parameter: Organism Value: Zea mays
  misc_feature: MA Experiment 108535 PARAMETER Experiment Name: Zm_Meristem_P Parameter: Plant Line Value: 35A19
  misc_feature: MA Experiment 108535 PARAMETER Experiment Name: Zm_Meristem_P Parameter: Tissue Value: Root Meristem vs. Above Root Meristem
  misc_feature: MA Experiment ID: 108543 Result: Up-regulated in Transcription
  misc_feature: MA Experiment ID: 108544 Result: Up-regulated in Transcription
  misc_feature: MA Experiment ID: 108556 Result: Down-regulated in Transcription
  misc_feature: MA Experiment 108556 PARAMETER Experiment Name: Zm_Drought_P Parameter: Age (day) Value: 9
  misc_feature: MA Experiment 108556 PARAMETER Experiment Name: Zm_Drought_P Parameter: Organism Value: Zea mays
  misc_feature: MA Experiment 108556 PARAMETER Experiment Name: Zm_Drought_P Parameter: Plant Line Value: 35A19
  misc_feature: MA Experiment 108556 PARAMETER Experiment Name: Zm_Drought_P Parameter: Timepoint (hr) Value: 24
  misc_feature: MA Experiment 108556 PARAMETER Experiment Name: Zm_Drought_P Parameter: Tissue Value: Aerial
  misc_feature: MA Experiment 108556 PARAMETER Experiment Name: Zm_Drought_P Parameter: Treatment Value: Drought vs. No Drought
  misc_feature: MA Experiment ID: 108559 Result: Down-regulated in Transcription
  misc_feature: MA Experiment 108559 PARAMETER Experiment Name: Zm_5mM_NO_P Parameter: Age (day) Value: 8
  misc_feature: MA Experiment 108559 PARAMETER Experiment Name: Zm_5mM_NO_P Parameter: Organism Value: Zea mays
  misc_feature: MA Experiment 108559 PARAMETER Experiment Name: Zm_5mM_NO_P Parameter: Plant Line Value: 35A19
  misc_feature: MA Experiment 108559 PARAMETER Experiment Name: Zm_5mM_NO_P Parameter: Timepoint (hr) Value: 12
  misc_feature: MA Experiment 108559 PARAMETER Experiment Name: Zm_5mM_NO_P Parameter: Tissue Value: Aerial
  misc_feature: MA Experiment 108559 PARAMETER Experiment Name: Zm_5mM_NO_P Parameter: Treatment Value: 5mM NO vs. No Treatment
  misc_feature: MA Experiment ID: 108687 Result: Down-regulated in Transcription
  misc_feature: MA Experiment 108687 PARAMETER Experiment Name: Zm_Embryos-Flowers__P Parameter: Tissue Value: Embryo vs. Aerial+
  misc_feature: MA Experiment ID: 108689 Result: Down-regulated in Transcription
  misc_feature: MA Experiment 108689 PARAMETER Experiment Name: Zm_Drought_Roots_P Parameter: Age (day) Value: 9
  misc_feature: MA Experiment 108689 PARAMETER Experiment Name: Zm_Drought_Roots_P Parameter: Organism Value: Zea mays
  misc_feature: MA Experiment 108689 PARAMETER Experiment Name: Zm_Drought_Roots_P Parameter: Plant Line Value: 35A19
  misc_feature: MA Experiment 108689 PARAMETER Experiment Name: Zm_Drought_Roots_P Parameter: Timepoint (hr) Value: 24
  misc_feature: MA Experiment 108689 PARAMETER Experiment Name: Zm_Drought_Roots_P Parameter: Tissue Value: Roots
  misc_feature: MA Experiment 108689 PARAMETER Experiment Name: Zm_Drought_Roots_P Parameter: Treatment Value: Drought vs. No Drought
  misc_feature: MA Experiment ID: 20000108 Result: Down-regulated in Transcription
  misc_feature: MA Experiment 20000108 PARAMETER Experiment Name: Zm_Root-Tips_P Parameter: Age (day) Value: 12
  misc_feature: MA Experiment 20000108 PARAMETER Experiment Name: Zm_Root-Tips_P Parameter: Organism Value: Zea mays
  misc_feature: MA Experiment 20000108 PARAMETER Experiment Name: Zm_Root-Tips_P Parameter: Tissue Value: Root tips vs. Root mid region    35
  misc_feature: MA Experiment 20000108 PARAMETER Experiment Name: Zm_Root-Tips_P Parameter: Tissue Value: Root tips vs. Root mid region   Sequence Listing-Misc Features (4)
  misc_feature: MA Experiment ID: 20000479 Result: Down-regulated in Transcription
  misc_feature: MA Experiment 20000479 PARAMETER Experiment Name: Zm_Drought_P Parameter: Age (day) Value: 10
  misc_feature: MA Experiment 20000479 PARAMETER Experiment Name: Zm_Drought_P Parameter: Organism Value: Zea mays
  misc_feature: MA Experiment 20000479 PARAMETER Experiment Name: Zm_Drought_P Parameter: Plant Line Value: 35A19
  misc_feature: MA Experiment 20000479 PARAMETER Experiment Name: Zm_Drought_P Parameter: Timepoint (hr) Value: 48
  misc_feature: MA Experiment 20000479 PARAMETER Experiment Name: Zm_Drought_P Parameter: Tissue Value: Aerial
  misc_feature: MA Experiment 20000479 PARAMETER Experiment Name: Zm_Drought_P Parameter: Treatment Value: Drought vs. No Drought
  misc_feature: MA Experiment ID: 20000480 Result: Down-regulated in Transcription
  misc_feature: MA Experiment 20000480 PARAMETER Experiment Name: Zm_Drought_P Parameter: Age (day) Value: 11
  misc_feature: MA Experiment 20000480 PARAMETER Experiment Name: Zm_Drought_P Parameter: Organism Value: Zea mays
  misc_feature: MA Experiment 20000480 PARAMETER Experiment Name: Zm_Drought_P Parameter: Plant Line Value: 35A19
  misc_feature: MA Experiment 20000480 PARAMETER Experiment Name: Zm_Drought_P Parameter: Timepoint (hr) Value: 72
  misc_feature: MA Experiment 20000480 PARAMETER Experiment Name: Zm_Drought_P Parameter: Tissue Value: Aerial
  misc_feature: MA Experiment 20000480 PARAMETER Experiment Name: Zm_Drought_P Parameter: Treatment Value: Drought vs. No Drought
  misc_feature: MA Experiment ID: 20000534 Result: Down-regulated in Transcription
  misc_feature: MA Experiment 20000534 PARAMETER Experiment Name: Zm_Hybrid_Pollen_P Parameter: Age (day) Value: 8
  misc_feature: MA Experiment 20000534 PARAMETER Experiment Name: Zm_Hybrid_Pollen_P Parameter: Organism Value: Zea mays
  misc_feature: MA Experiment 20000534 PARAMETER Experiment Name: Zm_Hybrid_Pollen_P Parameter: Plant Line Value: 35A19
  misc_feature: MA Experiment 20000534 PARAMETER Experiment Name: Zm_Hybrid_Pollen_P Parameter: Tissue Value: Pollen vs. Aerial
  misc_feature: MA Experiment ID: 20000535 Result: Down-regulated in Transcription
  misc_feature: MA Experiment 20000535 PARAMETER Experiment Name: Zm_Hybrid_Seed_Dev_P Parameter: DAP Value: 30 vs. 12
  misc_feature: MA Experiment 20000535 PARAMETER Experiment Name: Zm_Hybrid_Seed_Dev_P Parameter: Organism Value: Zea mays
  misc_feature: MA Experiment 20000535 PARAMETER Experiment Name: Zm_Hybrid_Seed_Dev_P Parameter: Plant Line Value: 35A19
  misc_feature: MA Experiment 20000535 PARAMETER Experiment Name: Zm_Hybrid_Seed_Dev_P Parameter: Tissue Value: Embryo vs. Unfert Floret
actcgacaccgcacggcctcaagcagaggaagctttccgcccgggaacgccatggggtcgcttcctctccttgctgcctgctgctccctcctgctcacggtcgcagctcctgcccgggacagcactaccagcgtctgcgcttcgcaaatcggcgatttcccgcaccggaacagttcgggcctccacctgacgctgcaccacccgcagagcccctgctcgccggcgccgctcccgtccgacctccccttctccacagtcctcacccacgacgatgcgcgcgtcgcccacctcgcgtcgcgactcgccgccagtgatccgccgtcccgccgtccgacatcactccgcaagcagaagaaggccgccggtggtgcttccggcggccaccacctcgacgacgactccctggcctccgtgcctctctcgcccggaacgtcagtgggcgtggggaactacgttacccagctcggcctcggcacgccgtccacctcctacgcaatggtagtcgacacgggctcctcgctcacctggctgcagtgctcgccttgcgtcgtgtcgtgccaccgccaggtggggccgctcttcgaccccagggcctccagcacctacgcctccgtgcgctgctcggcgtcgcagtgcgacgagctccaggccgccacgctcaacccgtccgcctgctccgcctcaaacgtctgcatctaccaggccagctacggcgacagctccttctccgtcggctccctcagcacggacaccgtctccttcggctccacccgctacccgagcttctactacggctgcggccaggacaatgaggggctcttcggccgctcggcggggctcatcggcctcgcgcgcaacaagctctcgctgctctaccagctcgcgcccagcctcggctactccttctcctattgcctcccgacggctgcgtcaacggggtatctctccatcgggccctacaacacggggcactactactcgtacacgcccatggcctcgagctctctcgacgcctcgctctacttcatcaccctgtccgggatgtcggtcggcgggagcccactcgcggtctcgccgtcggagtacagcagcctgcccacgatcatagactcgggcacggtgatcacgcgcctgccgacggctgtgcacacggcgctcagcaaggcggtggcccaggccatggcaggggcgcagcgcgcaccggccttctccatcctggacacgtgcttcgagggccaggcgtcgcagctgcgcgtgcccaccgtggccatggcgttcgcgggcggcgcctccatgaagctgacgacgcggaacgtgctcatagacgtcgacgactccacgacgtgcctggcgtttgcgcccaccgacagcacggccatcatcggcaacacgcagcagcagacgttcagcgtcatctacgacgtcgcgcaatccaggatcggcttctcggcaggcggatgcagctgaatagctgatgggtgaaaagtgaaaactgattattgagctctatggagtgggcagctcaagcttggtaatagaaaatgcgtac

SEQ ID NO: 1658 - protein, 488 aa, Zea mays subsp. mays
  peptide (1)..(488): Ceres Seq. ID no. 12351901
  misc_feature (133)..(482): Pfam Name: Eukaryotic aspartyl protease Pfam Description: Eukaryotic aspartyl protease
  misc_feature (46)..(488): Homolog of NCBI NO: 21594980 NR Description: chloroplast nucleoid DNA binding protein,
  misc_feature (6)..(487): Homolog of NCBI NO: 19424106 NR Description: putative chloroplast nucleoid DNA-binding protein
  misc_feature (6)..(487): Homolog of NCBI NO: 15229656 NR Description: putative chloroplast nucleoid DNA-binding protein
  misc_feature (46)..(488): Homolog of NCBI NO: 15223368 NR Description: chloroplast nucleoid DNA binding protein, putative
  misc_feature (64)..(487): Homolog of NCBI NO: 15238250 NR Description: nucleoid DNA-binding protein cnd41 - like protein
  misc_feature (64)..(487): Homolog of NCBI NO: 24417232 NR Description: unknown [Arabidopsis thaliana]
  misc_feature (129)..(488): Homolog of NCBI NO: 22326716 NR Description: nucleoid DNA-binding protein cnd41 - like protein
  misc_feature (129)..(488): Homolog of NCBI NO: 11358588 NR Description: nucleoid DNA-binding protein cnd41-like protein -
  misc_feature (60)..(488): Homolog of NCBI NO: 7489168 NR Description: nucleoid DNA-binding protein cnd41, chloroplast -
  misc_feature (60)..(488): Homolog of NCBI NO: 24430421 NR Description: 41 kD chloroplast nucleoid DNA binding protein
TRHRTASSRGSFPPGNAMGSLPLLAACCSLLLTVAAPARDSTTSVCASQIGDFPHRNSSGLHLTLHHPQSPCSPAPLPSDLPFSTVLTHDDARVAHLASRLAASDPPSRRPTSLRKQKKAAGGASGGHHLDDDSLASVPLSPGTSVGVGNYVTQLGLGTPSTSYAMVVDTGSSLTWLQCSPCVVSCHRQVGPLFDPRASSTYASVRCSASQCDELQAATLNPSACSASNVCIYQASYGDSSFSVGSLSTDTVSFGSTRYPSFYYGCGQDNEGLFGRSAGLIGLARNKLSLLYQLAPSLGYSFSYCLPTAASTGYLSIGPYNTGHYYSYTPMASSSLDASLYFITLSGMSVGGSPLAVSPSEYSSLPTIIDSGTVITRLPTAVHTALSKAVAQAMAGAQRAPAFSILDTCFEGQASQLRVPTVAMAFAGGASMKLTTRNVLIDVDDSTTCLAFAPTDSTAIIGNTQQQTFSVIYDVAQSRIGFSAGGCS

SEQ ID NO: 1659 - protein, 471 aa, Zea mays subsp. mays
  peptide (1)..(471): Ceres Seq. ID no. 12351902
  misc_feature (116)..(465): Pfam Name: Eukaryotic aspartyl protease Pfam Description: Eukaryotic aspartyl protease
  misc_feature (29)..(471): Homolog of NCBI NO: 21594980 NR Description: chloroplast nucleoid DNA binding protein,
  misc_feature (1)..(470): Homolog of NCBI NO: 19424106 NR Description: putative chloroplast nucleoid DNA-binding protein
  misc_feature (1)..(470): Homolog of NCBI NO: 15229656 NR Description: putative chloroplast nucleoid DNA-binding protein
  misc_feature (29)..(471): Homolog of NCBI NO: 15223368 NR Description: chloroplast nucleoid DNA binding protein, putative
  misc_feature (47)..(470): Homolog of NCBI NO: 15238250 NR Description: nucleoid DNA-binding protein cnd41 - like protein
  misc_feature (47)..(470): Homolog of NCBI NO: 24417232 NR Description: unknown [Arabidopsis thaliana]
  misc_feature (112)..(471): Homolog of NCBI NO: 22326716 NR Description: nucleoid DNA-binding protein cnd41 - like protein
  misc_feature (112)..(471): Homolog of NCBI NO: 11358588 NR Description: nucleoid DNA-binding protein cnd41-like protein -
  misc_feature (43)..(471): Homolog of NCBI NO: 7489168 NR Description: nucleoid DNA-binding protein cnd41, chloroplast -
  misc_feature (43)..(471): Homolog of NCBI NO: 24430421 NR Description: 41 kD chloroplast nucleoid DNA binding protein
MGSLPLLAACCSLLLTVAAPARDSTTSVCASQIGDFPHRNSSGLHLTLHHPQSPCSPAPLPSDLPFSTVLTHDDARVAHLASRLAASDPPSRRPTSLRKQKKAAGGASGGHHLDDDSLASVPLSPGTSVGVGNYVTQLGLGTPSTSYAMVVDTGSSLTWLQCSPCVVSCHRQVGPLFDPRASSTYASVRCSASQCDELQAATLNPSACSASNVCIYQASYGDSSFSVGSLSTDTVSFGSTRYPSFYYGCGQDNEGLFGRSAGLIGLARNKLSLLYQLAPSLGYSFSYCLPTAASTGYLSIGPYNTGHYYSYTPMASSSLDASLYFITLSGMSVGGSPLAVSPSEYSSLPTIIDSGTVITRLPTAVHTALSKAVAQAMAGAQRAPAFSILDTCFEGQASQLRVPTVAMAFAGGASMKLTTRNVLIDVDDSTTCLAFAPTDSTAIIGNTQQQTFSVIYDVAQSRIGFSAGGCS

SEQ ID NO: 1660 - protein, 323 aa, Zea mays subsp. mays
  peptide (1)..(323): Ceres Seq. ID no. 12351903
  misc_feature (1)..(317): Pfam Name: Eukaryotic aspartyl protease Pfam Description: Eukaryotic aspartyl protease
  misc_feature (1)..(323): Homolog of NCBI NO: 21594980 NR Description: chloroplast nucleoid DNA binding protein,
  misc_feature (1)..(322): Homolog of NCBI NO: 19424106 NR Description: putative chloroplast nucleoid DNA-binding protein
  misc_feature (1)..(322): Homolog of NCBI NO: 15229656 NR Description: putative chloroplast nucleoid DNA-binding protein
  misc_feature (1)..(323): Homolog of NCBI NO: 15223368 NR Description: chloroplast nucleoid DNA binding protein, putative
  misc_feature (1)..(322): Homolog of NCBI NO: 15238250 NR Description: nucleoid DNA-binding protein cnd41 - like protein
  misc_feature (1)..(322): Homolog of NCBI NO: 24417232 NR Description: unknown [Arabidopsis thaliana]
  misc_feature (1)..(323): Homolog of NCBI NO: 22326716 NR Description: nucleoid DNA-binding protein cnd41 - like protein
  misc_feature (1)..(323): Homolog of NCBI NO: 11358588 NR Description: nucleoid DNA-binding protein cnd41-like protein -
  misc_feature (1)..(323): Homolog of NCBI NO: 7489168 NR Description: nucleoid DNA-binding protein cnd41, chloroplast -
  misc_feature (1)..(323): Homolog of NCBI NO: 24430421 NR Description: 41 kD chloroplast nucleoid DNA binding protein
MVVDTGSSLTWLQCSPCVVSCHRQVGPLFDPRASSTYASVRCSASQCDELQAATLNPSACSASNVCIYQASYGDSSFSVGSLSTDTVSFGSTRYPSFYYGCGQDNEGLFGRSAGLIGLARNKLSLLYQLAPSLGYSFSYCLPTAASTGYLSIGPYNTGHYYSYTPMASSSLDASLYFITLSGMSVGGSPLAVSPSEYSSLPTIIDSGTVITRLPTAVHTALSKAVAQAMAGAQRAPAFSILDTCFEGQASQLRVPTVAMAFAGGASMKLTTRNVLIDVDDSTTCLAFAPTDSTAIIGNTQQQTFSVIYDVAQSRIGFSAGGCS

SEQ ID NO: 1661 - DNA, 764 bp, Zea mays subsp. mays
  misc_feature (1)..(764): Ceres Seq. ID no. 12406283
  misc_feature: MA Experiment ID: 108504 Result: Up-regulated in Transcription
  misc_feature: MA Experiment 108504 PARAMETER Experiment Name: Zm_Drought_P Parameter: Age (day) Value: 8
  misc_feature: MA Experiment 108504 PARAMETER Experiment Name: Zm_Drought_P Parameter: Organism Value: Zea mays
  misc_feature: MA Experiment 108504 PARAMETER Experiment Name: Zm_Drought_P Parameter: Plant Line Value: 35A19
  misc_feature: MA Experiment 108504 PARAMETER Experiment Name: Zm_Drought_P Parameter: Timepoint (hr) Value: 12
  misc_feature: MA Experiment 108504 PARAMETER Experiment Name: Zm_Drought_P Parameter: Tissue Value: Aerial
  misc_feature: MA Experiment 108504 PARAMETER Experiment Name: Zm_Drought_P Parameter: Treatment Value: Drought vs. No Drought
  misc_feature: MA Experiment ID: 108529 Result: Up-regulated in Transcription
  misc_feature: MA Experiment 108529 PARAMETER Experiment Name: Zm_Imbibed_Seeds_P Parameter: Age (day) Value: 5 vs. 2
  misc_feature: MA Experiment 108529 PARAMETER Experiment Name: Zm_Imbibed_Seeds_P Parameter: Organism Value: Zea mays
  misc_feature: MA Experiment 108529 PARAMETER Experiment Name: Zm_Imbibed_Seeds_P Parameter: Plant Line Value: 35A19
  misc_feature: MA Experiment 108529 PARAMETER Experiment Name: Zm_Imbibed_Seeds_P Parameter: Tissue Value: Roots vs. Embryo
  misc_feature: MA Experiment ID: 108536 Result: Up-regulated in Transcription
  misc_feature: MA Experiment 108536 PARAMETER Experiment Name: Zm_Meristem_P Parameter: Age (day) Value: 8
  misc_feature: MA Experiment 108536 PARAMETER Experiment Name: Zm_Meristem_P Parameter: Organism Value: Zea mays
  misc_feature: MA Experiment 108536 PARAMETER Experiment Name: Zm_Meristem_P Parameter: Plant Line Value: 35A19
  misc_feature: MA Experiment 108536 PARAMETER Experiment Name: Zm_Meristem_P Parameter: Tissue Value: Shoot Meristem vs. Above Shoot Meristem
  misc_feature: MA Experiment ID: 108597 Result: Up-regulated in Transcription
  misc_feature: MA Experiment 108597 PARAMETER Experiment Name: Zm_100uM_ABA_P Parameter: Age (day) Value: 9
  misc_feature: MA Experiment 108597 PARAMETER Experiment Name: Zm_100uM_ABA_P Parameter: Organism Value: Zea mays
  misc_feature: MA Experiment 108597 PARAMETER Experiment Name: Zm_100uM_ABA_P Parameter: Plant Line Value: 35A19
  misc_feature: MA Experiment 108597 PARAMETER Experiment Name: Zm_100uM_ABA_P Parameter: Timepoint (hr) Value: 24
  misc_feature: MA Experiment 108597 PARAMETER Experiment Name: Zm_100uM_ABA_P Parameter: Tissue Value: Aerial
  misc_feature: MA Experiment 108597 PARAMETER Experiment Name: Zm_100uM_ABA_P Parameter: Treatment Value: 100uM ABA vs. No Treatment
  misc_feature: MA Experiment ID: 108689 Result: Up-regulated in Transcription
  misc_feature: MA Experiment 108689 PARAMETER Experiment Name: Zm_Drought_Roots_P Parameter: Age (day) Value: 9
  misc_feature: MA Experiment 108689 PARAMETER Experiment Name: Zm_Drought_Roots_P Parameter: Organism Value: Zea mays
  misc_feature: MA Experiment 108689 PARAMETER Experiment Name: Zm_Drought_Roots_P Parameter: Plant Line Value: 35A19
  misc_feature: MA Experiment 108689 PARAMETER Experiment Name: Zm_Drought_Roots_P Parameter: Timepoint (hr) Value: 24
  misc_feature: MA Experiment 108689 PARAMETER Experiment Name: Zm_Drought_Roots_P Parameter: Tissue Value: Roots
  misc_feature: MA Experiment 108689 PARAMETER Experiment Name: Zm_Drought_Roots_P Parameter: Treatment Value: Drought vs. No Drought
  misc_feature: MA Experiment ID: 20000478 Result: Down-regulated in Transcription
  misc_feature: MA Experiment 20000478 PARAMETER Experiment Name: Zm_5mM_SA_P Parameter: Age (day) Value: 11
  misc_feature: MA Experiment 20000478 PARAMETER Experiment Name: Zm_5mM_SA_P Parameter: Organism Value: Zea mays
  misc_feature: MA Experiment 20000478 PARAMETER Experiment Name: Zm_5mM_SA_P Parameter: Plant Line Value: 35A19
  misc_feature: MA Experiment 20000478 PARAMETER Experiment Name: Zm_5mM_SA_P Parameter: Timepoint (hr) Value: 72
  misc_feature: MA Experiment 20000478 PARAMETER Experiment Name: Zm_5mM_SA_P Parameter: Tissue Value: Aerial
  misc_feature: MA Experiment 20000478 PARAMETER Experiment Name: Zm_5mM_SA_P Parameter: Treatment Value: 5mM SA vs. No Treatment
gtcgagtctaaccctagcgcgcgccgccacacctgccgttgctaccgccccgtacctcgcttgctttcccgtcgccgaaatgacgaagcgcaccaagaaggctggaattgttggcaaatatggaaccaggtatggcgctagcttgcgtaagcaaatcaagaagatggaggtatctcagcactccaagtacttctgcgagttttgtgggaagtttgctgtgaagaggaaagcagttggaatttggggatgcaaggactgtgggaaggtcaaggctggcggtgcttacaccatgaacactgctagtgcctcaaccagatcccgaaccccaacccgaaccatccaagccaggccctaaaccccaacctgaaccatccaagctagaacctcagccaggatctaaacctacaccggagccaaaaccctaaccagaaccatcgaagcggagccaccgtcgtctcttccaccaccatttggcacgggcgtcgtggaagggaactgagaggagcatagtggaaccgatcatcatcgtggatgccatctatagcttttggctatgactgataagtaatactgtttgtgtaagagtgagctctcttttttatatagggtgtgtgtattgtgtgtagtactatatttggacgatgtgtgtgtacccacctttttccgtgtgtttccatcagcatgcatccatgatccatgtatatgtcttgctaagtttgtattatcaatgaataaaaaaacatgcctttgtatgtcttgttttg

SEQ ID NO: 1662 - protein, 117 aa, Zea mays subsp. mays
  peptide (1)..(117): Ceres Seq. ID no. 12406284
  misc_feature (27)..(111): Homolog of NCBI NO: 7441206 NR Description: ribosomal protein L37a
  misc_feature (27)..(111): Homolog of NCBI NO: 33637090 NR Description: N1 [Toxoplasma gondii]
  misc_feature (27)..(114): Homolog of NCBI NO: 6093889 NR Description: 60S RIBOSOMAL PROTEIN L37A
  misc_feature (32)..(111): Homolog of NCBI NO: 11358898 NR Description: translation initiation factor eIF-4 gamma homolog
  misc_feature (27)..(111): Homolog of NCBI NO: 15228411 NR Description: putative 60S ribosomal protein L37a; protein id:
  misc_feature (27)..(111): Homolog of NCBI NO: 18411538 NR Description: Expressed protein
  misc_feature (27)..(111): Homolog of NCBI NO: 6831602 NR Description: 60S RIBOSOMAL PROTEIN L37A
  misc_feature (27)..(111): Homolog of NCBI NO: 1173045 NR Description: 60S RIBOSOMAL PROTEIN L37A
  misc_feature (27)..(111): Homolog of NCBI NO: 6831607 NR Description: 60S ribosomal protein L37a
  misc_feature (28)..(111): Homolog of NCBI NO: 34911166 NR Description: putative 60S ribosomal protein L37a
SSLTLARAATPAVATAPYLACFPVAEMTKRTKKAGIVGKYGTRYGASLRKQIKKMEVSQHSKYFCEFCGKFAVKRKAVGIWGCKDCGKVKAGGAYTMNTASASTRSRTPTRTIQARP

SEQ ID NO: 1663 - protein, 91 aa, Zea mays subsp. mays
  peptide (1)..(91): Ceres Seq. ID no. 12406285
  misc_feature (1)..(85): Homolog of NCBI NO: 1173045 NR Description: 60S RIBOSOMAL PROTEIN L37A
  misc_feature (1)..(85): Homolog of NCBI NO: 6831607 NR Description: 60S ribosomal protein L37a
  misc_feature (2)..(85): Homolog of NCBI NO: 34911166 NR Description: putative 60S ribosomal protein L37a
  misc_feature (1)..(85): Homolog of NCBI NO: 18411538 NR Description: Expressed protein
  misc_feature (1)..(85): Homolog of NCBI NO: 6831602 NR Description: 60S RIBOSOMAL PROTEIN L37A
  misc_feature (1)..(85): Homolog of NCBI NO: 7441206 NR Description: ribosomal protein L37a
  misc_feature (1)..(85): Homolog of NCBI NO: 33637090 NR Description: N1 [Toxoplasma gondii]
  misc_feature (1)..(88): Homolog of NCBI NO: 6093889 NR Description: 60S RIBOSOMAL PROTEIN L37A
  misc_feature (6)..(85): Homolog of NCBI NO: 11358898 NR Description: translation initiation factor eIF-4 gamma homolog
  misc_feature (1)..(85): Homolog of NCBI NO: 15228411 NR Description: putative 60S ribosomal protein L37a; protein id:
MTKRTKKAGIVGKYGTRYGASLRKQIKKMEVSQHSKYFCEFCGKFAVKRKAVGIWGCKDCGKVKAGGAYTMNTASASTRSRTPTRTIQARP

SEQ ID NO: 1664 - protein, 63 aa, Zea mays subsp. mays
  peptide (1)..(63): Ceres Seq. ID no. 12406286
  misc_feature (1)..(57): Homolog of NCBI NO: 7441206 NR Description: ribosomal protein L37a
  misc_feature (1)..(57): Homolog of NCBI NO: 33637090 NR Description: N1 [Toxoplasma gondii]
  misc_feature (1)..(60): Homolog of NCBI NO: 6093889 NR Description: 60S RIBOSOMAL PROTEIN L37A
  misc_feature (1)..(57): Homolog of NCBI NO: 11358898 NR Description: translation initiation factor eIF-4 gamma homolog
  misc_feature (1)..(57): Homolog of NCBI NO: 15228411 NR Description: putative 60S ribosomal protein L37a; protein id:
  misc_feature (1)..(57): Homolog of NCBI NO: 18411538 NR Description: Expressed protein
  misc_feature (1)..(57): Homolog of NCBI NO: 6831602 NR Description: 60S RIBOSOMAL PROTEIN L37A
  misc_feature (1)..(57): Homolog of NCBI NO: 1173045 NR Description: 60S RIBOSOMAL PROTEIN L37A
  misc_feature (1)..(57): Homolog of NCBI NO: 6831607 NR Description: 60S ribosomal protein L37a
  misc_feature (1)..(57): Homolog of NCBI NO: 34911166 NR Description: putative 60S ribosomal protein L37a
MEVSQHSKYFCEFCGKFAVKRKAVGIWGCKDCGKVKAGGAYTMNTASASTRSRTPTRTIQARP

SEQ ID NO: 1665 - DNA, 1361 bp, Zea mays subsp. mays
  misc_feature (1)..(1361): Ceres Seq. ID no. 12407362
  misc_feature: MA Experiment ID: 108522 Result: Down-regulated in Transcription
  misc_feature: MA Experiment 108522 PARAMETER Experiment Name: Zm_42deg_Heat_P Parameter: Age (day) Value: 8
  misc_feature: MA Experiment 108522 PARAMETER Experiment Name: Zm_42deg_Heat_P Parameter: Organism Value: Zea mays
  misc_feature: MA Experiment 108522 PARAMETER Experiment Name: Zm_42deg_Heat_P Parameter: Plant Line Value: 35A19
  misc_feature: MA Experiment 108522 PARAMETER Experiment Name: Zm_42deg_Heat_P Parameter: Temperature (deg C) Value: 42 vs. 22
  misc_feature: MA Experiment 108522 PARAMETER Experiment Name: Zm_42deg_Heat_P Parameter: Timepoint (hr) Value: 1
  misc_feature: MA Experiment 108522 PARAMETER Experiment Name: Zm_42deg_Heat_P Parameter: Tissue Value: Aerial
  misc_feature: MA Experiment ID: 108523 Result: Down-regulated in Transcription
  misc_feature: MA Experiment 108523 PARAMETER Experiment Name: Zm_42deg_Heat_P Parameter: Age (day) Value: 8
  misc_feature: MA Experiment 108523 PARAMETER Experiment Name: Zm_42deg_Heat_P Parameter: Organism Value: Zea mays
  misc_feature: MA Experiment 108523 PARAMETER Experiment Name: Zm_42deg_Heat_P Parameter: Plant Line Value: 35A19
  misc_feature: MA Experiment 108523 PARAMETER Experiment Name: Zm_42deg_Heat_P Parameter: Temperature (deg C) Value: 42 vs. 22
  misc_feature: MA Experiment 108523 PARAMETER Experiment Name: Zm_42deg_Heat_P Parameter: Timepoint (hr) Value: 6
  misc_feature: MA Experiment 108523 PARAMETER Experiment Name: Zm_42deg_Heat_P Parameter: Tissue Value: Aerial
  misc_feature: MA Experiment ID: 108689 Result: Down-regulated in Transcription
  misc_feature: MA Experiment 108689 PARAMETER Experiment Name: Zm_Drought_Roots_P Parameter: Age (day) Value: 9
  misc_feature: MA Experiment 108689 PARAMETER Experiment Name: Zm_Drought_Roots_P Parameter: Organism Value: Zea mays
  misc_feature: MA Experiment 108689 PARAMETER Experiment Name: Zm_Drought_Roots_P Parameter: Plant Line Value: 35A19
  misc_feature: MA Experiment 108689 PARAMETER Experiment Name: Zm_Drought_Roots_P Parameter: Timepoint (hr) Value: 24
  misc_feature: MA Experiment 108689 PARAMETER Experiment Name: Zm_Drought_Roots_P Parameter: Tissue Value: Roots
  misc_feature: MA Experiment 108689 PARAMETER Experiment Name: Zm_Drought_Roots_P Parameter: Treatment Value: Drought vs. No Drought
acaatccacagatacggtcataccgactgctgttgcccccgatttcccgtccgcccgcagtttctgaaggcacaccaaaacgatgagacctgtagacagtactctagtctctagtccacgaaatcctcgtacttgtgttggctggccctcgactagcgtgttgtagcacactagcgccacagtaatcgagagtgctctcccaggtcgaggtggtgtaggtgtttggcggagcagccggagcgttagaatctgaggaggagaagatggtggtgctggtggtggccacgacgtcggacccggcgtccattgggcccgccgccgccttcctcgccatgcccggatggtcccccggcccgcccatcgccgaggcgatggagagttttactaatgggaatgttcgattactgaagcatgagcgtagcattgtcgcagaggatgatcttgaccagcgatggcaggaagccactggagagtctgtttctgaggtcatattcctcagcaaacacactgcagtctccaaacgtccagcactcacagtgcatccaattggtgtgccacatctgaaggaggatgaaaccccaccccaaggaggaactcctggatgggcagcaattccaagtcctcgaattggaccttggctccggttgatgcaaaagatagctgtagaacaaggccttgttccagagtttgaggttacgcttgaggctactcaccatggaccagttaccagcacacccaccatgtttgttgagataggaagtacagaagaccactggggtcgacaagatgctgcacaggcaattgctctagttctatggaaaggtcttggtctggaggatggaaatgctgttggaacttggcagaggaattgtgaaaaggttctattaggtataggaggtggtcactatgttcctcgtcacatggatattgtcatcaaagatggtgtatgggtcggtcatttactctctggctactccttgccaatggacatgccgtcgcaagtaaatgtaaagagttctgaagaggttgctggaatgtggaagcactccatcaaagtttcttatgaagcaacaaaggcagcatttcctggtggtgaagttatcgcgcatcttgatcacaagagcttcaagggctggcagaagaatgctgttacatgcttcttgcaggagcagaacatcaggataggaaagcctagcgatttcctgtgacgtgctgcgacagcagtgctggacaggacaggtggaagaggctgtgaatgcttgagctgatttccctggtcacgcccacgcgcgcgctgaataaatatgagacgtatagtaagactcgatccttaatgcggttcaagagcttgaatttgccgc

SEQ ID NO: 1666 - protein, 314 aa, Zea mays subsp. mays
  peptide (1)..(314): Ceres Seq. ID no. 12407363
  misc_feature (49)..(310): Pfam Name: Protein of unknown function (DUF516) Pfam Description: Protein of unknown function (DUF516)
  misc_feature (144)..(262): Homolog of NCBI NO: 18978354 NR Description: hypothetical protein [Pyrococcus furiosus DSM
  misc_feature (69)..(235): Homolog of NCBI NO: 13540908 NR Description: Uncharacterized conserved protein [Thermoplasma
  misc_feature (5)..(241): Homolog of NCBI NO: 14520224 NR Description: hypothetical protein [Pyrococcus abyssi]
  misc_feature (75)..(235): Homolog of NCBI NO: 16081204 NR Description: hypothetical protein [Thermoplasma acidophilum]
  misc_feature (5)..(262): Homolog of NCBI NO: 14589968 NR Description: hypothetical protein [Pyrococcus horikoshii]
  misc_feature (70)..(237): Homolog of NCBI NO: 22406443 NR Description: hypothetical protein [Ferroplasma acidarmanus]
  misc_feature (76)..(260): Homolog of NCBI NO: 15668338 NR Description: conserved hypothetical protein [Methanococcus
  misc_feature (66)..(247): Homolog of NCBI NO: 14601434 NR Description: hypothetical protein [Aeropyrum pernix]
  misc_feature (1)..(313): Homolog of NCBI NO: 15227708 NR Description: unknown protein; protein id: At2g03800.1
  misc_feature (1)..(313): Homolog of NCBI NO: 38636945 NR Description: putative GEKO1 [Oryza sativa (japonica
MVVLVVATTSDPASIGPAAAFLAMPGWSPGPPIAEAMESFTNGNVRLLKHERSIVAEDDLDQRWQEATGESVSEVIFLSKHTAVSKRPALTVHPIGVPHLKEDETPPQGGTPGWAAIPSPRIGPWLRLMQKIAVEQGLVPEFEVTLEATHHGPVTSTPTMFVEIGSTEDHWGRQDAAQAIALVLWKGLGLEDGNAVGTWQRNCEKVLLGIGGGHYVPRHMDIVIKDGVWVGHLLSGYSLPMDMPSQVNVKSSEEVAGMWKHSIKVSYEATKAAFPGGEVIAHLDHKSFKGWQKNAVTCFLQEQNIRIGKPSDFL

SEQ ID NO: 1667 - protein, 291 aa, Zea mays subsp. mays
  peptide (1)..(291): Ceres Seq. ID no. 12407364
  misc_feature (26)..(287): Pfam Name: Protein of unknown function (DUF516) Pfam Description: Protein of unknown function (DUF516)
  misc_feature (121)..(239): Homolog of NCBI NO: 18978354 NR Description: hypothetical protein [Pyrococcus furiosus DSM
  misc_feature (46)..(212): Homolog of NCBI NO: 13540908 NR Description: Uncharacterized conserved protein [Thermoplasma
  misc_feature (1)..(218): Homolog of NCBI NO: 14520224 NR Description: hypothetical protein [Pyrococcus abyssi]
  misc_feature (52)..(212): Homolog of NCBI NO: 16081204 NR Description: hypothetical protein [Thermoplasma acidophilum]
  misc_feature (1)..(239): Homolog of NCBI NO: 14589968 NR Description: hypothetical protein [Pyrococcus horikoshii]
  misc_feature (47)..(214): Homolog of NCBI NO: 22406443 NR Description: hypothetical protein [Ferroplasma acidarmanus]
  misc_feature (53)..(237): Homolog of NCBI NO: 15668338 NR Description: conserved hypothetical protein [Methanococcus
  misc_feature (43)..(224): Homolog of NCBI NO: 14601434 NR Description: hypothetical protein [Aeropyrum pernix]
  misc_feature (1)..(290): Homolog of NCBI NO: 15227708 NR Description: unknown protein; protein id: At2g03800.1
  misc_feature (1)..(290): Homolog of NCBI NO: 38636945 NR Description: putative GEKO1 [Oryza sativa (japonica
MPGWSPGPPIAEAMESFTNGNVRLLKHERSIVAEDDLDQRWQEATGESVSEVIFLSKHTAVSKRPALTVHPIGVPHLKEDETPPQGGTPGWAAIPSPRIGPWLRLMQKIAVEQGLVPEFEVTLEATHHGPVTSTPTMFVEIGSTEDHWGRQDAAQAIALVLWKGLGLEDGNAVGTWQRNCEKVLLGIGGGHYVPRHMDIVIKDGVWVGHLLSGYSLPMDMPSQVNVKSSEEVAGMWKHSIKVSYEATKAAFPGGEVIAHLDHKSFKGWQKNAVTCFLQEQNIRIGKPSDFL

SEQ ID NO: 1668 - protein, 278 aa, Zea mays subsp. mays
  peptide (1)..(278): Ceres Seq. ID no. 12407365
  misc_feature (13)..(274): Pfam Name: Protein of unknown function (DUF516) Pfam Description: Protein of unknown function (DUF516)
  misc_feature (108)..(226): Homolog of NCBI NO: 18978354 NR Description: hypothetical protein [Pyrococcus furiosus DSM
  misc_feature (33)..(199): Homolog of NCBI NO: 13540908 NR Description: Uncharacterized conserved protein [Thermoplasma
  misc_feature (1)..(205): Homolog of NCBI NO: 14520224 NR Description: hypothetical protein [Pyrococcus abyssi]
  misc_feature (39)..(199): Homolog of NCBI NO: 16081204 NR Description: hypothetical protein [Thermoplasma acidophilum]
  misc_feature (1)..(226): Homolog of NCBI NO: 14589968 NR Description: hypothetical protein [Pyrococcus horikoshii]
  misc_feature (34)..(201): Homolog of NCBI NO: 22406443 NR Description: hypothetical protein [Ferroplasma acidarmanus]
  misc_feature (40)..(224): Homolog of NCBI NO: 15668338 NR Description: conserved hypothetical protein [Methanococcus
  misc_feature (30)..(211): Homolog of NCBI NO: 14601434 NR Description: hypothetical protein [Aeropyrum pernix]
  misc_feature (1)..(277): Homolog of NCBI NO: 15227708 NR Description: unknown protein; protein id: At2g03800.1
  misc_feature (1)..(277): Homolog of NCBI NO: 38636945 NR Description: putative GEKO1 [Oryza sativa (japonica
MESFTNGNVRLLKHERSIVAEDDLDQRWQEATGESVSEVIFLSKHTAVSKRPALTVHPIGVPHLKEDETPPQGGTPGWAAIPSPRIGPWLRLMQKIAVEQGLVPEFEVTLEATHHGPVTSTPTMFVEIGSTEDHWGRQDAAQAIALVLWKGLGLEDGNAVGTWQRNCEKVLLGIGGGHYVPRHMDIVIKDGVWVGHLLSGYSLPMDMPSQVNVKSSEEVAGMWKHSIKVSYEATKAAFPGGEVIAHLDHKSFKGWQKNAVTCFLQEQNIRIGKPSDFL

SEQ ID NO: 1669 - DNA, 1454 bp, Zea mays subsp. mays
  misc_feature (1)..(1454): Ceres Seq. ID no. 12358320
  misc_feature: MA Experiment ID: 108543 Result: Down-regulated in Transcription
  misc_feature: MA Experiment ID: 108544 Result: Up-regulated in Transcription
atcgtcatatctccaggcggcgtcgtcaggcccttccgccgtcgtcacgcaaccgagctcggcacgcggcaacagccgcctccacacagcgcctgcaacctcctcctgcccacccatggccgccgctcgtcccggcaatctcagcgaattggagcagaaatggcataacggcggcgggcctgcgtgtgtgcttggcgtcggcacagccaacccagccaactgcgttcggcaagatgagtacactgactggtacttccgtatcaccaagagcgatcatcttacgcacaccaaagcaatcatgaggaaaacgtgtgagaagatgatggtaaaaaaacgctacttgcaagtcaatgaggagctcttcagtgtgcaccccgagttcttggaccctgcagctccaagtctgcaaggcaagctagctgtcgtggccggtgccatgccagggcttgtggctgctgccgcagagaaagccattgccgactggggccgcccggccggagacatcacccacctcgtcttcgccaccagttccagtgcccagctgcctcacattgacctccgcatcgctgcccttctcgggttaagcaccactgtgcagcgcacggtgatcggctttcacgcctgcagcggcagctccgccgcgctccgcgttgccaagtacatcgccgagaacaaccgcagcgcgcgagtcctcgtcgcttgcgcggacatgtggagcgtcatggatagttacgtagttcctaacgtagaccaccgctacggaattattggccacgcctttatcggtgacggtgccggcgcagttgtcgtcggaagccgaccacaggaacccgttgagcgcccaatcttcgagatggtatcagcgtcgcaggccacggtgcccggctcggagcgggcggttgccgtcgagctcaccaattgtggcctggagtatcgcctcgagtttggagatgtggcggcggaggtcggtggcaacatcgagcggtgcctgcttgacgcgctgtcgccgttgggcattggtagtgttggctggaataacctcttctgggtggtgcacccgggtggccccaggatcatggacaccttcacggcggctctcaagctacagcccgagaagctgtctgccagtcggcgtgtgcttagggagtacggcaacatcaccggcccgactctgatctttgtcctcgacgaggctatacgccgtcgccagctcgaccacgaggaggggagctgcgagtgggggctcatggtgggattgggcccggggttcaccattgatgtaatggcattgcgtgcgtgcagtggtaaatccacaccaacaccaagaatcaagagtagtctgtaagggagagccagaactcagaagcggccctttggttgtctgtttgtcagtgcgtttgtacgtgtcttcatcccaataaaataaataaataactgtggtttggctttgtggc

SEQ ID NO: 1670 - protein, 447 aa, Zea mays subsp. mays
  peptide (1)..(447): Ceres Seq. ID no. 12358321
  misc_feature (59)..(274): Pfam Name: Chalcone and stilbene synthases, N-terminal domain Pfam Description: Chalcone and stilbene synthases, N-terminal
  misc_feature (59)..(432): Homolog of NCBI NO: 12231190 NR Description: stilbene synthase [Vitis labrusca]
  misc_feature (52)..(432): Homolog of NCBI NO: 6166004 NR Description: CHALCONE SYNTHASE (NARINGENIN-CHALCONE SYNTHASE)
  misc_feature (59)..(432): Homolog of NCBI NO: 13442780 NR Description: chalcone synthase [Oryza sativa (japonica
  misc_feature (59)..(432): Homolog of NCBI NO: 1345809 NR Description: Chalcone synthase (Naregenin-chalcone synthase)
  misc_feature (52)..(432): Homolog of NCBI NO: 13774973 NR Description: chalcone synthase [Ipomoea purpurea]
  misc_feature (47)..(434): Homolog of NCBI NO: 33146463 NR Description: putative chalcone synthase
  misc_feature (59)..(431): Homolog of NCBI NO: 37531256 NR Description: putative chalcone synthase
  misc_feature (59)..(431): Homolog of NCBI NO: 37531436 NR Description: putative chalcone synthase
  misc_feature (41)..(432): Homolog of NCBI NO: 34393972 NR Description: putative chalcone synthase 1
  misc_feature (30)..(435): Homolog of NCBI NO: 34393320 NR Description: putative Chalcone synthase
SSYLQAASSGPSAVVTQPSSARGNSRLHTAPATSSCPPMAAARPGNLSELEQKWHNGGGPACVLGVGTANPANCVRQDEYTDWYFRITKSDHLTHTKAIMRKTCEKMMVKKRYLQVNEELFSVHPEFLDPAAPSLQGKLAVVAGAMPGLVAAAAEKAIADWGRPAGDITHLVFATSSSAQLPHIDLRIAALLGLSTTVQRTVIGFHACSGSSAALRVAKYIAENNRSARVLVACADMWSVMDSYVVPNVDHRYGIIGHAFIGDGAGAVVVGSRPQEPVERPIFEMVSASQATVPGSERAVAVELTNCGLEYRLEFGDVAAEVGGNIERCLLDALSPLGIGSVGWNNLFWVVHPGGPRIMDTFTAALKLQPEKLSASRRVLREYGNITGPTLIFVLDEAIRRRQLDHEEGSCEWGLMVGLGPGFTIDVMALRACSGKSTPTPRIKSSL

SEQ ID NO: 1671 - protein, 409 aa, Zea mays subsp. mays
  peptide (1)..(409): Ceres Seq. ID no. 12358322
  misc_feature (21)..(236): Pfam Name: Chalcone and stilbene synthases, N-terminal domain Pfam Description: Chalcone and stilbene synthases, N-terminal
  misc_feature (21)..(394): Homolog of NCBI NO: 12231190 NR Description: stilbene synthase [Vitis labrusca]
  misc_feature (14)..(394): Homolog of NCBI NO: 6166004 NR Description: CHALCONE SYNTHASE (NARINGENIN-CHALCONE SYNTHASE)
  misc_feature (21)..(394): Homolog of NCBI NO: 13442780 NR Description: chalcone synthase [Oryza sativa (japonica
  misc_feature (21)..(394): Homolog of NCBI NO: 1345809 NR Description: Chalcone synthase (Naregenin-chalcone synthase)
  misc_feature (14)..(394): Homolog of NCBI NO: 13774973 NR Description: chalcone synthase [Ipomoea purpurea]
  misc_feature (9)..(396): Homolog of NCBI NO: 33146463 NR Description: putative chalcone synthase
  misc_feature (21)..(393): Homolog of NCBI NO: 37531256 NR Description: putative chalcone synthase
  misc_feature (21)..(393): Homolog of NCBI NO: 37531436 NR Description: putative chalcone synthase
  misc_feature (3)..(394): Homolog of NCBI NO: 34393972 NR Description: putative chalcone synthase 1
  misc_feature (1)..(397): Homolog of NCBI NO: 34393320 NR Description: putative Chalcone synthase
MAAARPGNLSELEQKWHNGGGPACVLGVGTANPANCVRQDEYTDWYFRITKSDHLTHTKAIMRKTCEKMMVKKRYLQVNEELFSVHPEFLDPAAPSLQGKLAVVAGAMPGLVAAAAEKAIADWGRPAGDITHLVFATSSSAQLPHIDLRIAALLGLSTTVQRTVIGFHACSGSSAALRVAKYIAENNRSARVLVACADMWSVMDSYVVPNVDHRYGIIGHAFIGDGAGAVVVGSRPQEPVERPIFEMVSASQATVPGSERAVAVELTNCGLEYRLEFGDVAAEVGGNIERCLLDALSPLGIGSVGWNNLFWVVHPGGPRIMDTFTAALKLQPEKLSASRRVLREYGNITGPTLIFVLDEAIRRRQLDHEEGSCEWGLMVGLGPGFTIDVMALRACSGKSTPTPRIKSSL

SEQ ID NO: 1672 - protein, 348 aa, Zea mays subsp. mays
  peptide (1)..(348): Ceres Seq. ID no. 12358323
  misc_feature (1)..(175): Pfam Name: Chalcone and stilbene synthases, N-terminal domain Pfam Description: Chalcone and stilbene synthases, N-terminal
  misc_feature (1)..(335): Homolog of NCBI NO: 33146463 NR Description: putative chalcone synthase
  misc_feature (1)..(332): Homolog of NCBI NO: 37531256 NR Description: putative chalcone synthase
  misc_feature (1)..(332): Homolog of NCBI NO: 37531436 NR Description: putative chalcone synthase
  misc_feature (1)..(333): Homolog of NCBI NO: 6166004 NR Description: CHALCONE SYNTHASE (NARINGENIN-CHALCONE SYNTHASE)
  misc_feature (1)..(333): Homolog of NCBI NO: 1345809 NR Description: Chalcone synthase (Naregenin-chalcone synthase)
  misc_feature (1)..(333): Homolog of NCBI NO: 13774973 NR Description: chalcone synthase [Ipomoea purpurea]
  misc_feature (1)..(333): Homolog of NCBI NO: 13442780 NR Description: chalcone synthase [Oryza sativa (japonica
  misc_feature (1)..(333): Homolog of NCBI NO: 12231190 NR Description: stilbene synthase [Vitis labrusca]
  misc_feature (1)..(333): Homolog of NCBI NO: 34393972 NR Description: putative chalcone synthase 1
  misc_feature (1)..(336): Homolog of NCBI NO: 34393320 NR Description: putative Chalcone synthase
MRKTCEKMMVKKRYLQVNEELFSVHPEFLDPAAPSLQGKLAVVAGAMPGLVAAAAEKAIADWGRPAGDITHLVFATSSSAQLPHIDLRIAALLGLSTTVQRTVIGFHACSGSSAALRVAKYIAENNRSARVLVACADMWSVMDSYVVPNVDHRYGIIGHAFIGDGAGAVVVGSRPQEPVERPIFEMVSASQATVPGSERAVAVELTNCGLEYRLEFGDVAAEVGGNIERCLLDALSPLGIGSVGWNNLFWVVHPGGPRIMDTFTAALKLQPEKLSASRRVLREYGNITGPTLIFVLDEAIRRRQLDHEEGSCEWGLMVGLGPGFTIDVMALRACSGKSTPTPRIKSSL

SEQ ID NO: 1673 - DNA, 1722 bp, Zea mays subsp. mays
  misc_feature (1)..(1722): Ceres Seq. ID no. 12341549
  misc_feature: MA Experiment ID: 108527 Result: Up-regulated in Transcription
  misc_feature: MA Experiment 108527 PARAMETER Experiment Name: Zm_5mM_NO_P Parameter: Age (day) Value: 8
  misc_feature: MA Experiment 108527 PARAMETER Experiment Name: Zm_5mM_NO_P Parameter: Organism Value: Zea mays
  misc_feature: MA Experiment 108527 PARAMETER Experiment Name: Zm_5mM_NO_P Parameter: Plant Line Value: 35A19
  misc_feature: MA Experiment 108527 PARAMETER Experiment Name: Zm_5mM_NO_P Parameter: Timepoint (hr) Value: 6
  misc_feature: MA Experiment 108527 PARAMETER Experiment Name: Zm_5mM_NO_P Parameter: Tissue Value: Aerial
  misc_feature: MA Experiment 108527 PARAMETER Experiment Name: Zm_5mM_NO_P Parameter: Treatment Value: 5mM NO vs. No Treatment
  misc_feature: MA Experiment ID: 108543 Result: Down-regulated in Transcription
  misc_feature: MA Experiment ID: 108688 Result: Down-regulated in Transcription
  misc_feature: MA Experiment 108688 PARAMETER Experiment Name: Zm_Embryos-Flowers__P Parameter: Tissue Value: Immature Flowers vs. Aerial+
  misc_feature: MA Experiment ID: 20000479 Result: Up-regulated in Transcription
  misc_feature: MA Experiment 20000479 PARAMETER Experiment Name: Zm_Drought_P Parameter: Age (day) Value: 10
  misc_feature: MA Experiment 20000479 PARAMETER Experiment Name: Zm_Drought_P Parameter: Organism Value: Zea mays
  misc_feature: MA Experiment 20000479 PARAMETER Experiment Name: Zm_Drought_P Parameter: Plant Line Value: 35A19
  misc_feature: MA Experiment 20000479 PARAMETER Experiment Name: Zm_Drought_P Parameter: Timepoint (hr) Value: 48
  misc_feature: MA Experiment 20000479 PARAMETER Experiment Name: Zm_Drought_P Parameter: Tissue Value: Aerial
  misc_feature: MA Experiment 20000479 PARAMETER Experiment Name: Zm_Drought_P Parameter: Treatment Value: Drought vs. No Drought
  misc_feature: MA Experiment ID: 20000492 Result: Down-regulated in Transcription
  misc_feature: MA Experiment 20000492 PARAMETER Experiment Name: Zm_Hybrid_Seed_Dev_P Parameter: DAP Value: 12
  misc_feature: MA Experiment 20000492 PARAMETER Experiment Name: Zm_Hybrid_Seed_Dev_P Parameter: Organism Value: Zea mays
  misc_feature: MA Experiment 20000492 PARAMETER Experiment Name: Zm_Hybrid_Seed_Dev_P Parameter: Plant Line Value: 35A19
  misc_feature: MA Experiment 20000492 PARAMETER Experiment Name: Zm_Hybrid_Seed_Dev_P Parameter: Tissue Value: Fert Kernel vs. Unfert Floret
  misc_feature: MA Experiment ID: 20000626 Result: Up-regulated in Transcription
  misc_feature: MA Experiment 20000626 PARAMETER Experiment Name: Zm_Herbicide-Treatments_P Parameter: Timepoint (hr) Value: 12
  misc_feature: MA Experiment 20000626 PARAMETER Experiment Name: Zm_Herbicide-Treatments_P Parameter: Tissue Value: Aerial
  misc_feature: MA Experiment 20000626 PARAMETER Experiment Name: Zm_Herbicide-Treatments_P Parameter: Treatment Value: Roundup vs. No Treatment
  misc_feature: MA Experiment ID: 20001608 Result: Down-regulated in Transcription
  misc_feature: MA Experiment 20001608 PARAMETER Experiment Name: Zm_50ppm_KNO3_L-to-H_P Parameter: Age (day) Value: 21
  misc_feature: MA Experiment 20001608 PARAMETER Experiment Name: Zm_50ppm_KNO3_L-to-H_P Parameter: Organism Value: Zea mays
  misc_feature: MA Experiment 20001608 PARAMETER Experiment Name: Zm_50ppm_KNO3_L-to-H_P Parameter: Plant Line Value: 35A19
  misc_feature: MA Experiment 20001608 PARAMETER Experiment Name: Zm_50ppm_KNO3_L-to-H_P Parameter: Timepoint (hr) Value: 48
  misc_feature: MA Experiment 20001608 PARAMETER Experiment Name: Zm_50ppm_KNO3_L-to-H_P Parameter: Tissue Value: Shoots
  misc_feature: MA Experiment 20001608 PARAMETER Experiment Name: Zm_50ppm_KNO3_L-to-H_P Parameter: Treatment Value: 50ppm KNO3 vs. 50ppm KCl
atcgcctccacgaacaaaccacacaccccacctaccccggccggaccggcaggcagcacaacatggacctcgccctcctggagaaggccctgctgggcctgttcgccgcggctgtggtggccatcgccgtggccaagctgagcggcaagcggtaccgcctcccaccggggcccccgggcgcccccgtggttggaaactggctgcaggtgggcgacgacctgaaccaccgcaacctgatggccatggcgaagcggttcggcgacatcttcctgctgcgcatgggcgtgcgcaacctggtggtggtgtcgaccccggagctggccaaggaggtgctccacacgcagggcgtggagttcggctcccgcacccgcaacgtggtgttcgacatcttcacgggcaaggggcaggacatggtgttcacggtgtacggcgaccactggcgcaagatgcggcgcatcatgaccgtccccttcttcaccaacaaggtggtggcccagaaccgcgccgggtgggaggaggaggcccggctggtggtggaggacgtgaggaaggaccccgaggccgcggccggcggcgtcgtgctccgccgccgcctccagctgatgatgtacaacgacatgttccgcatcatgttcgaccgccggttcgacagcgagcacgaccccgctcttcaacaagctcaaggcgctcaacgcggagcgcagccgcctgtcgcagagcttcgagtacaactacggcgacttcatccccgtgctccgccccttcctccgcggctacctcaaccgctgccacgacctcaagacgcgccgcatgaagttcttcgaggacaacttcgtacaggagcgcaagaaggtgatggctcagactggtgagatccggtgcgccatggatcacatcctcgaggccgagaggaagggcgagatcaaccacgacaacgtcctctacatcgtcgagaacatcaacgtcgcagcgatcgagacgacactgtggtcgatcgagtggggcatcgccgagctggtgaaccacccggccatccagcacaagctccgggaggagctcgcctccgtgctgggcgccggcgtgcctgtgacggagccggacctcgagcgcctcccctaccttcaggccatcgtcaaggagacgctccgcctgcgcatggccatcccgctgctggtcccccacatgaacctcaacgacggcaagctcgccggctacgacatccccgccgagtccaagatcctcgtcaatgcctggttcctcgccaacgaccccaagaggtgggtgcggcccgacgagttccggcccgagcgcttcctggaggaggagaagtccgtggaggcccacggcaacgacttccgcttcgtgccctttggggtcggccgccggagctgccctgggatcatcctcgcgctgcctatcatcggcatcaccctgggccggctggtgcagaacttccagctgctgccgccgccggggctggacaagatcgacaccacggagaagcccggccagttcagcaaccagatcgccaagcatgccaccatcgtctgcaagcccctcgaggcctagaaatcaatgcctgtttcctgcacgcgcccccgcagatgaagcactatgtattttgtcttttttttgtgtgttgtgtttttttactaagaggagatgtatttcttgtttgtaaaatgcacttagtcaaatgagtcgagattatgttgatcatcg

SEQ ID NO: 1674 - protein, 289 aa, Zea mays subsp. mays
  peptide (1)..(289): Ceres Seq. ID no. 12341550
  misc_feature (54)..(231): Pfam Name: Cytochrome P450 Pfam Description: Cytochrome P450
  misc_feature (21)..(239): Homolog of NCBI NO: 3915095 NR Description: Trans-cinnamate 4-monooxygenase (Cinnamic acid
  misc_feature (21)..(231): Homolog of NCBI NO: 10442761 NR Description: cytochrome P450 [Triticum aestivum]
  misc_feature (21)..(231): Homolog of NCBI NO: 14192803 NR Description: cinnamic acid 4-hydroxylase [Sorghum bicolor]
RLHEQTTHPTYPGRTGRQHNMDLALLEKALLGLFAAAVVAIAVAKLSGKRYRLPPGPPGAPVVGNWLQVGDDLNHRNLMAMAKRFGDIFLLRMGVRNLVVVSTPELAKEVLHTQGVEFGSRTRNVVFDIFTGKGQDMVFTVYGDHWRKMRRIMTVPFFTNKVVAQNRAGWEEEARLVVEDVRKDPEAAAGGVVLRRRLQLMMYNDMFRIMFDRRFDSEHDPALQQAQGAQRGAQPPVAELRVQLRRLHPRAPPLPPRLPQPLPRPQDAPHEVLRGQLRTGAQEGDGSDW

SEQ ID NO: 1675 - protein, 270 aa, Zea mays subsp. mays
  peptide (1)..(270): Ceres Seq. ID no. 12341551
  misc_feature (219)..(270): Pfam Name: Equine herpesvirus glycoprotein gp2 Pfam Description: Equine herpesvirus glycoprotein gp2
  misc_feature (12)..(193): Homolog of NCBI NO: 29829093 NR Description: putative translation initiation factor IF-2
  misc_feature (221)..(270): Homolog of NCBI NO: 30313663 NR Description: sublingual apomucin [Mus musculus]
  misc_feature (248)..(270): Homolog of NCBI NO: 31204765 NR Description: ENSANGP00000001657 [Anopheles gambiae]
  misc_feature (1)..(270): Homolog of NCBI NO: 30424862 NR Description: RIKEN cDNA 5033413A03 [Mus musculus]
  misc_feature (168)..(270): Homolog of NCBI NO: 30424862 NR Description: RIKEN cDNA 5033413A03 [Mus musculus]
  misc_feature (223)..(270): Homolog of NCBI NO: 30313663 NR Description: sublingual apomucin [Mus musculus]
  misc_feature (222)..(270): Homolog of NCBI NO: 30313663 NR Description: sublingual apomucin [Mus musculus]
  misc_feature (205)..(270): Homolog of NCBI NO: 30313663 NR Description: sublingual apomucin [Mus musculus]
  misc_feature (223)..(270): Homolog of NCBI NO: 31204765 NR Description: ENSANGP00000001657 [Anopheles gambiae]
  misc_feature (223)..(270): Homolog of NCBI NO: 31204765 NR Description: ENSANGP00000001657 [Anopheles gambiae]
SPPRTNHTPHLPRPDRQAAQHGPRPPGEGPAGPVRRGCGGHRRGQAERQAVPPPTGAPGRPRGWKLAAGGRRPEPPQPDGHGEAVRRHLPAAHGRAQPGGGVDPGAGQGGAPHAGRGVRLPHPQRGVRHLHGQGAGHGVHGVRRPLAQDAAHHDRPLLHQQGGGPEPRRVGGGGPAGGGGREEGPRGRGRRRRAPPPPPADDVQRHVPHHVRPPVRQRARPRSSTSSRRSTRSAAACRRASSTTTATSSPCSAPSSAATSTAATTSRRAA

SEQ ID NO: 1676 - protein, 269 aa, Zea mays subsp. mays
  peptide (1)..(269): Ceres Seq. ID no. 12341552
  misc_feature (34)..(211): Pfam Name: Cytochrome P450 Pfam Description: Cytochrome P450
  misc_feature (1)..(219): Homolog of NCBI NO: 3915095 NR Description: Trans-cinnamate 4-monooxygenase (Cinnamic acid
  misc_feature (1)..(211): Homolog of NCBI NO: 10442761 NR Description: cytochrome P450 [Triticum aestivum]
  misc_feature (1)..(211): Homolog of NCBI NO: 14192803 NR Description: cinnamic acid 4-hydroxylase [Sorghum bicolor]
MDLALLEKALLGLFAAAVVAIAVAKLSGKRYRLPPGPPGAPVVGNWLQVGDDLNHRNLMAMAKRFGDIFLLRMGVRNLVVVSTPELAKEVLHTQGVEFGSRTRNVVFDIFTGKGQDMVFTVYGDHWRKMRRIMTVPFFTNKVVAQNRAGWEEEARLVVEDVRKDPEAAAGGVVLRRRLQLMMYNDMFRIMFDRRFDSEHDPALQQAQGAQRGAQPPVAELRVQLRRLHPRAPPLPPRLPQPLPRPQDAPHEVLRGQLRTGAQEGDGSDW

SEQ ID NO: 1677 - DNA, 1682 bp, Zea mays subsp. mays
  misc_feature (1)..(1682): Ceres Seq. ID no. 13577771
  misc_feature: MA Experiment ID: 108515 Result: Up-regulated in Transcription
  misc_feature: MA Experiment 108515 PARAMETER Experiment Name: Zm_2mM_SA_P Parameter: Age (day) Value: 8
  misc_feature: MA Experiment 108515 PARAMETER Experiment Name: Zm_2mM_SA_P Parameter: Organism Value: Zea mays
  misc_feature: MA Experiment 108515 PARAMETER Experiment Name: Zm_2mM_SA_P Parameter: Plant Line Value: 35A19
  misc_feature: MA Experiment 108515 PARAMETER Experiment Name: Zm_2mM_SA_P Parameter: Timepoint (hr) Value: 12
  misc_feature: MA Experiment 108515 PARAMETER Experiment Name: Zm_2mM_SA_P Parameter: Tissue Value: Aerial
  misc_feature: MA Experiment 108515 PARAMETER Experiment Name: Zm_2mM_SA_P Parameter: Treatment Value: 2mM SA vs. No Treatment
  misc_feature: MA Experiment ID: 108527 Result: Up-regulated in Transcription
  misc_feature: MA Experiment 108527 PARAMETER Experiment Name: Zm_5mM_NO_P Parameter: Age (day) Value: 8
  misc_feature: MA Experiment 108527 PARAMETER Experiment Name: Zm_5mM_NO_P Parameter: Organism Value: Zea mays
  misc_feature: MA Experiment 108527 PARAMETER Experiment Name: Zm_5mM_NO_P Parameter: Plant Line Value: 35A19
  misc_feature: MA Experiment 108527 PARAMETER Experiment Name: Zm_5mM_NO_P Parameter: Timepoint (hr) Value: 6
  misc_feature: MA Experiment 108527 PARAMETER Experiment Name: Zm_5mM_NO_P Parameter: Tissue Value: Aerial
  misc_feature: MA Experiment 108527 PARAMETER Experiment Name: Zm_5mM_NO_P Parameter: Treatment Value: 5mM NO vs. No Treatment
  misc_feature: MA Experiment ID: 108535 Result: Up-regulated in Transcription
  misc_feature: MA Experiment 108535 PARAMETER Experiment Name: Zm_Meristem_P Parameter: Age (day) Value: 8
  misc_feature: MA Experiment 108535 PARAMETER Experiment Name: Zm_Meristem_P Parameter: Organism Value: Zea mays
  misc_feature: MA Experiment 108535 PARAMETER Experiment Name: Zm_Meristem_P Parameter: Plant Line Value: 35A19
  misc_feature: MA Experiment 108535 PARAMETER Experiment Name: Zm_Meristem_P Parameter: Tissue Value: Root Meristem vs. Above Root Meristem
  misc_feature: MA Experiment ID: 108556 Result: Up-regulated in Transcription
  misc_feature: MA Experiment 108556 PARAMETER Experiment Name: Zm_Drought_P Parameter: Age (day) Value: 9
  misc_feature: MA Experiment 108556 PARAMETER Experiment Name: Zm_Drought_P Parameter: Organism Value: Zea mays
  misc_feature: MA Experiment 108556 PARAMETER Experiment Name: Zm_Drought_P Parameter: Plant Line Value: 35A19
  misc_feature: MA Experiment 108556 PARAMETER Experiment Name: Zm_Drought_P Parameter: Timepoint (hr) Value: 24
  misc_feature: MA Experiment 108556 PARAMETER Experiment Name: Zm_Drought_P Parameter: Tissue Value: Aerial
  misc_feature: MA Experiment 108556 PARAMETER Experiment Name: Zm_Drought_P Parameter: Treatment Value: Drought vs. No Drought
  misc_feature: MA Experiment ID: 20000108 Result: Up-regulated in Transcription
  misc_feature: MA Experiment 20000108 PARAMETER Experiment Name: Zm_Root-Tips_P Parameter: Age (day) Value: 12
  misc_feature: MA Experiment 20000108 PARAMETER Experiment Name: Zm_Root-Tips_P Parameter: Organism Value: Zea mays
  misc_feature: MA Experiment 20000108 PARAMETER Experiment Name: Zm_Root-Tips_P Parameter: Tissue Value: Root tips vs. Root mid region    35
  misc_feature: MA Experiment 20000108 PARAMETER Experiment Name: Zm_Root-Tips_P Parameter: Tissue Value: Root tips vs. Root mid region   Sequence Listing-Misc Features (4)
  misc_feature: MA Experiment ID: 20000479 Result: Up-regulated in Transcription
  misc_feature: MA Experiment 20000479 PARAMETER Experiment Name: Zm_Drought_P Parameter: Age (day) Value: 10
  misc_feature: MA Experiment 20000479 PARAMETER Experiment Name: Zm_Drought_P Parameter: Organism Value: Zea mays
  misc_feature: MA Experiment 20000479 PARAMETER Experiment Name: Zm_Drought_P Parameter: Plant Line Value: 35A19
  misc_feature: MA Experiment 20000479 PARAMETER Experiment Name: Zm_Drought_P Parameter: Timepoint (hr) Value: 48
  misc_feature: MA Experiment 20000479 PARAMETER Experiment Name: Zm_Drought_P Parameter: Tissue Value: Aerial
  misc_feature: MA Experiment 20000479 PARAMETER Experiment Name: Zm_Drought_P Parameter: Treatment Value: Drought vs. No Drought
  misc_feature: MA Experiment ID: 20000626 Result: Up-regulated in Transcription
  misc_feature: MA Experiment 20000626 PARAMETER Experiment Name: Zm_Herbicide-Treatments_P Parameter: Timepoint (hr) Value: 12
  misc_feature: MA Experiment 20000626 PARAMETER Experiment Name: Zm_Herbicide-Treatments_P Parameter: Tissue Value: Aerial
  misc_feature: MA Experiment 20000626 PARAMETER Experiment Name: Zm_Herbicide-Treatments_P Parameter: Treatment Value: Roundup vs. No Treatment
gcacgagaccattacctagaacatcctaatcgaaaacccagcgccccccgcgcacacacgcacacactgtcttagtgtctttctctgcctttctttccctagcgccgcgccggcgccgccattcgatcagtcttcgtcggccgcttcgccggcgacagcatactccagtcggttggttttggcacttcggaccggcggccatggcttccgacggcatcggccccagagatgtatgtgttgttggggttgcacgcaccccaatgggcggtttccttggtgccttgtctcccttgcctgctacgaaacttggctctatagtaattcaagctgctctggaaagagcaaacgtggatccagccctcgtgcaggaggtctactttggaaacgtattgagtgctaatttggggcaagctcctgcaaggcaagctgctctgggtgccgggataccaaactctgttgtttgcaccactgttaacaaagtctgtgcatctggcatgaaagctactatgtttgcagcacagtcaattcaattgggtatcaatgatattgttgtggctggtggcatggaaagcatgtccaatgccccaaagtacattgctgaagctaggaaggggtctcgttttggtcatgacacacttgttgatgccatgcttaaggatgggctttgggatgtatacaatgattgtgccatgggaatgtgtgccgagctttgtgctgacaatcatgccctcacaagagaagaccaggatgcatttgctatccaaagcaacgagcgtggaattgctgctcgtgacagtggtgcttttgcatgggagattattccggttcaagttcctgttggtagaggaaaacccccaacattaattgaaagagatgaaagcctggataagtttgacccagtaaaactaaagaaacttcgcccaagtttcaaggagaatggtggtacagttacagctggaaatgcttctagtataagtgatggagctgctgcattagttttggtgagtgggcagaaggctcaagagcttggccttcaagtccttgcaaggatcaaaggttatgctgatgcagctcaagctccggagctttttacaaccactccaggcacttgcaataccaaaggctatcgcaaatgctggattagagtcatcccgtgttgatttctatgagattaatgaagccttttcggctgttgcgcttgcaaatcaaaagcttcttggaattccttcagaaaagattaatgttcatggaggagctgtatctttaggacatcctctcgggtgcagtggtgctcgcattttggttacccttattggtgttctcagggcgaagagtggcaagatcggagttgctggtgtctgcaacggtggaggcggagcatcagctcttgttctggagctcgcataagaaatctagaccttgtagttagcaaaagctccctgaggtgatcttgtagtcttattttccgttgtagtagtcccatagaacatttcttaatttaatttggcaataaagcgaagtcgtgcttctgttggttgcatagtagagtatcatgtaataagagcaatggggatgtttcatagacacagcttagatatttttgaggatgctacagaaatattttatatatttgtcatgtgtctcgtacatttatctaggtcacatcacctatcctgccgccc

SEQ ID NO: 1678 - protein, 319 aa, Zea mays subsp. mays
  peptide (1)..(319): Ceres Seq. ID no. 13577772
  misc_feature (8)..(271): Pfam Name: Thiolase, N-terminal domain Pfam Description: Thiolase, N-terminal domain
  misc_feature (1)..(301): Homolog of NCBI NO: 8777413 NR Description: acetyl-CoA C-acetyltransferase [Arabidopsis
  misc_feature (1)..(301): Homolog of NCBI NO: 30695411 NR Description: acetyl-CoA C-acetyltransferase A thiolase), putative [Arabidopsis thaliana]
  misc_feature (10)..(301): Homolog of NCBI NO: 30695409 NR Description: acetyl-CoA C-acetyltransferase A thiolase), putative [Arabidopsis thaliana]
  misc_feature (1)..(301): Homolog of NCBI NO: 34894172 NR Description: putative acetoacyl-CoA-thiolase [Oryza sativa
  misc_feature (1)..(311): Homolog of NCBI NO: 15238793 NR Description: acetoacyl-CoA-thiolase; protein id: At5g47720.1,
  misc_feature (1)..(311): Homolog of NCBI NO: 30695277 NR Description: acetyl-CoA C-acetyltransferase
  misc_feature (2)..(301): Homolog of NCBI NO: 16417944 NR Description: acetyl Co-A acetyltransferase [Hevea brasiliensis]
  misc_feature (1)..(301): Homolog of NCBI NO: 7433657 NR Description: acetyl-CoA C-acetyltransferase (EC 2.3.1.9),
  misc_feature (10)..(314): Homolog of NCBI NO: 19113478 NR Description: acetyl-coa acetyltransferase (EC 2.3.1.9)
  misc_feature (10)..(314): Homolog of NCBI NO: 11257345 NR Description: probable acetyl-CoA C-acetyltransferase (EC - fission yeast (Schizosaccharomyces pombe)
MASDGIGPRDVCVVGVARTPMGGFLGALSPLPATKLGSIVIQAALERANVDPALVQEVYFGNVLSANLGQAPARQAALGAGIPNSVVCTTVNKVCASGMKATMFAAQSIQLGINDIVVAGGMESMSNAPKYIAEARKGSRFGHDTLVDAMLKDGLWDVYNDCAMGMCAELCADNHALTREDQDAFAIQSNERGIAARDSGAFAWEIIPVQVPVGRGKPPTLIERDESLDKFDPVKLKKLRPSFKENGGTVTAGNASSISDGAAALVLVSGQKAQELGLQVLARIKGYADAAQAPELFTTTPGTCNTKGYRKCWIRVIPC

SEQ ID NO: 1679 - protein, 299 aa, Zea mays subsp. mays
  peptide (1)..(299): Ceres Seq. ID no. 13577773
  misc_feature (1)..(251): Pfam Name: Thiolase, N-terminal domain Pfam Description: Thiolase, N-terminal domain
  misc_feature (1)..(281): Homolog of NCBI NO: 8777413 NR Description: acetyl-CoA C-acetyltransferase [Arabidopsis
  misc_feature (1)..(281): Homolog of NCBI NO: 30695411 NR Description: acetyl-CoA C-acetyltransferase A thiolase), putative [Arabidopsis thaliana]
  misc_feature (1)..(281): Homolog of NCBI NO: 30695409 NR Description: acetyl-CoA C-acetyltransferase A thiolase), putative [Arabidopsis thaliana]
  misc_feature (1)..(281): Homolog of NCBI NO: 34894172 NR Description: putative acetoacyl-CoA-thiolase [Oryza sativa
  misc_feature (1)..(291): Homolog of NCBI NO: 15238793 NR Description: acetoacyl-CoA-thiolase; protein id: At5g47720.1,
  misc_feature (1)..(291): Homolog of NCBI NO: 30695277 NR Description: acetyl-CoA C-acetyltransferase
  misc_feature (1)..(281): Homolog of NCBI NO: 16417944 NR Description: acetyl Co-A acetyltransferase [Hevea brasiliensis]
  misc_feature (1)..(281): Homolog of NCBI NO: 7433657 NR Description: acetyl-CoA C-acetyltransferase (EC 2.3.1.9),
  misc_feature (1)..(294): Homolog of NCBI NO: 19113478 NR Description: acetyl-coa acetyltransferase (EC 2.3.1.9)
  misc_feature (1)..(294): Homolog of NCBI NO: 11257345 NR Description: probable acetyl-CoA C-acetyltransferase (EC - fission yeast (Schizosaccharomyces pombe)
MGGFLGALSPLPATKLGSIVIQAALERANVDPALVQEVYFGNVLSANLGQAPARQAALGAGIPNSVVCTTVNKVCASGMKATMFAAQSIQLGINDIVVAGGMESMSNAPKYIAEARKGSRFGHDTLVDAMLKDGLWDVYNDCAMGMCAELCADNHALTREDQDAFAIQSNERGIAARDSGAFAWEIIPVQVPVGRGKPPTLIERDESLDKFDPVKLKKLRPSFKENGGTVTAGNASSISDGAAALVLVSGQKAQELGLQVLARIKGYADAAQAPELFTTTPGTCNTKGYRKCWIRVIPC

SEQ ID NO: 1680 - protein, 221 aa, Zea mays subsp. mays
  peptide (1)..(221): Ceres Seq. ID no. 13577774
  misc_feature (1)..(173): Pfam Name: Thiolase, N-terminal domain Pfam Description: Thiolase, N-terminal domain
  misc_feature (1)..(203): Homolog of NCBI NO: 8777413 NR Description: acetyl-CoA C-acetyltransferase [Arabidopsis
  misc_feature (1)..(203): Homolog of NCBI NO: 30695411 NR Description: acetyl-CoA C-acetyltransferase A thiolase), putative [Arabidopsis thaliana]
  misc_feature (1)..(203): Homolog of NCBI NO: 30695409 NR Description: acetyl-CoA C-acetyltransferase A thiolase), putative [Arabidopsis thaliana]
  misc_feature (1)..(203): Homolog of NCBI NO: 34894172 NR Description: putative acetoacyl-CoA-thiolase [Oryza sativa
  misc_feature (1)..(213): Homolog of NCBI NO: 15238793 NR Description: acetoacyl-CoA-thiolase; protein id: At5g47720.1,
  misc_feature (1)..(213): Homolog of NCBI NO: 30695277 NR Description: acetyl-CoA C-acetyltransferase
  misc_feature (1)..(203): Homolog of NCBI NO: 16417944 NR Description: acetyl Co-A acetyltransferase [Hevea brasiliensis]
  misc_feature (1)..(203): Homolog of NCBI NO: 7433657 NR Description: acetyl-CoA C-acetyltransferase (EC 2.3.1.9),
  misc_feature (1)..(216): Homolog of NCBI NO: 19113478 NR Description: acetyl-coa acetyltransferase (EC 2.3.1.9)
  misc_feature (1)..(216): Homolog of NCBI NO: 11257345 NR Description: probable acetyl-CoA C-acetyltransferase (EC - fission yeast (Schizosaccharomyces pombe)
MKATMFAAQSIQLGINDIVVAGGMESMSNAPKYIAEARKGSRFGHDTLVDAMLKDGLWDVYNDCAMGMCAELCADNHALTREDQDAFAIQSNERGIAARDSGAFAWEIIPVQVPVGRGKPPTLIERDESLDKFDPVKLKKLRPSFKENGGTVTAGNASSISDGAAALVLVSGQKAQELGLQVLARIKGYADAAQAPELFTTTPGTCNTKGYRKCWIRVIPC

SEQ ID NO: 1681 - DNA, 845 bp, Zea mays subsp. mays
  misc_feature (1)..(845): Ceres Seq. ID no. 12345824
  misc_feature: MA Experiment ID: 108543 Result: Up-regulated in Transcription
agagcggaatggaggaaatgcccctacctgttcacagtgactggcctcccgactcgactctcctccccctatctctatctgcttcctgctgagctcaaaccccttccgcctccccatccaccattccatccgccgccgccgccgccgcctgtgcaagatgaatgtggagaagctcaagaagatggctggcgctgtacgcaccggagggaagggcagcatgcgcaggaagaagaaggcagttcacaagaccacgaccaccgatgacaagcggcttcagagcaccttgaaaaggatcggggggaacaccattcctggtatcgaggaggtcaacatcttcaaggacgatgttgttatccagtttcagaaccctaaagtgcaagcatccattcctgcaaatacatgggtggttagtggagtaccccagacaaaaagtctgcaagaccttctgccatcaattatcaaccaactgggccctgataacctggacaaccttaagaagctggctgcagattttccagaggcaggtacctggtgctgaagcagctgcacaggatgatgacgacgtccctgagcttgtccaaggagagacatttgaggaggctgcagagaaggagcctcaactggagcaggatgagaacaaagaatcgtgattttgttgtgaagggtcgtcggtttaattgttggcatcagccttgcgagagaccctacctgctcatctggcgtgcctctttacatgtgctccagctttgtgtcaagtgtgctttgggttcgaaaagcattactgcattatgttttctgaagacagtgtaggcatatattttcctcgagccatagtgagtttccgc

SEQ ID NO: 1682 - protein, 126 aa, Zea mays subsp. mays
  peptide (1)..(126): Ceres Seq. ID no. 12345825
  misc_feature (34)..(91): Pfam Name: NAC domain Pfam Description: NAC domain
  misc_feature (1)..(106): Homolog of NCBI NO: 29367579 NR Description: putative transcription factor BTF3
  misc_feature (1)..(119): Homolog of NCBI NO: 16323127 NR Description: At1g17880/F2H15_10 [Arabidopsis thaliana]
  misc_feature (1)..(119): Homolog of NCBI NO: 15220876 NR Description: transcription factor, putative
  misc_feature (1)..(119): Homolog of NCBI NO: 21537065 NR Description: putative transcription factor BTF3 (RNA
  misc_feature (1)..(119): Homolog of NCBI NO: 15219413 NR Description: putative transcription factor BTF3 (RNA
  misc_feature (1)..(123): Homolog of NCBI NO: 33945882 NR Description: transcription factor homolog BTF3-like protein
  misc_feature (1)..(118): Homolog of NCBI NO: 27573340 NR Description: putative transcription factor
  misc_feature (1)..(119): Homolog of NCBI NO: 37535464 NR Description: putative transcription factor
  misc_feature (1)..(119): Homolog of NCBI NO: 29367567 NR Description: putative transcription factor BTF3
  misc_feature (1)..(119): Homolog of NCBI NO: 24431603 NR Description: Putative transcription factor
MNVEKLKKMAGAVRTGGKGSMRRKKKAVHKTTTTDDKRLQSTLKRIGGNTIPGIEEVNIFKDDVVIQFQNPKVQASIPANTWVVSGVPQTKSLQDLLPSIINQLGPDNLDNLKKLAADFPEAGTWC

SEQ ID NO: 1683 - protein, 118 aa, Zea mays subsp. mays
  peptide (1)..(118): Ceres Seq. ID no. 12345826
  misc_feature (26)..(83): Pfam Name: NAC domain Pfam Description: NAC domain
  misc_feature (1)..(98): Homolog of NCBI NO: 29367579 NR Description: putative transcription factor BTF3
  misc_feature (1)..(111): Homolog of NCBI NO: 16323127 NR Description: At1g17880/F2H15_10 [Arabidopsis thaliana]
  misc_feature (1)..(111): Homolog of NCBI NO: 15220876 NR Description: transcription factor, putative
  misc_feature (1)..(111): Homolog of NCBI NO: 21537065 NR Description: putative transcription factor BTF3 (RNA
  misc_feature (1)..(111): Homolog of NCBI NO: 15219413 NR Description: putative transcription factor BTF3 (RNA
  misc_feature (1)..(115): Homolog of NCBI NO: 33945882 NR Description: transcription factor homolog BTF3-like protein
  misc_feature (1)..(110): Homolog of NCBI NO: 27573340 NR Description: putative transcription factor
  misc_feature (1)..(111): Homolog of NCBI NO: 37535464 NR Description: putative transcription factor
  misc_feature (1)..(111): Homolog of NCBI NO: 29367567 NR Description: putative transcription factor BTF3
  misc_feature (1)..(111): Homolog of NCBI NO: 24431603 NR Description: Putative transcription factor
MAGAVRTGGKGSMRRKKKAVHKTTTTDDKRLQSTLKRIGGNTIPGIEEVNIFKDDVVIQFQNPKVQASIPANTWVVSGVPQTKSLQDLLPSIINQLGPDNLDNLKKLAADFPEAGTWC

SEQ ID NO: 1684 - protein, 106 aa, Zea mays subsp. mays
  peptide (1)..(106): Ceres Seq. ID no. 12345827
  misc_feature (14)..(71): Pfam Name: NAC domain Pfam Description: NAC domain
  misc_feature (1)..(86): Homolog of NCBI NO: 29367579 NR Description: putative transcription factor BTF3
  misc_feature (1)..(99): Homolog of NCBI NO: 16323127 NR Description: At1g17880/F2H15_10 [Arabidopsis thaliana]
  misc_feature (1)..(99): Homolog of NCBI NO: 15220876 NR Description: transcription factor, putative
  misc_feature (1)..(99): Homolog of NCBI NO: 21537065 NR Description: putative transcription factor BTF3 (RNA
  misc_feature (1)..(99): Homolog of NCBI NO: 15219413 NR Description: putative transcription factor BTF3 (RNA
  misc_feature (1)..(103): Homolog of NCBI NO: 33945882 NR Description: transcription factor homolog BTF3-like protein
  misc_feature (1)..(98): Homolog of NCBI NO: 27573340 NR Description: putative transcription factor
  misc_feature (1)..(99): Homolog of NCBI NO: 37535464 NR Description: putative transcription factor
  misc_feature (1)..(99): Homolog of NCBI NO: 29367567 NR Description: putative transcription factor BTF3
  misc_feature (1)..(99): Homolog of NCBI NO: 24431603 NR Description: Putative transcription factor
MRRKKKAVHKTTTTDDKRLQSTLKRIGGNTIPGIEEVNIFKDDVVIQFQNPKVQASIPANTWVVSGVPQTKSLQDLLPSIINQLGPDNLDNLKKLAADFPEAGTWC

SEQ ID NO: 1685 - DNA, 1258 bp, Zea mays subsp. mays
  misc_feature (1)..(1258): Ceres Seq. ID no. 12349912
  misc_feature: MA Experiment ID: 108528 Result: Up-regulated in Transcription
  misc_feature: MA Experiment 108528 PARAMETER Experiment Name: Zm_Imbibed_Seeds_P Parameter: Age (day) Value: 5 vs. 2
  misc_feature: MA Experiment 108528 PARAMETER Experiment Name: Zm_Imbibed_Seeds_P Parameter: Organism Value: Zea mays
  misc_feature: MA Experiment 108528 PARAMETER Experiment Name: Zm_Imbibed_Seeds_P Parameter: Plant Line Value: 35A19
  misc_feature: MA Experiment 108528 PARAMETER Experiment Name: Zm_Imbibed_Seeds_P Parameter: Tissue Value: Aerial vs. Embryo
  misc_feature: MA Experiment ID: 108530 Result: Up-regulated in Transcription
  misc_feature: MA Experiment 108530 PARAMETER Experiment Name: Zm_Imbibed_Seeds_P Parameter: Age (day) Value: 6 vs. 2
  misc_feature: MA Experiment 108530 PARAMETER Experiment Name: Zm_Imbibed_Seeds_P Parameter: Organism Value: Zea mays
  misc_feature: MA Experiment 108530 PARAMETER Experiment Name: Zm_Imbibed_Seeds_P Parameter: Plant Line Value: 35A19
  misc_feature: MA Experiment 108530 PARAMETER Experiment Name: Zm_Imbibed_Seeds_P Parameter: Tissue Value: Aerial vs. Embryo
  misc_feature: MA Experiment ID: 108545 Result: Up-regulated in Transcription
  misc_feature: MA Experiment 108545 PARAMETER Experiment Name: Zm_Imbibed_Seeds_P Parameter: Age (day) Value: 3 vs. 2
  misc_feature: MA Experiment 108545 PARAMETER Experiment Name: Zm_Imbibed_Seeds_P Parameter: Organism Value: Zea mays
  misc_feature: MA Experiment 108545 PARAMETER Experiment Name: Zm_Imbibed_Seeds_P Parameter: Plant Line Value: 35A19
  misc_feature: MA Experiment 108545 PARAMETER Experiment Name: Zm_Imbibed_Seeds_P Parameter: Tissue Value: Aerial vs. Embryo
  misc_feature: MA Experiment ID: 108547 Result: Up-regulated in Transcription
  misc_feature: MA Experiment 108547 PARAMETER Experiment Name: Zm_Imbibed_Seeds_P Parameter: Age (day) Value: 4 vs. 2
  misc_feature: MA Experiment 108547 PARAMETER Experiment Name: Zm_Imbibed_Seeds_P Parameter: Organism Value: Zea mays
  misc_feature: MA Experiment 108547 PARAMETER Experiment Name: Zm_Imbibed_Seeds_P Parameter: Plant Line Value: 35A19
  misc_feature: MA Experiment 108547 PARAMETER Experiment Name: Zm_Imbibed_Seeds_P Parameter: Tissue Value: Aerial vs. Embryo
gacaaccttctcatccccaaccccgtcagcccgtgcggccgtgccctctgcctcctctgccactcctcgcccaaagcgccagaggcgcagcccgagccacaggttgcctcctctccctctcctcgtggcctcgtccttctcgttcaagacgaaaccgtacgcgagcgagctggtgagggaggaagagcagggaggtgggatcaggccggctccatggacgccacgctcctcctcctccccgccaactgcacggccgccgccagcgggcggatgcggcctcgactgcctgcaggcccacatgtggcttcccctggtccctccgcgcggccaaggacctccatccgggcctcagccgtgtccgcagccctcgccgttcgtggcctcccgcaacacgcttccgtggccgggcaaagcactggaagttatagggttggtgatgttatgaccaaaagggaagagctccatgttgtgaaaccaacaacttcagttgatgacgcccttgagatgctggtgaagcataggatctctggctttcctgttattgatgatgactggaatttggttggcgttgtgtcagattatgatttattggcactggatacaatatcaggagctggaccggctgaagcagacatatttcctgaggtggatagcacttcgaagacatttcatgagatacagaagcttttgagcaaaaccaacgggaaggttattgctgatgttatgaccccagcgcctctcgtggtgcgtgaaacaactaaccttgaagatgctgcaaggttactccttgtgactaagtaccgcaggcttccagtggtcgatagctcaggcaaactggttgggatcattacaagagggaacgtcgtccaagccgccctcgaaatcaagaaaaaggttgaagggacactctgagatgactacctccaggtatcctttttgctgccacatgtggggcttaggacttggacacatctctagttggcaactgatcaatcaaagcgactgtcagagtgagcgatgaaagtcgctatgtttatgaagatttgcccggagaagcacaggtgtatgtgtagtgtttgttatatatgctgatgcagtccttgctggccaaaacacaggttaccgattgttctggtttcctgggcttctttggacaccaaattcttaacctaggtcttgtttgggtgcacacgtatctagttcaacttacttgtattgaggttcattgaagtggaaaatcaactagttttcgcacttc

SEQ ID NO: 1686 - protein, 303 aa, Zea mays subsp. mays
  peptide (1)..(303): Ceres Seq. ID no. 12349913
  misc_feature (148)..(201): Pfam Name: CBS domain Pfam Description: CBS domain
  misc_feature (72)..(297): Homolog of NCBI NO: 15234564 NR Description: putative protein; protein id: At4g36910.1
  misc_feature (144)..(291): Homolog of NCBI NO: 23127710 NR Description: hypothetical protein [Nostoc punctiforme]
  misc_feature (144)..(291): Homolog of NCBI NO: 23040753 NR Description: hypothetical protein [Trichodesmium erythraeum
  misc_feature (141)..(291): Homolog of NCBI NO: 16331252 NR Description: IMP dehydrogenase [Synechocystis sp. PCC 6803]
  misc_feature (113)..(203): Homolog of NCBI NO: 7486280 NR Description: hypothetical protein F28A23.120 - Arabidopsis
  misc_feature (113)..(302): Homolog of NCBI NO: 18418376 NR Description: putative protein
  misc_feature (218)..(282): Homolog of NCBI NO: 7486280 NR Description: hypothetical protein F28A23.120 - Arabidopsis
  misc_feature (144)..(291): Homolog of NCBI NO: 17231305 NR Description: hypothetical protein [Nostoc sp. PCC 7120]
  misc_feature (143)..(291): Homolog of NCBI NO: 15678671 NR Description: conserved protein [Methanothermobacter
  misc_feature (117)..(303): Homolog of NCBI NO: 34015153 NR Description: putative CBS domain containing protein
DNLLIPNPVSPCGRALCLLCHSSPKAPEAQPEPQVASSPSPRGLVLLVQDETVRERAGEGGRAGRWDQAGSMDATLLLLPANCTAAASGRMRPRLPAGPHVASPGPSARPRTSIRASAVSAALAVRGLPQHASVAGQSTGSYRVGDVMTKREELHVVKPTTSVDDALEMLVKHRISGFPVIDDDWNLVGVVSDYDLLALDTISGAGPAEADIFPEVDSTSKTFHEIQKLLSKTNGKVIADVMTPAPLVVRETTNLEDAARLLLVTKYRRLPVVDSSGKLVGIITRGNVVQAALEIKKKVEGTL

SEQ ID NO: 1687 - protein, 232 aa, Zea mays subsp. mays
  peptide (1)..(232): Ceres Seq. ID no. 12349914
  misc_feature (77)..(130): Pfam Name: CBS domain Pfam Description: CBS domain
  misc_feature (73)..(220): Homolog of NCBI NO: 23127710 NR Description: hypothetical protein [Nostoc punctiforme]
  misc_feature (72)..(220): Homolog of NCBI NO: 15678671 NR Description: conserved protein [Methanothermobacter
  misc_feature (73)..(220): Homolog of NCBI NO: 23040753 NR Description: hypothetical protein [Trichodesmium erythraeum
  misc_feature (73)..(220): Homolog of NCBI NO: 17231305 NR Description: hypothetical protein [Nostoc sp. PCC 7120]
  misc_feature (70)..(220): Homolog of NCBI NO: 16331252 NR Description: IMP dehydrogenase [Synechocystis sp. PCC 6803]
  misc_feature (147)..(211): Homolog of NCBI NO: 7486280 NR Description: hypothetical protein F28A23.120 - Arabidopsis
  misc_feature (42)..(132): Homolog of NCBI NO: 7486280 NR Description: hypothetical protein F28A23.120 - Arabidopsis
  misc_feature (42)..(231): Homolog of NCBI NO: 18418376 NR Description: putative protein
  misc_feature (1)..(226): Homolog of NCBI NO: 15234564 NR Description: putative protein; protein id: At4g36910.1
  misc_feature (46)..(232): Homolog of NCBI NO: 34015153 NR Description: putative CBS domain containing protein
MDATLLLLPANCTAAASGRMRPRLPAGPHVASPGPSARPRTSIRASAVSAALAVRGLPQHASVAGQSTGSYRVGDVMTKREELHVVKPTTSVDDALEMLVKHRISGFPVIDDDWNLVGVVSDYDLLALDTISGAGPAEADIFPEVDSTSKTFHEIQKLLSKTNGKVIADVMTPAPLVVRETTNLEDAARLLLVTKYRRLPVVDSSGKLVGIITRGNVVQAALEIKKKVEGTL

SEQ ID NO: 1688 - protein, 213 aa, Zea mays subsp. mays
  peptide (1)..(213): Ceres Seq. ID no. 12349915
  misc_feature (58)..(111): Pfam Name: CBS domain Pfam Description: CBS domain
  misc_feature (54)..(201): Homolog of NCBI NO: 23127710 NR Description: hypothetical protein [Nostoc punctiforme]
  misc_feature (53)..(201): Homolog of NCBI NO: 15678671 NR Description: conserved protein [Methanothermobacter
  misc_feature (54)..(201): Homolog of NCBI NO: 23040753 NR Description: hypothetical protein [Trichodesmium erythraeum
  misc_feature (54)..(201): Homolog of NCBI NO: 17231305 NR Description: hypothetical protein [Nostoc sp. PCC 7120]
  misc_feature (51)..(201): Homolog of NCBI NO: 16331252 NR Description: IMP dehydrogenase [Synechocystis sp. PCC 6803]
  misc_feature (128)..(192): Homolog of NCBI NO: 7486280 NR Description: hypothetical protein F28A23.120 - Arabidopsis
  misc_feature (23)..(113): Homolog of NCBI NO: 7486280 NR Description: hypothetical protein F28A23.120 - Arabidopsis
  misc_feature (23)..(212): Homolog of NCBI NO: 18418376 NR Description: putative protein
  misc_feature (1)..(207): Homolog of NCBI NO: 15234564 NR Description: putative protein; protein id: At4g36910.1
  misc_feature (27)..(213): Homolog of NCBI NO: 34015153 NR Description: putative CBS domain containing protein
MRPRLPAGPHVASPGPSARPRTSIRASAVSAALAVRGLPQHASVAGQSTGSYRVGDVMTKREELHVVKPTTSVDDALEMLVKHRISGFPVIDDDWNLVGVVSDYDLLALDTISGAGPAEADIFPEVDSTSKTFHEIQKLLSKTNGKVIADVMTPAPLVVRETTNLEDAARLLLVTKYRRLPVVDSSGKLVGIITRGNVVQAALEIKKKVEGTL

SEQ ID NO: 1689 - DNA, 1746 bp, Zea mays subsp. mays
  misc_feature (1)..(1746): Ceres Seq. ID no. 12365228
  misc_feature: MA Experiment ID: 108504 Result: Down-regulated in Transcription
  misc_feature: MA Experiment 108504 PARAMETER Experiment Name: Zm_Drought_P Parameter: Age (day) Value: 8
  misc_feature: MA Experiment 108504 PARAMETER Experiment Name: Zm_Drought_P Parameter: Organism Value: Zea mays
  misc_feature: MA Experiment 108504 PARAMETER Experiment Name: Zm_Drought_P Parameter: Plant Line Value: 35A19
  misc_feature: MA Experiment 108504 PARAMETER Experiment Name: Zm_Drought_P Parameter: Timepoint (hr) Value: 12
  misc_feature: MA Experiment 108504 PARAMETER Experiment Name: Zm_Drought_P Parameter: Tissue Value: Aerial
  misc_feature: MA Experiment 108504 PARAMETER Experiment Name: Zm_Drought_P Parameter: Treatment Value: Drought vs. No Drought
  misc_feature: MA Experiment ID: 108523 Result: Down-regulated in Transcription
  misc_feature: MA Experiment 108523 PARAMETER Experiment Name: Zm_42deg_Heat_P Parameter: Age (day) Value: 8
  misc_feature: MA Experiment 108523 PARAMETER Experiment Name: Zm_42deg_Heat_P Parameter: Organism Value: Zea mays
  misc_feature: MA Experiment 108523 PARAMETER Experiment Name: Zm_42deg_Heat_P Parameter: Plant Line Value: 35A19
  misc_feature: MA Experiment 108523 PARAMETER Experiment Name: Zm_42deg_Heat_P Parameter: Temperature (deg C) Value: 42 vs. 22
  misc_feature: MA Experiment 108523 PARAMETER Experiment Name: Zm_42deg_Heat_P Parameter: Timepoint (hr) Value: 6
  misc_feature: MA Experiment 108523 PARAMETER Experiment Name: Zm_42deg_Heat_P Parameter: Tissue Value: Aerial
  misc_feature: MA Experiment ID: 108535 Result: Up-regulated in Transcription
  misc_feature: MA Experiment 108535 PARAMETER Experiment Name: Zm_Meristem_P Parameter: Age (day) Value: 8
  misc_feature: MA Experiment 108535 PARAMETER Experiment Name: Zm_Meristem_P Parameter: Organism Value: Zea mays
  misc_feature: MA Experiment 108535 PARAMETER Experiment Name: Zm_Meristem_P Parameter: Plant Line Value: 35A19
  misc_feature: MA Experiment 108535 PARAMETER Experiment Name: Zm_Meristem_P Parameter: Tissue Value: Root Meristem vs. Above Root Meristem
  misc_feature: MA Experiment ID: 108536 Result: Down-regulated in Transcription
  misc_feature: MA Experiment 108536 PARAMETER Experiment Name: Zm_Meristem_P Parameter: Age (day) Value: 8
  misc_feature: MA Experiment 108536 PARAMETER Experiment Name: Zm_Meristem_P Parameter: Organism Value: Zea mays
  misc_feature: MA Experiment 108536 PARAMETER Experiment Name: Zm_Meristem_P Parameter: Plant Line Value: 35A19
  misc_feature: MA Experiment 108536 PARAMETER Experiment Name: Zm_Meristem_P Parameter: Tissue Value: Shoot Meristem vs. Above Shoot Meristem
  misc_feature: MA Experiment ID: 108543 Result: Up-regulated in Transcription
  misc_feature: MA Experiment ID: 108544 Result: Down-regulated in Transcription
  misc_feature: MA Experiment ID: 108689 Result: Down-regulated in Transcription
  misc_feature: MA Experiment 108689 PARAMETER Experiment Name: Zm_Drought_Roots_P Parameter: Age (day) Value: 9
  misc_feature: MA Experiment 108689 PARAMETER Experiment Name: Zm_Drought_Roots_P Parameter: Organism Value: Zea mays
  misc_feature: MA Experiment 108689 PARAMETER Experiment Name: Zm_Drought_Roots_P Parameter: Plant Line Value: 35A19
  misc_feature: MA Experiment 108689 PARAMETER Experiment Name: Zm_Drought_Roots_P Parameter: Timepoint (hr) Value: 24
  misc_feature: MA Experiment 108689 PARAMETER Experiment Name: Zm_Drought_Roots_P Parameter: Tissue Value: Roots
  misc_feature: MA Experiment 108689 PARAMETER Experiment Name: Zm_Drought_Roots_P Parameter: Treatment Value: Drought vs. No Drought
  misc_feature: MA Experiment ID: 20000479 Result: Down-regulated in Transcription
  misc_feature: MA Experiment 20000479 PARAMETER Experiment Name: Zm_Drought_P Parameter: Age (day) Value: 10
  misc_feature: MA Experiment 20000479 PARAMETER Experiment Name: Zm_Drought_P Parameter: Organism Value: Zea mays
  misc_feature: MA Experiment 20000479 PARAMETER Experiment Name: Zm_Drought_P Parameter: Plant Line Value: 35A19
  misc_feature: MA Experiment 20000479 PARAMETER Experiment Name: Zm_Drought_P Parameter: Timepoint (hr) Value: 48
  misc_feature: MA Experiment 20000479 PARAMETER Experiment Name: Zm_Drought_P Parameter: Tissue Value: Aerial
  misc_feature: MA Experiment 20000479 PARAMETER Experiment Name: Zm_Drought_P Parameter: Treatment Value: Drought vs. No Drought
  misc_feature: MA Experiment ID: 20000480 Result: Down-regulated in Transcription
  misc_feature: MA Experiment 20000480 PARAMETER Experiment Name: Zm_Drought_P Parameter: Age (day) Value: 11
  misc_feature: MA Experiment 20000480 PARAMETER Experiment Name: Zm_Drought_P Parameter: Organism Value: Zea mays
  misc_feature: MA Experiment 20000480 PARAMETER Experiment Name: Zm_Drought_P Parameter: Plant Line Value: 35A19
  misc_feature: MA Experiment 20000480 PARAMETER Experiment Name: Zm_Drought_P Parameter: Timepoint (hr) Value: 72
  misc_feature: MA Experiment 20000480 PARAMETER Experiment Name: Zm_Drought_P Parameter: Tissue Value: Aerial
  misc_feature: MA Experiment 20000480 PARAMETER Experiment Name: Zm_Drought_P Parameter: Treatment Value: Drought vs. No Drought
  misc_feature: MA Experiment ID: 20000626 Result: Down-regulated in Transcription
  misc_feature: MA Experiment 20000626 PARAMETER Experiment Name: Zm_Herbicide-Treatments_P Parameter: Timepoint (hr) Value: 12
  misc_feature: MA Experiment 20000626 PARAMETER Experiment Name: Zm_Herbicide-Treatments_P Parameter: Tissue Value: Aerial
  misc_feature: MA Experiment 20000626 PARAMETER Experiment Name: Zm_Herbicide-Treatments_P Parameter: Treatment Value: Roundup vs. No Treatment
atcatctcatttgctgcgttgttttgtttgccgcgcccacaaataggcgccagttcatccgcttccattcctagttctcaccacccagaagtccacctccttgttgccttcctccaatcccaaatctcacctccttccagttccagctatcgcttctcgtgttggctcgcctcttcctccattcagtggctccttagatcggctcagggacacaccagctgatcgtgtcggcgccgaatctagtggcaatttctcgctattgttgccccggagcagtggtttggatccaagaaagcggccgaccttcttggttgtatatcctcccgcaatggcggcgctcctggagctgttcctgggctcctcgtccgcaccggtggactgggaggcagaggcctacccggcgtacggggacttcgccgtgctacccttactcgtcgcctttttccccgccgtccggttcctcctcgaccgactcgtcttcgaggttttagcacggaaacttatatttggaaaagaacatgataagctttctgaaacagatgacagtagaaagaaaatcaataaatttaaggaatcagcatggaagtttgtttattttctttctggagaactgctttcactatctgtaacatacaatgagccatggtttaagaacaccagatacttttggataggccctggtgaccagatctggcctgatcaaatgataaaactgaagctcaaagctgtctacatgtatgctgctggattttacacatattcaattttcgctcttctgttctgggaaacaaggcgttcggactttggagtatcaatgtcccaccatatagcaactgttgttctgattgttctttcctacattttcagatttgctcgtgttggctctgttgttttagcccttcatgatgcaagtgatatattcctagagattgggaagatggccaagtacagtagctgcgagtggctagcagttgtggcatttcttcttttcgtggcatcgtggatacttctccggcttgttatattccctttctggatcctaagaagcacaagctatgaagtactgctgaccctggacaaggagaaacatcagttttatggccccatatactattatgttttcaactgtcttctgttctcactcctagttcttcacatatattggtgggtactgatatggcggatgctagttaagcagattcaatcgaaagggcatgttggtgatgatgttcgatccgattctgaaggcgaagaggaacatgaagattaactttttaggttgaatgcttaactgaagaactatgttgtgtgatacctacagcaaggcacaccttctgaaaccacctttttccttctaaagaagatttgcagatattagattttattagatcatatcattctttcagcatcaaagatgacaactatcatttgcgagttgccactgaagccgtctgtgctcttggatgtttgcatgaaaacagaagtgaattgtatttttttcccagtcaaccgtcgtttgtaaaagatacagaataatcgcttgttcatccattcttgtaactagacagttgatttgatttcaaatcatgtaatttgctacatcagcttagttgattacttggtgtatcatccattatgatgtaaatgggagtcttgggaagttcacaacaagaatgtgacactatgtactgttatttctcctattattttaataagagcacagagaagtagcccaagtgcaaggat

SEQ ID NO: 1690 - protein, 313 aa, Zea mays subsp. mays
  peptide (1)..(313): Ceres Seq. ID no. 12365229
  misc_feature (98)..(310): Pfam Name: Longevity-assurance protein (LAG1) Pfam Description: Longevity-assurance protein (LAG1)
  misc_feature (77)..(313): Homolog of NCBI NO: 27769146 NR Description: Similar to RIKEN cDNA 0610013I17 gene [Xenopus
  misc_feature (16)..(128): Homolog of NCBI NO: 8920562 NR Description: Contains similarity to LAG1 homolog 1 from
  misc_feature (38)..(310): Homolog of NCBI NO: 7658241 NR Description: LAG1 homolog 2 [Arabidopsis thaliana]
  misc_feature (24)..(309): Homolog of NCBI NO: 34901974 NR Description: unknown protein [Oryza sativa (japonica
  misc_feature (38)..(310): Homolog of NCBI NO: 15230323 NR Description: longevity factor-like protein
  misc_feature (16)..(243): Homolog of NCBI NO: 30683361 NR Description: longevity assurance protein -related [Arabidopsis
  misc_feature (13)..(313): Homolog of NCBI NO: 7688742 NR Description: ASC1 [Lycopersicon esculentum]
  misc_feature (9)..(313): Homolog of NCBI NO: 18404559 NR Description: expressed protein
  misc_feature (16)..(313): Homolog of NCBI NO: 25518747 NR Description: hypothetical protein F13B4.7 - Arabidopsis
  misc_feature (16)..(313): Homolog of NCBI NO: 16974114 NR Description: putative resistance protein [Lycopersicon
MAALLELFLGSSSAPVDWEAEAYPAYGDFAVLPLLVAFFPAVRFLLDRLVFEVLARKLIFGKEHDKLSETDDSRKKINKFKESAWKFVYFLSGELLSLSVTYNEPWFKNTRYFWIGPGDQIWPDQMIKLKLKAVYMYAAGFYTYSIFALLFWETRRSDFGVSMSHHIATVVLIVLSYIFRFARVGSVVLALHDASDIFLEIGKMAKYSSCEWLAVVAFLLFVASWILLRLVIFPFWILRSTSYEVLLTLDKEKHQFYGPIYYYVFNCLLFSLLVLHIYWWVLIWRMLVKQIQSKGHVGDDVRSDSEGEEEHED

SEQ ID NO: 1691 - protein, 188 aa, Zea mays subsp. mays
  peptide (1)..(188): Ceres Seq. ID no. 12365230
  misc_feature (1)..(185): Pfam Name: Longevity-assurance protein (LAG1) Pfam Description: Longevity-assurance protein (LAG1)
  misc_feature (1)..(188): Homolog of NCBI NO: 24119257 NR Description: trh3 protein [Danio rerio]
  misc_feature (1)..(188): Homolog of NCBI NO: 27769146 NR Description: Similar to RIKEN cDNA 0610013I17 gene [Xenopus
  misc_feature (1)..(185): Homolog of NCBI NO: 7658241 NR Description: LAG1 homolog 2 [Arabidopsis thaliana]
  misc_feature (1)..(184): Homolog of NCBI NO: 34901974 NR Description: unknown protein [Oryza sativa (japonica
  misc_feature (1)..(185): Homolog of NCBI NO: 15230323 NR Description: longevity factor-like protein
  misc_feature (1)..(118): Homolog of NCBI NO: 30683361 NR Description: longevity assurance protein -related [Arabidopsis
  misc_feature (1)..(188): Homolog of NCBI NO: 7688742 NR Description: ASC1 [Lycopersicon esculentum]
  misc_feature (1)..(188): Homolog of NCBI NO: 18404559 NR Description: expressed protein
  misc_feature (1)..(188): Homolog of NCBI NO: 25518747 NR Description: hypothetical protein F13B4.7 - Arabidopsis
  misc_feature (1)..(188): Homolog of NCBI NO: 16974114 NR Description: putative resistance protein [Lycopersicon
MIKLKLKAVYMYAAGFYTYSIFALLFWETRRSDFGVSMSHHIATVVLIVLSYIFRFARVGSVVLALHDASDIFLEIGKMAKYSSCEWLAVVAFLLFVASWILLRLVIFPFWILRSTSYEVLLTLDKEKHQFYGPIYYYVFNCLLFSLLVLHIYWWVLIWRMLVKQIQSKGHVGDDVRSDSEGEEEHED

SEQ ID NO: 1692 - protein, 178 aa, Zea mays subsp. mays
  peptide (1)..(178): Ceres Seq. ID no. 12365231
  misc_feature (1)..(175): Pfam Name: Longevity-assurance protein (LAG1) Pfam Description: Longevity-assurance protein (LAG1)
  misc_feature (1)..(178): Homolog of NCBI NO: 24119257 NR Description: trh3 protein [Danio rerio]
  misc_feature (1)..(178): Homolog of NCBI NO: 27769146 NR Description: Similar to RIKEN cDNA 0610013I17 gene [Xenopus
  misc_feature (1)..(175): Homolog of NCBI NO: 7658241 NR Description: LAG1 homolog 2 [Arabidopsis thaliana]
  misc_feature (1)..(174): Homolog of NCBI NO: 34901974 NR Description: unknown protein [Oryza sativa (japonica
  misc_feature (1)..(175): Homolog of NCBI NO: 15230323 NR Description: longevity factor-like protein
  misc_feature (1)..(108): Homolog of NCBI NO: 30683361 NR Description: longevity assurance protein -related [Arabidopsis
  misc_feature (1)..(178): Homolog of NCBI NO: 7688742 NR Description: ASC1 [Lycopersicon esculentum]
  misc_feature (1)..(178): Homolog of NCBI NO: 18404559 NR Description: expressed protein
  misc_feature (1)..(178): Homolog of NCBI NO: 25518747 NR Description: hypothetical protein F13B4.7 - Arabidopsis
  misc_feature (1)..(178): Homolog of NCBI NO: 16974114 NR Description: putative resistance protein [Lycopersicon
MYAAGFYTYSIFALLFWETRRSDFGVSMSHHIATVVLIVLSYIFRFARVGSVVLALHDASDIFLEIGKMAKYSSCEWLAVVAFLLFVASWILLRLVIFPFWILRSTSYEVLLTLDKEKHQFYGPIYYYVFNCLLFSLLVLHIYWWVLIWRMLVKQIQSKGHVGDDVRSDSEGEEEHED

SEQ ID NO: 1693 - DNA, 1196 bp, Zea mays subsp. mays
  misc_feature (1)..(1196): Ceres Seq. ID no. 13498872
  misc_feature: MA Experiment ID: 108530 Result: Down-regulated in Transcription
  misc_feature: MA Experiment 108530 PARAMETER Experiment Name: Zm_Imbibed_Seeds_P Parameter: Age (day) Value: 6 vs. 2
  misc_feature: MA Experiment 108530 PARAMETER Experiment Name: Zm_Imbibed_Seeds_P Parameter: Organism Value: Zea mays
  misc_feature: MA Experiment 108530 PARAMETER Experiment Name: Zm_Imbibed_Seeds_P Parameter: Plant Line Value: 35A19
  misc_feature: MA Experiment 108530 PARAMETER Experiment Name: Zm_Imbibed_Seeds_P Parameter: Tissue Value: Aerial vs. Embryo
ctcccctcctccgcacaaacgcgtcgcatccgctccacaggatcctctgcgccaccgcaaccgtgtgaccgcccgtgccgccggcgatcccgatccgccgacccgtcccagccccgctcgcagccatgtcgccgtcggagccgacgcgggaggagagcgtgtacatggccaagcttgcggagcaggcggagcggtacgaggagatggtcgagttcatggagcgcgtcgcgcgstacgccgggggcgccggcggcggggacgagctctcggtggaggagcgcaacctgctgtccgtcgcctacaagaacgtcatcggcgcccgcagggcctcgtggcggatcatctcctccatcgagcagaaggaggaaggccgcgggaacgaggcgcacgccgcatccatccgcgcctaccgctccaagatcgaggccgagcttgcccgcatctgcgacggcatcctcgcgctcctcgactcccacctcgtcccatccgccggcggcccgagtccaaggtcttctacctcaagatgaagggtgactaccacaggtaccttgctgagttcaagtcaggtgcagagaggaaggatgctgcggagagcaccatgaatgcctacaaagctgctcaggatattgctcttgctgatctggccccaacccaccccatcaggctcgggcttgctctcaacttctcagtgttctactacgagatcctcaactcccctgaccgtgcttgcaaccttgcaaagcaggcctttgatgaggcaatctccgaactagacagcctgggagaggagtcctacaaggacagcactctgatcatgcagctcctgcgtgacaacttgaccctatggacttccgacaccaacgaggacgccggagatgagatcaaggaagcagctgctgcccccaaagaatccgcccccgagggccagtaagacggatccgatctcccgacctgatgcgtgtctgctgatgtcggggagtttaccaggactgtgccgttcttgatttctgatagcttatcttctagtacacctcgtgttgttctcttcgtcacggcgccggtgcgtgtgcgctgaagctgcctgccattgccattgccgctgtttttaattaagcacacactctagatgttatgcccgcatgctatgtttcgattctcaaagttgataaatgatggctggatgctggttttcgtgc

SEQ ID NO: 1694 - protein, 309 aa, Zea mays subsp. mays
  peptide (1)..(309): Ceres Seq. ID no. 15223053
  misc_feature (167)..(289): Pfam Name: 14-3-3 protein Pfam Description: 14-3-3 protein
  misc_feature (161)..(307): Homolog of NCBI NO: 8515888 NR Description: 14-3-3 protein [Populus x canescens]
  misc_feature (161)..(307): Homolog of NCBI NO: 3023187 NR Description: 14-3-3-LIKE PROTEIN (G-BOX BINDING FACTOR)
  misc_feature (161)..(309): Homolog of NCBI NO: 7435022 NR Description: GF14-c protein - rice
  misc_feature (161)..(298): Homolog of NCBI NO: 13702816 NR Description: putative 14-3-3 protein [Oryza sativa]
  misc_feature (161)..(302): Homolog of NCBI NO: 112684 NR Description: 14-3-3-LIKE PROTEIN A (14-3-3A)
  misc_feature (161)..(302): Homolog of NCBI NO: 100554 NR Description: 14-3-3 protein homolog - barley
  misc_feature (161)..(300): Homolog of NCBI NO: 2921512 NR Description: GF14 protein [Fritillaria agrestis]
  misc_feature (161)..(300): Homolog of NCBI NO: 12229593 NR Description: 14-3-3-like protein
  misc_feature (167)..(303): Homolog of NCBI NO: 7435023 NR Description: GF14-d protein - rice
  misc_feature (167)..(309): Homolog of NCBI NO: 9798603 NR Description: TaWIN1 [Triticum aestivum]
  misc_feature (78)..(78): Xaa is any aa, unknown or other
SPPPHKRVASAPQDPLRHRNRVTARAAGDPDPPTRPSPARSHVAVGADAGGERVHGQACGAGGAVRGDGRVHGARRAXRRGRRRRGRALGGGAQPAVRRLQERHRRPQGLVADHLLHRAEGGRPRERGARRIHPRLPLQDRGRACPHLRRHPRAPRLPPRPIRRRPESKVFYLKMKGDYHRYLAEFKSGAERKDAAESTMNAYKAAQDIALADLAPTHPIRLGLALNFSVFYYEILNSPDRACNLAKQAFDEAISELDSLGEESYKDSTLIMQLLRDNLTLWTSDTNEDAGDEIKEAAAAPKESAPEGQ

SEQ ID NO: 1695 - protein, 177 aa, Zea mays subsp. mays
  peptide (1)..(177): Ceres Seq. ID no. 15223054
  misc_feature (78)..(78): Xaa is any aa, unknown or other
LPSSAQTRRIRSTGSSAPPQPCDRPCRRRSRSADPSQPRSQPCRRRSRRGRRACTWPSLRSRRSGTRRWSSSWSASRXTPGAPAAGTSSRWRSATCCPSPTRTSSAPAGPRGGSSPPSSRRRKAAGTRRTPHPSAPTAPRSRPSLPASATASSRSSTPTSSHPPAARVQGLLPQDEG

SEQ ID NO: 1696 - DNA, 1302 bp, Zea mays subsp. mays
  misc_feature (1)..(1302): Ceres Seq. ID no. 12411041
  misc_feature: MA Experiment ID: 108523 Result: Up-regulated in Transcription
  misc_feature: MA Experiment 108523 PARAMETER Experiment Name: Zm_42deg_Heat_P Parameter: Age (day) Value: 8
  misc_feature: MA Experiment 108523 PARAMETER Experiment Name: Zm_42deg_Heat_P Parameter: Organism Value: Zea mays
  misc_feature: MA Experiment 108523 PARAMETER Experiment Name: Zm_42deg_Heat_P Parameter: Plant Line Value: 35A19
  misc_feature: MA Experiment 108523 PARAMETER Experiment Name: Zm_42deg_Heat_P Parameter: Temperature (deg C) Value: 42 vs. 22
  misc_feature: MA Experiment 108523 PARAMETER Experiment Name: Zm_42deg_Heat_P Parameter: Timepoint (hr) Value: 6
  misc_feature: MA Experiment 108523 PARAMETER Experiment Name: Zm_42deg_Heat_P Parameter: Tissue Value: Aerial
  misc_feature: MA Experiment ID: 108556 Result: Down-regulated in Transcription
  misc_feature: MA Experiment 108556 PARAMETER Experiment Name: Zm_Drought_P Parameter: Age (day) Value: 9
  misc_feature: MA Experiment 108556 PARAMETER Experiment Name: Zm_Drought_P Parameter: Organism Value: Zea mays
  misc_feature: MA Experiment 108556 PARAMETER Experiment Name: Zm_Drought_P Parameter: Plant Line Value: 35A19
  misc_feature: MA Experiment 108556 PARAMETER Experiment Name: Zm_Drought_P Parameter: Timepoint (hr) Value: 24
  misc_feature: MA Experiment 108556 PARAMETER Experiment Name: Zm_Drought_P Parameter: Tissue Value: Aerial
  misc_feature: MA Experiment 108556 PARAMETER Experiment Name: Zm_Drought_P Parameter: Treatment Value: Drought vs. No Drought
aagagcgcggcaacaccgcgcatatacatggaatgagaagggctcagctacagccaagcgaataaatatactgtgaattaaccctaacctaaccgaagcgtccgcctcccacacacgggactccggccgcgagaacccgcgactaagccaggacgcgggacgccacagccaccggcctcagcatccgcctaggacgaataacccttctaggctgccgccgccgcccgtccttagctcatattgttgccggcgaagagcgccccagatccgcccctgctatggagtcggcggtgaacccgaaggcgtacccgctggctgatgcgcagctgacgataggtatcatcgatatcatccagcaggccgccaactacaagcagctcaagaagggagctaacgaagcgacgaagaccctgaacagggggatatcggagttcgtagtgatggcggcggacacggagccgctcgagatcctcctccacctccccttgctagctgaggataagaacgtgccatatgtatttgttccatcgaaacaagctcttggccgtgcttgtggtgtgacaaggcctgtcattgcttgctcagtgaccagcaatgagggtagccagctgaaacaacagatacagggtctcaaggtacttagggtgcgtttggttgcaatgacaggacgggatgagacgagacgattcctcaaatagggttgtttggttcagggtcaggggttgggacaggactatcccagtgttgtccccagttatccctcaaaattggagggacgagagagaacgccaggggacgtccctgtcctggctgtcccgcaaccaaacacacccttaatgtcctgtcttgtagtagttgttaatacttgatatgttgctatttttatatatgaatattatgattctgtaatatttatatgctgtttaatagtcagtcttatcatgttcttgtatgcatatctctgtggattaaacaaatttaatgaaattgcaggactcgattgagaagcttctcatctgatttaccaaagacctttcagggtgatgggcctcagcgacacatttttcagaggcttggactggtgatggtgtcttgtttactagattttacgtctttccaaactatgtttgaacactgttaggtcgaccatacttgaattgtgcttatatatttgactgtcatgtattctgaagatgcatctgcattctggtgccttggtttatgttgagattctgaccatcattgtaacggttgattactatgagtttgagaattggatcgattggatggttgcaatttccg

SEQ ID NO: 1697 - protein, 139 aa, Zea mays subsp. mays
  peptide (1)..(139): Ceres Seq. ID no. 12411042
  misc_feature (19)..(112): Pfam Name: Ribosomal protein L7Ae/L30e/S12e/Gadd45 family Pfam Description: Ribosomal protein L7Ae/L30e/S12e/Gadd45 family
  misc_feature (19)..(112): Pfam Name: Ribosomal protein L7Ae/L30e/S12e/Gadd45 family Pfam Description: Ribosomal protein L7Ae/L30e/S12e/Gadd45 family
  misc_feature (2)..(126): Homolog of NCBI NO: 4826860 NR Description: NHP2 non-histone chromosome protein 2-like 1
  misc_feature (2)..(126): Homolog of NCBI NO: 38174386 NR Description: Unknown (protein for MGC:75724) [Silurana
  misc_feature (5)..(126): Homolog of NCBI NO: 37530712 NR Description: putative ribosomal protein L7Ae-like
  misc_feature (2)..(126): Homolog of NCBI NO: 28302201 NR Description: Similar to NHP2 non-histone chromosome protein
  misc_feature (5)..(45): Homolog of NCBI NO: 30687670 NR Description: ribosomal protein L7Ae family [Arabidopsis
  misc_feature (2)..(126): Homolog of NCBI NO: 4826860 NR Description: NHP2 non-histone chromosome protein 2-like 1
  misc_feature (5)..(126): Homolog of NCBI NO: 37530712 NR Description: putative ribosomal protein L7Ae-like
  misc_feature (5)..(45): Homolog of NCBI NO: 30687670 NR Description: ribosomal protein L7Ae family [Arabidopsis
  misc_feature (5)..(119): Homolog of NCBI NO: 21592866 NR Description: Ribosomal protein L7Ae-like [Arabidopsis thaliana]
  misc_feature (5)..(119): Homolog of NCBI NO: 15241276 NR Description: ribosomal protein L7Ae-like
  misc_feature (5)..(119): Homolog of NCBI NO: 15236127 NR Description: Ribosomal protein L7Ae - like; protein id:
  misc_feature (5)..(119): Homolog of NCBI NO: 15235416 NR Description: Ribosomal protein L7Ae -like
  misc_feature (41)..(119): Homolog of NCBI NO: 30687670 NR Description: ribosomal protein L7Ae family [Arabidopsis
  misc_feature (2)..(126): Homolog of NCBI NO: 28302201 NR Description: Similar to NHP2 non-histone chromosome protein
  misc_feature (2)..(126): Homolog of NCBI NO: 38174386 NR Description: Unknown (protein for MGC:75724) [Silurana
  misc_feature (41)..(119): Homolog of NCBI NO: 30687670 NR Description: ribosomal protein L7Ae family [Arabidopsis
  misc_feature (5)..(119): Homolog of NCBI NO: 15235416 NR Description: Ribosomal protein L7Ae -like
  misc_feature (5)..(119): Homolog of NCBI NO: 15236127 NR Description: Ribosomal protein L7Ae - like; protein id:
  misc_feature (5)..(119): Homolog of NCBI NO: 15241276 NR Description: ribosomal protein L7Ae-like
  misc_feature (5)..(119): Homolog of NCBI NO: 21592866 NR Description: Ribosomal protein L7Ae-like [Arabidopsis thaliana]
MESAVNPKAYPLADAQLTIGIIDIIQQAANYKQLKKGANEATKTLNRGISEFVVMAADTEPLEILLHLPLLAEDKNVPYVFVPSKQALGRACGVTRPVIACSVTSNEGSQLKQQIQGLKVLRVRLVAMTGRDETRRFLK

SEQ ID NO: 1698 - protein, 85 aa, Zea mays subsp. mays
  peptide (1)..(85): Ceres Seq. ID no. 12411043
  misc_feature (1)..(58): Pfam Name: Ribosomal protein L7Ae/L30e/S12e/Gadd45 family Pfam Description: Ribosomal protein L7Ae/L30e/S12e/Gadd45 family
  misc_feature (1)..(58): Pfam Name: Ribosomal protein L7Ae/L30e/S12e/Gadd45 family Pfam Description: Ribosomal protein L7Ae/L30e/S12e/Gadd45 family
  misc_feature (1)..(65): Homolog of NCBI NO: 15236127 NR Description: Ribosomal protein L7Ae - like; protein id:
  misc_feature (1)..(65): Homolog of NCBI NO: 15241276 NR Description: ribosomal protein L7Ae-like
  misc_feature (1)..(72): Homolog of NCBI NO: 4826860 NR Description: NHP2 non-histone chromosome protein 2-like 1
  misc_feature (1)..(72): Homolog of NCBI NO: 37530712 NR Description: putative ribosomal protein L7Ae-like
  misc_feature (1)..(65): Homolog of NCBI NO: 30687670 NR Description: ribosomal protein L7Ae family [Arabidopsis
  misc_feature (1)..(72): Homolog of NCBI NO: 38174386 NR Description: Unknown (protein for MGC:75724) [Silurana
  misc_feature (1)..(72): Homolog of NCBI NO: 28302201 NR Description: Similar to NHP2 non-histone chromosome protein
  misc_feature (1)..(65): Homolog of NCBI NO: 15235416 NR Description: Ribosomal protein L7Ae -like
  misc_feature (1)..(72): Homolog of NCBI NO: 4826860 NR Description: NHP2 non-histone chromosome protein 2-like 1
  misc_feature (1)..(72): Homolog of NCBI NO: 12835698 NR Description: unnamed protein product [Mus musculus]
  misc_feature (1)..(65): Homolog of NCBI NO: 21592866 NR Description: Ribosomal protein L7Ae-like [Arabidopsis thaliana]
  misc_feature (1)..(65): Homolog of NCBI NO: 15241276 NR Description: ribosomal protein L7Ae-like
  misc_feature (1)..(65): Homolog of NCBI NO: 15236127 NR Description: Ribosomal protein L7Ae - like; protein id:
  misc_feature (1)..(65): Homolog of NCBI NO: 30687670 NR Description: ribosomal protein L7Ae family [Arabidopsis
  misc_feature (1)..(72): Homolog of NCBI NO: 37530712 NR Description: putative ribosomal protein L7Ae-like
  misc_feature (1)..(65): Homolog of NCBI NO: 15235416 NR Description: Ribosomal protein L7Ae -like
  misc_feature (1)..(72): Homolog of NCBI NO: 28302201 NR Description: Similar to NHP2 non-histone chromosome protein
  misc_feature (1)..(72): Homolog of NCBI NO: 38174386 NR Description: Unknown (protein for MGC:75724) [Silurana
  misc_feature (1)..(72): Homolog of NCBI NO: 12835698 NR Description: unnamed protein product [Mus musculus]
  misc_feature (1)..(65): Homolog of NCBI NO: 21592866 NR Description: Ribosomal protein L7Ae-like [Arabidopsis thaliana]
MAADTEPLEILLHLPLLAEDKNVPYVFVPSKQALGRACGVTRPVIACSVTSNEGSQLKQQIQGLKVLRVRLVAMTGRDETRRFLK

SEQ ID NO: 1699 - DNA, 789 bp, Zea mays subsp. mays
  misc_feature (1)..(789): Ceres Seq. ID no. 12355957
  misc_feature: MA Experiment ID: 108528 Result: Down-regulated in Transcription
  misc_feature: MA Experiment 108528 PARAMETER Experiment Name: Zm_Imbibed_Seeds_P Parameter: Age (day) Value: 5 vs. 2
  misc_feature: MA Experiment 108528 PARAMETER Experiment Name: Zm_Imbibed_Seeds_P Parameter: Organism Value: Zea mays
  misc_feature: MA Experiment 108528 PARAMETER Experiment Name: Zm_Imbibed_Seeds_P Parameter: Plant Line Value: 35A19
  misc_feature: MA Experiment 108528 PARAMETER Experiment Name: Zm_Imbibed_Seeds_P Parameter: Tissue Value: Aerial vs. Embryo
  misc_feature: MA Experiment ID: 108530 Result: Down-regulated in Transcription
  misc_feature: MA Experiment 108530 PARAMETER Experiment Name: Zm_Imbibed_Seeds_P Parameter: Age (day) Value: 6 vs. 2
  misc_feature: MA Experiment 108530 PARAMETER Experiment Name: Zm_Imbibed_Seeds_P Parameter: Organism Value: Zea mays
  misc_feature: MA Experiment 108530 PARAMETER Experiment Name: Zm_Imbibed_Seeds_P Parameter: Plant Line Value: 35A19
  misc_feature: MA Experiment 108530 PARAMETER Experiment Name: Zm_Imbibed_Seeds_P Parameter: Tissue Value: Aerial vs. Embryo
  misc_feature: MA Experiment ID: 108535 Result: Up-regulated in Transcription
  misc_feature: MA Experiment 108535 PARAMETER Experiment Name: Zm_Meristem_P Parameter: Age (day) Value: 8
  misc_feature: MA Experiment 108535 PARAMETER Experiment Name: Zm_Meristem_P Parameter: Organism Value: Zea mays
  misc_feature: MA Experiment 108535 PARAMETER Experiment Name: Zm_Meristem_P Parameter: Plant Line Value: 35A19
  misc_feature: MA Experiment 108535 PARAMETER Experiment Name: Zm_Meristem_P Parameter: Tissue Value: Root Meristem vs. Above Root Meristem
  misc_feature: MA Experiment ID: 20000488 Result: Up-regulated in Transcription
  misc_feature: MA Experiment 20000488 PARAMETER Experiment Name: Zm_50mM_NH4NO3_L_to_H_P Parameter: Organism Value: Zea mays
  misc_feature: MA Experiment 20000488 PARAMETER Experiment Name: Zm_50mM_NH4NO3_L_to_H_P Parameter: Timepoint (hr) Value: 8
  misc_feature: MA Experiment 20000488 PARAMETER Experiment Name: Zm_50mM_NH4NO3_L_to_H_P Parameter: Tissue Value: Leaves
  misc_feature: MA Experiment 20000488 PARAMETER Experiment Name: Zm_50mM_NH4NO3_L_to_H_P Parameter: Treatment Value: 50mM NH4NO3 vs. 100mM Mannitol
  misc_feature: MA Experiment ID: 20001606 Result: Up-regulated in Transcription
  misc_feature: MA Experiment 20001606 PARAMETER Experiment Name: Zm_50ppm_KNO3_L-to-H_P Parameter: Age (day) Value: 19
  misc_feature: MA Experiment 20001606 PARAMETER Experiment Name: Zm_50ppm_KNO3_L-to-H_P Parameter: Organism Value: Zea mays
  misc_feature: MA Experiment 20001606 PARAMETER Experiment Name: Zm_50ppm_KNO3_L-to-H_P Parameter: Plant Line Value: 35A19
  misc_feature: MA Experiment 20001606 PARAMETER Experiment Name: Zm_50ppm_KNO3_L-to-H_P Parameter: Timepoint (hr) Value: 8
  misc_feature: MA Experiment 20001606 PARAMETER Experiment Name: Zm_50ppm_KNO3_L-to-H_P Parameter: Tissue Value: Shoots
  misc_feature: MA Experiment 20001606 PARAMETER Experiment Name: Zm_50ppm_KNO3_L-to-H_P Parameter: Treatment Value: 50ppm KNO3 vs. 50ppm KCl
  misc_feature: MA Experiment ID: 20001612 Result: Up-regulated in Transcription
  misc_feature: MA Experiment 20001612 PARAMETER Experiment Name: Zm_50ppm_KNO3_L-to-H_P Parameter: Age (day) Value: 19
  misc_feature: MA Experiment 20001612 PARAMETER Experiment Name: Zm_50ppm_KNO3_L-to-H_P Parameter: Organism Value: Zea mays
  misc_feature: MA Experiment 20001612 PARAMETER Experiment Name: Zm_50ppm_KNO3_L-to-H_P Parameter: Plant Line Value: 35A19
  misc_feature: MA Experiment 20001612 PARAMETER Experiment Name: Zm_50ppm_KNO3_L-to-H_P Parameter: Timepoint (hr) Value: 8
  misc_feature: MA Experiment 20001612 PARAMETER Experiment Name: Zm_50ppm_KNO3_L-to-H_P Parameter: Tissue Value: Roots
  misc_feature: MA Experiment 20001612 PARAMETER Experiment Name: Zm_50ppm_KNO3_L-to-H_P Parameter: Treatment Value: 50ppm KNO3 vs. 50ppm KCl
acagtcgcctccttcctgcgccgccgccgccgccgccgccgccgctaccaccgcctcgcggccgcctgcggctccgcgtttccgcacggaagttggtgaaggtttcttgaggctgagaacatggtgctgaagacggaactttgccgcttcagcggccagaagatttatcctgggaaaggcattagatttatccgtgctgattctcaggtcttcctttttgccaactcgaaatgcaagcgctacttccacaaccgcctgaagcctgcaaagcttacctggacagcaatgtacaggaagcagcacaagaaggatatccatgctgaagcggtaaagaagaggcgccgcgccaccaagaagccatactccaggtcaattgtgggtgcttccttggaagtaatccagaagaagagagctgagaagccagaggtccgcgatgctgctagagaagctgctcttcgtgagatcaaggagcgcatcaagaagaccaaggatgagaagaaagcgaagaaggcggaggtgagcaagtcccagaagacgcagacaaagggtgcggtccagaagggttccaagggccccaagttgggcggcggtggtgggaagcgctgaaagaacttagtgtcgtttctcgacattgcagtcgttccttagccaaagccactttcgtagaacctgtgttgaatttgcaagacttattcaagcgttgcttgtgcgtgctaaataccatggcaagagaacggatttatatttatgcctgaaaaaaatgaccgttcatattcttaactcatcttg

SEQ ID NO: 1700 - protein, 161 aa, Zea mays subsp. mays
  peptide (1)..(161): Ceres Seq. ID no. 12355958
  misc_feature (3)..(73): Pfam Name: Ribosomal protein L24e Pfam Description: Ribosomal protein L24e
  misc_feature (3)..(73): Pfam Name: Ribosomal protein L24e Pfam Description: Ribosomal protein L24e
  misc_feature (3)..(73): Pfam Name: Ribosomal protein L24e Pfam Description: Ribosomal protein L24e
  misc_feature (1)..(161): Homolog of NCBI NO: 1710521 NR Description: 60S RIBOSOMAL PROTEIN L24 >gi|7440778|pir||T06178
  misc_feature (4)..(161): Homolog of NCBI NO: 34900364 NR Description: putative 60S ribosomal protein L24 [Oryza sativa
  misc_feature (1)..(160): Homolog of NCBI NO: 6094040 NR Description: 60S ribosomal protein L24
  misc_feature (1)..(156): Homolog of NCBI NO: 10180025 NR Description: 60S ribosomal protein L24 [Prunus avium]
  misc_feature (1)..(161): Homolog of NCBI NO: 18404176 NR Description: 60S ribosomal protein L24; protein id: supported by cDNA: 14564., supported by cDNA: gi_16604375, by cDNA: gi_18252830 [Arabidopsis thaliana]
  misc_feature (4)..(161): Homolog of NCBI NO: 34900364 NR Description: putative 60S ribosomal protein L24 [Oryza sativa
  misc_feature (1)..(156): Homolog of NCBI NO: 10180025 NR Description: 60S ribosomal protein L24 [Prunus avium]
  misc_feature (1)..(160): Homolog of NCBI NO: 6094040 NR Description: 60S ribosomal protein L24
  misc_feature (4)..(161): Homolog of NCBI NO: 34900364 NR Description: putative 60S ribosomal protein L24 [Oryza sativa
  misc_feature (1)..(161): Homolog of NCBI NO: 1710521 NR Description: 60S RIBOSOMAL PROTEIN L24 >gi|7440778|pir||T06178
  misc_feature (10)..(154): Homolog of NCBI NO: 40741063 NR Description: conserved hypothetical protein [Aspergillus
  misc_feature (3)..(150): Homolog of NCBI NO: 19115030 NR Description: 60S ribosomal protein L24 [Schizosaccharomyces
  misc_feature (3)..(150): Homolog of NCBI NO: 19075214 NR Description: 60s ribosomal protein L24 [Schizosaccharomyces
  misc_feature (5)..(161): Homolog of NCBI NO: 25295112 NR Description: 60S ribosomal protein L24 [imported] -
  misc_feature (1)..(161): Homolog of NCBI NO: 15231730 NR Description: 60S ribosomal protein - like; protein id: supported by cDNA: gi_16648705, supported by cDNA: gi_20260561 thaliana] >gi|26454659|sp|P38666|RL24_ARATH 60S ribosomal protein
  misc_feature (1)..(161): Homolog of NCBI NO: 18404176 NR Description: 60S ribosomal protein L24; protein id: supported by cDNA: 14564., supported by cDNA: gi_16604375, by cDNA: gi_18252830 [Arabidopsis thaliana]
  misc_feature (10)..(154): Homolog of NCBI NO: 40741063 NR Description: conserved hypothetical protein [Aspergillus
  misc_feature (3)..(150): Homolog of NCBI NO: 19115030 NR Description: 60S ribosomal protein L24 [Schizosaccharomyces
  misc_feature (3)..(150): Homolog of NCBI NO: 19075214 NR Description: 60s ribosomal protein L24 [Schizosaccharomyces
  misc_feature (5)..(161): Homolog of NCBI NO: 25295112 NR Description: 60S ribosomal protein L24 [imported] -
  misc_feature (1)..(161): Homolog of NCBI NO: 15231730 NR Description: 60S ribosomal protein - like; protein id: supported by cDNA: gi_16648705, supported by cDNA: gi_20260561 thaliana] >gi|26454659|sp|P38666|RL24_ARATH 60S ribosomal protein
  misc_feature (1)..(161): Homolog of NCBI NO: 18404176 NR Description: 60S ribosomal protein L24; protein id: supported by cDNA: 14564., supported by cDNA: gi_16604375, by cDNA: gi_18252830 [Arabidopsis thaliana]
  misc_feature (1)..(156): Homolog of NCBI NO: 10180025 NR Description: 60S ribosomal protein L24 [Prunus avium]
  misc_feature (1)..(160): Homolog of NCBI NO: 6094040 NR Description: 60S ribosomal protein L24
  misc_feature (1)..(161): Homolog of NCBI NO: 1710521 NR Description: 60S RIBOSOMAL PROTEIN L24 >gi|7440778|pir||T06178
  misc_feature (1)..(161): Homolog of NCBI NO: 15231730 NR Description: 60S ribosomal protein - like; protein id: supported by cDNA: gi_16648705, supported by cDNA: gi_20260561 thaliana] >gi|26454659|sp|P38666|RL24_ARATH 60S ribosomal protein
  misc_feature (5)..(161): Homolog of NCBI NO: 25295112 NR Description: 60S ribosomal protein L24 [imported] -
  misc_feature (3)..(150): Homolog of NCBI NO: 19075214 NR Description: 60s ribosomal protein L24 [Schizosaccharomyces
  misc_feature (3)..(150): Homolog of NCBI NO: 19115030 NR Description: 60S ribosomal protein L24 [Schizosaccharomyces
  misc_feature (10)..(154): Homolog of NCBI NO: 40741063 NR Description: conserved hypothetical protein [Aspergillus
MVLKTELCRFSGQKIYPGKGIRFIRADSQVFLFANSKCKRYFHNRLKPAKLTWTAMYRKQHKKDIHAEAVKKRRRATKKPYSRSIVGASLEVIQKKRAEKPEVRDAAREAALREIKERIKKTKDEKKAKKAEVSKSQKTQTKGAVQKGSKGPKLGGGGGKR

SEQ ID NO: 1701 - protein, 106 aa, Zea mays subsp. mays
  peptide (1)..(106): Ceres Seq. ID no. 12355959
  misc_feature (1)..(99): Homolog of NCBI NO: 40741063 NR Description: conserved hypothetical protein [Aspergillus
  misc_feature (1)..(106): Homolog of NCBI NO: 1710521 NR Description: 60S RIBOSOMAL PROTEIN L24 >gi|7440778|pir||T06178
  misc_feature (1)..(106): Homolog of NCBI NO: 34900364 NR Description: putative 60S ribosomal protein L24 [Oryza sativa
  misc_feature (1)..(105): Homolog of NCBI NO: 6094040 NR Description: 60S ribosomal protein L24
  misc_feature (1)..(101): Homolog of NCBI NO: 10180025 NR Description: 60S ribosomal protein L24 [Prunus avium]
  misc_feature (1)..(106): Homolog of NCBI NO: 18404176 NR Description: 60S ribosomal protein L24; protein id: supported by cDNA: 14564., supported by cDNA: gi_16604375, by cDNA: gi_18252830 [Arabidopsis thaliana]
  misc_feature (1)..(106): Homolog of NCBI NO: 15231730 NR Description: 60S ribosomal protein - like; protein id: supported by cDNA: gi_16648705, supported by cDNA: gi_20260561 thaliana] >gi|26454659|sp|P38666|RL24_ARATH 60S ribosomal protein
  misc_feature (1)..(106): Homolog of NCBI NO: 25295112 NR Description: 60S ribosomal protein L24 [imported] -
  misc_feature (1)..(95): Homolog of NCBI NO: 19075214 NR Description: 60s ribosomal protein L24 [Schizosaccharomyces
  misc_feature (1)..(95): Homolog of NCBI NO: 19115030 NR Description: 60S ribosomal protein L24 [Schizosaccharomyces
  misc_feature (1)..(106): Homolog of NCBI NO: 1710521 NR Description: 60S RIBOSOMAL PROTEIN L24 >gi|7440778|pir||T06178
  misc_feature (1)..(106): Homolog of NCBI NO: 34900364 NR Description: putative 60S ribosomal protein L24 [Oryza sativa
  misc_feature (1)..(105): Homolog of NCBI NO: 6094040 NR Description: 60S ribosomal protein L24
  misc_feature (1)..(101): Homolog of NCBI NO: 10180025 NR Description: 60S ribosomal protein L24 [Prunus avium]
  misc_feature (1)..(106): Homolog of NCBI NO: 18404176 NR Description: 60S ribosomal protein L24; protein id: supported by cDNA: 14564., supported by cDNA: gi_16604375, by cDNA: gi_18252830 [Arabidopsis thaliana]
  misc_feature (1)..(106): Homolog of NCBI NO: 15231730 NR Description: 60S ribosomal protein - like; protein id: supported by cDNA: gi_16648705, supported by cDNA: gi_20260561 thaliana] >gi|26454659|sp|P38666|RL24_ARATH 60S ribosomal protein
  misc_feature (1)..(106): Homolog of NCBI NO: 25295112 NR Description: 60S ribosomal protein L24 [imported] -
  misc_feature (1)..(95): Homolog of NCBI NO: 19075214 NR Description: 60s ribosomal protein L24 [Schizosaccharomyces
  misc_feature (1)..(95): Homolog of NCBI NO: 19115030 NR Description: 60S ribosomal protein L24 [Schizosaccharomyces
  misc_feature (1)..(99): Homolog of NCBI NO: 40741063 NR Description: conserved hypothetical protein [Aspergillus
  misc_feature (1)..(106): Homolog of NCBI NO: 1710521 NR Description: 60S RIBOSOMAL PROTEIN L24 >gi|7440778|pir||T06178
  misc_feature (1)..(106): Homolog of NCBI NO: 34900364 NR Description: putative 60S ribosomal protein L24 [Oryza sativa
  misc_feature (1)..(105): Homolog of NCBI NO: 6094040 NR Description: 60S ribosomal protein L24
  misc_feature (1)..(101): Homolog of NCBI NO: 10180025 NR Description: 60S ribosomal protein L24 [Prunus avium]
  misc_feature (1)..(106): Homolog of NCBI NO: 18404176 NR Description: 60S ribosomal protein L24; protein id: supported by cDNA: 14564., supported by cDNA: gi_16604375, by cDNA: gi_18252830 [Arabidopsis thaliana]
  misc_feature (1)..(106): Homolog of NCBI NO: 15231730 NR Description: 60S ribosomal protein - like; protein id: supported by cDNA: gi_16648705, supported by cDNA: gi_20260561 thaliana] >gi|26454659|sp|P38666|RL24_ARATH 60S ribosomal protein
  misc_feature (1)..(106): Homolog of NCBI NO: 25295112 NR Description: 60S ribosomal protein L24 [imported] -
  misc_feature (1)..(95): Homolog of NCBI NO: 19075214 NR Description: 60s ribosomal protein L24 [Schizosaccharomyces
  misc_feature (1)..(95): Homolog of NCBI NO: 19115030 NR Description: 60S ribosomal protein L24 [Schizosaccharomyces
  misc_feature (1)..(99): Homolog of NCBI NO: 40741063 NR Description: conserved hypothetical protein [Aspergillus
MYRKQHKKDIHAEAVKKRRRATKKPYSRSIVGASLEVIQKKRAEKPEVRDAAREAALREIKERIKKTKDEKKAKKAEVSKSQKTQTKGAVQKGSKGPKLGGGGGKR

SEQ ID NO: 1702 - DNA, 1301 bp, Zea mays subsp. mays
  misc_feature (1)..(1301): Ceres Seq. ID no. 12345828
  misc_feature: MA Experiment ID: 108528 Result: Up-regulated in Transcription
  misc_feature: MA Experiment 108528 PARAMETER Experiment Name: Zm_Imbibed_Seeds_P Parameter: Age (day) Value: 5 vs. 2
  misc_feature: MA Experiment 108528 PARAMETER Experiment Name: Zm_Imbibed_Seeds_P Parameter: Organism Value: Zea mays
  misc_feature: MA Experiment 108528 PARAMETER Experiment Name: Zm_Imbibed_Seeds_P Parameter: Plant Line Value: 35A19
  misc_feature: MA Experiment 108528 PARAMETER Experiment Name: Zm_Imbibed_Seeds_P Parameter: Tissue Value: Aerial vs. Embryo
  misc_feature: MA Experiment ID: 108530 Result: Up-regulated in Transcription
  misc_feature: MA Experiment 108530 PARAMETER Experiment Name: Zm_Imbibed_Seeds_P Parameter: Age (day) Value: 6 vs. 2
  misc_feature: MA Experiment 108530 PARAMETER Experiment Name: Zm_Imbibed_Seeds_P Parameter: Organism Value: Zea mays
  misc_feature: MA Experiment 108530 PARAMETER Experiment Name: Zm_Imbibed_Seeds_P Parameter: Plant Line Value: 35A19
  misc_feature: MA Experiment 108530 PARAMETER Experiment Name: Zm_Imbibed_Seeds_P Parameter: Tissue Value: Aerial vs. Embryo
  misc_feature: MA Experiment ID: 108545 Result: Up-regulated in Transcription
  misc_feature: MA Experiment 108545 PARAMETER Experiment Name: Zm_Imbibed_Seeds_P Parameter: Age (day) Value: 3 vs. 2
  misc_feature: MA Experiment 108545 PARAMETER Experiment Name: Zm_Imbibed_Seeds_P Parameter: Organism Value: Zea mays
  misc_feature: MA Experiment 108545 PARAMETER Experiment Name: Zm_Imbibed_Seeds_P Parameter: Plant Line Value: 35A19
  misc_feature: MA Experiment 108545 PARAMETER Experiment Name: Zm_Imbibed_Seeds_P Parameter: Tissue Value: Aerial vs. Embryo
  misc_feature: MA Experiment ID: 108547 Result: Up-regulated in Transcription
  misc_feature: MA Experiment 108547 PARAMETER Experiment Name: Zm_Imbibed_Seeds_P Parameter: Age (day) Value: 4 vs. 2
  misc_feature: MA Experiment 108547 PARAMETER Experiment Name: Zm_Imbibed_Seeds_P Parameter: Organism Value: Zea mays
  misc_feature: MA Experiment 108547 PARAMETER Experiment Name: Zm_Imbibed_Seeds_P Parameter: Plant Line Value: 35A19
  misc_feature: MA Experiment 108547 PARAMETER Experiment Name: Zm_Imbibed_Seeds_P Parameter: Tissue Value: Aerial vs. Embryo
  misc_feature: MA Experiment ID: 108556 Result: Down-regulated in Transcription
  misc_feature: MA Experiment 108556 PARAMETER Experiment Name: Zm_Drought_P Parameter: Age (day) Value: 9
  misc_feature: MA Experiment 108556 PARAMETER Experiment Name: Zm_Drought_P Parameter: Organism Value: Zea mays
  misc_feature: MA Experiment 108556 PARAMETER Experiment Name: Zm_Drought_P Parameter: Plant Line Value: 35A19
  misc_feature: MA Experiment 108556 PARAMETER Experiment Name: Zm_Drought_P Parameter: Timepoint (hr) Value: 24
  misc_feature: MA Experiment 108556 PARAMETER Experiment Name: Zm_Drought_P Parameter: Tissue Value: Aerial
  misc_feature: MA Experiment 108556 PARAMETER Experiment Name: Zm_Drought_P Parameter: Treatment Value: Drought vs. No Drought
  misc_feature: MA Experiment ID: 20000479 Result: Down-regulated in Transcription
  misc_feature: MA Experiment 20000479 PARAMETER Experiment Name: Zm_Drought_P Parameter: Age (day) Value: 10
  misc_feature: MA Experiment 20000479 PARAMETER Experiment Name: Zm_Drought_P Parameter: Organism Value: Zea mays
  misc_feature: MA Experiment 20000479 PARAMETER Experiment Name: Zm_Drought_P Parameter: Plant Line Value: 35A19
  misc_feature: MA Experiment 20000479 PARAMETER Experiment Name: Zm_Drought_P Parameter: Timepoint (hr) Value: 48
  misc_feature: MA Experiment 20000479 PARAMETER Experiment Name: Zm_Drought_P Parameter: Tissue Value: Aerial
  misc_feature: MA Experiment 20000479 PARAMETER Experiment Name: Zm_Drought_P Parameter: Treatment Value: Drought vs. No Drought
  misc_feature: MA Experiment ID: 20000487 Result: Up-regulated in Transcription
  misc_feature: MA Experiment 20000487 PARAMETER Experiment Name: Zm_50mM_NH4NO3_L_to_H_P Parameter: Organism Value: Zea mays
  misc_feature: MA Experiment 20000487 PARAMETER Experiment Name: Zm_50mM_NH4NO3_L_to_H_P Parameter: Timepoint (hr) Value: 4
  misc_feature: MA Experiment 20000487 PARAMETER Experiment Name: Zm_50mM_NH4NO3_L_to_H_P Parameter: Tissue Value: Leaves
  misc_feature: MA Experiment 20000487 PARAMETER Experiment Name: Zm_50mM_NH4NO3_L_to_H_P Parameter: Treatment Value: 50mM NH4NO3 vs. 100mM Mannitol
ctccccacccgcagcgcctcctcccattcccccaacggacattgcctaggaggctaggacagaaccacccagagcgcacaaccttatccgaatcgccgttgcatggaggccgtgcgcgcgtcggcggcgtgggttgccagtcgctcctcccatgtcacggtcgaccttcaagaaattgagaaggtagtggaccaaatccaaggagatgttccaaaagttcagtgggattacgaaggaattcactactttgacaatgggccactcacagtccagtacctgttcgtcttggatgcactaaacttctgcttctggccagataaggacttgagctatgaccatttggcttctggactgaagtcagccttggagaaagacaaaaatgcccttgattcagatcgtctccagaattacactgggccccagctccgccaacttctgaactggccacgaccactgccaattgaggaggaaagagtacgccttctccacgaggttgggcaggaacttaaaagaagctttggaggtcaggctgctaatctagtgaagtctgctggaaactctgctgcgactcttattgaactgattactcgacattttcctggtttccgggaccattcactctacaaggggcaccaggttttcctgtacaagagagcccagatctttgttgctgatttgtggggcgccttcaagggacaaaactatggcgagttccacgatatcaattccatcaccatatttgctgactacattgttccagcggtcctgagggagcttggagtacttaaatatggctcgaatctatcttgcttcatcgactcgaacagtgagatagtgcctggaagcgaggaggaagtggagatacgcgcgtgctccatctatgcagtggagaagatgagggacctgatcagcaagaagtttggaaagcagcttctgagcattgacattgatctctggctctggtcctgcggcgtgcagaacatggcgctgtcacatcaccgcactctgtcgatttactactagacagtcaggcaggcaggaagctgaccctgctggtgcgctcgttcagctggccgggcgttgtcgtcgcttgttcgtcctaaccataacggtgcatgtaggtgtcgagagttttgtctccttgggaatgcacacaggtgcaagatattgtaggcccgtcccatgaggatgcatggtagtacaacacttttttttttgtgatttagagacttgaactgctgcagttttcacatgaatgttatccctaaggacaaggcgggagcgagtgtttctctatctcc

SEQ ID NO: 1703 - protein, 306 aa, Zea mays subsp. mays
  peptide (1)..(306): Ceres Seq. ID no. 12345829
  misc_feature (55)..(306): Homolog of NCBI NO: 31214594 NR Description: ENSANGP00000017465 [Anopheles gambiae]
  misc_feature (118)..(303): Homolog of NCBI NO: 40745001 NR Description: hypothetical protein AN2451.2 [Aspergillus
  misc_feature (56)..(305): Homolog of NCBI NO: 39584221 NR Description: Hypothetical protein CBG05511 [Caenorhabditis
  misc_feature (118)..(306): Homolog of NCBI NO: 31543144 NR Description: hypothetical protein MGC10999 [Homo sapiens]
  misc_feature (118)..(287): Homolog of NCBI NO: 19114965 NR Description: conserved hypothetical protein; putative
  misc_feature (58)..(306): Homolog of NCBI NO: 38074709 NR Description: RIKEN cDNA 2210016F16 [Mus musculus]
  misc_feature (58)..(306): Homolog of NCBI NO: 24656903 NR Description: CG9752-PA [Drosophila melanogaster]
  misc_feature (4)..(73): Homolog of NCBI NO: 32404344 NR Description: hypothetical protein ( hypothetical protein
  misc_feature (118)..(306): Homolog of NCBI NO: 32404344 NR Description: hypothetical protein ( hypothetical protein
  misc_feature (1)..(306): Homolog of NCBI NO: 28564818 NR Description: OSJNBb0005G07.5 [Oryza sativa (japonica
MEAVRASAAWVASRSSHVTVDLQEIEKVVDQIQGDVPKVQWDYEGIHYFDNGPLTVQYLFVLDALNFCFWPDKDLSYDHLASGLKSALEKDKNALDSDRLQNYTGPQLRQLLNWPRPLPIEEERVRLLHEVGQELKRSFGGQAANLVKSAGNSAATLIELITRHFPGFRDHSLYKGHQVFLYKRAQIFVADLWGAFKGQNYGEFHDINSITIFADYIVPAVLRELGVLKYGSNLSCFIDSNSEIVPGSEEEVEIRACSIYAVEKMRDLISKKFGKQLLSIDIDLWLWSCGVQNMALSHHRTLSIYY

SEQ ID NO: 1704 - DNA, 1372 bp, Zea mays subsp. mays
  misc_feature (1)..(1372): Ceres Seq. ID no. 12373449
  misc_feature: MA Experiment ID: 108543 Result: Down-regulated in Transcription
agacgtcctctgtccatggcctcccatcctgagcacccggcggaaccgcgagcaccgcccgccccaacgaccataggcgatctctccgacgacctcctgcgcgagatcctcctccgcctcccttcccttccttcactcgtctgcgcctccctcagctgccgcgccttcctggccgccgtccgctcctcccgcgccttccgccgccgcttccgcgcgctgcacccgcctcctctcctcggcttcttcttcgaccccgacggcaacgaaaatcccaccttcatgcccattcgccgcggctccgaccggggccacgcggccgccgtccgcggcctggacgccttcctgacccgcgtcccgcacgaggacgacgtcttccccgggtggcagataatggagtgccgcggcggctgccttctcctcctcaactggagaaccaagcagctcgccgcctacaaccccctcacgggggccttggatctcgtccccaaactgcctgacgacatctgcaaagggcaccgcggcaagttcatctccggtgattttttcctggtagtccccgacgacgaggctcccgacaggcgttcgttccgcgtggtctcctcctgccacgacaagtaccgggtgcgcgtcgccgtcttctcgtctgccaccaggaagtggcagattctcccctggtcggagcctgtgccgacacagccggcgagcggtaagtactggcttctctcggggaggcaggtgagtgggttcctgtgctggtcacaccataagaatgcctacaaggtgttgctggacactgcgaccctgcaattctccgtcatcgatctgccgtatggcttgagtgggcaaggtcacctctacaggactggggataccaaggatgggaagctctgcatcgttgccgcaatcgatttctcgctgttcgtttggttccggacaccagacgccggtggcattgacaggtgggtgctccgacatgtattgcagctggaggatgaggttcttgaggccaccgagggctcacggaatgaacttgaacagcttaaagtgtttgcaattctggacggcatcgtgtacatgacgacatttgagacgtttagagatgctaccttgccttgttggtacctatccttctgcctggaaacaaggaagctggaaaaactcttctatgtaaaagctaatggccatgctcatccctacttcatgccatggcctactgctttagtaggtaacaatttgagcccctgactaggaggaggtgcttgttcaagtgaaactggttacagtaacatgtaagtttcttgttctgtctagactcaacagtttgttcacttatcctcttatatactagtaacgggtgcgcgctttgcgtggc

SEQ ID NO: 1705 - protein, 414 aa, Zea mays subsp. mays
  peptide (1)..(414): Ceres Seq. ID no. 12373450
  misc_feature (28)..(282): Homolog of NCBI NO: 34393354 NR Description: hypothetical protein [Oryza sativa (japonica
  misc_feature (1)..(309): Homolog of NCBI NO: 37530944 NR Description: hypothetical protein [Oryza sativa (japonica
  misc_feature (18)..(341): Homolog of NCBI NO: 37531214 NR Description: unknown protein [Oryza sativa (japonica
  misc_feature (18)..(284): Homolog of NCBI NO: 34393352 NR Description: hypothetical protein [Oryza sativa (japonica
  misc_feature (7)..(299): Homolog of NCBI NO: 34914940 NR Description: B1096D03.37 [Oryza sativa (japonica
  misc_feature (16)..(331): Homolog of NCBI NO: 37530900 NR Description: hypothetical protein [Oryza sativa (japonica
  misc_feature (29)..(335): Homolog of NCBI NO: 34914580 NR Description: P0455H0310.25 [Oryza sativa (japonica
  misc_feature (19)..(357): Homolog of NCBI NO: 34914942 NR Description: B1096D03.38 [Oryza sativa (japonica
  misc_feature (91)..(410): Homolog of NCBI NO: 34901902 NR Description: OSJNBa0036M16.17 [Oryza sativa (japonica
  misc_feature (1)..(333): Homolog of NCBI NO: 34901902 NR Description: OSJNBa0036M16.17 [Oryza sativa (japonica
RRPLSMASHPEHPAEPRAPPAPTTIGDLSDDLLREILLRLPSLPSLVCASLSCRAFLAAVRSSRAFRRRFRALHPPPLLGFFFDPDGNENPTFMPIRRGSDRGHAAAVRGLDAFLTRVPHEDDVFPGWQIMECRGGCLLLLNWRTKQLAAYNPLTGALDLVPKLPDDICKGHRGKFISGDFFLVVPDDEAPDRRSFRVVSSCHDKYRVRVAVFSSATRKWQILPWSEPVPTQPASGKYWLLSGRQVSGFLCWSHHKNAYKVLLDTATLQFSVIDLPYGLSGQGHLYRTGDTKDGKLCIVAAIDFSLFVWFRTPDAGGIDRWVLRHVLQLEDEVLEATEGSRNELEQLKVFAILDGIVYMTTFETFRDATLPCWYLSFCLETRKLEKLFYVKANGHAHPYFMPWPTALVGNNLSP

SEQ ID NO: 1706 - protein, 409 aa, Zea mays subsp. mays
  peptide (1)..(409): Ceres Seq. ID no. 12373451
  misc_feature (23)..(277): Homolog of NCBI NO: 34393354 NR Description: hypothetical protein [Oryza sativa (japonica
  misc_feature (1)..(304): Homolog of NCBI NO: 37530944 NR Description: hypothetical protein [Oryza sativa (japonica
  misc_feature (13)..(336): Homolog of NCBI NO: 37531214 NR Description: unknown protein [Oryza sativa (japonica
  misc_feature (13)..(279): Homolog of NCBI NO: 34393352 NR Description: hypothetical protein [Oryza sativa (japonica
  misc_feature (2)..(294): Homolog of NCBI NO: 34914940 NR Description: B1096D03.37 [Oryza sativa (japonica
  misc_feature (11)..(326): Homolog of NCBI NO: 37530900 NR Description: hypothetical protein [Oryza sativa (japonica
  misc_feature (24)..(330): Homolog of NCBI NO: 34914580 NR Description: P0455H0310.25 [Oryza sativa (japonica
  misc_feature (14)..(352): Homolog of NCBI NO: 34914942 NR Description: B1096D03.38 [Oryza sativa (japonica
  misc_feature (86)..(405): Homolog of NCBI NO: 34901902 NR Description: OSJNBa0036M16.17 [Oryza sativa (japonica
  misc_feature (1)..(328): Homolog of NCBI NO: 34901902 NR Description: OSJNBa0036M16.17 [Oryza sativa (japonica
MASHPEHPAEPRAPPAPTTIGDLSDDLLREILLRLPSLPSLVCASLSCRAFLAAVRSSRAFRRRFRALHPPPLLGFFFDPDGNENPTFMPIRRGSDRGHAAAVRGLDAFLTRVPHEDDVFPGWQIMECRGGCLLLLNWRTKQLAAYNPLTGALDLVPKLPDDICKGHRGKFISGDFFLVVPDDEAPDRRSFRVVSSCHDKYRVRVAVFSSATRKWQILPWSEPVPTQPASGKYWLLSGRQVSGFLCWSHHKNAYKVLLDTATLQFSVIDLPYGLSGQGHLYRTGDTKDGKLCIVAAIDFSLFVWFRTPDAGGIDRWVLRHVLQLEDEVLEATEGSRNELEQLKVFAILDGIVYMTTFETFRDATLPCWYLSFCLETRKLEKLFYVKANGHAHPYFMPWPTALVGNNLSP

SEQ ID NO: 1707 - protein, 321 aa, Zea mays subsp. mays
  peptide (1)..(321): Ceres Seq. ID no. 12373452
  misc_feature (1)..(189): Homolog of NCBI NO: 34393354 NR Description: hypothetical protein [Oryza sativa (japonica
  misc_feature (1)..(216): Homolog of NCBI NO: 37530944 NR Description: hypothetical protein [Oryza sativa (japonica
  misc_feature (1)..(248): Homolog of NCBI NO: 37531214 NR Description: unknown protein [Oryza sativa (japonica
  misc_feature (1)..(191): Homolog of NCBI NO: 34393352 NR Description: hypothetical protein [Oryza sativa (japonica
  misc_feature (1)..(206): Homolog of NCBI NO: 34914940 NR Description: B1096D03.37 [Oryza sativa (japonica
  misc_feature (1)..(238): Homolog of NCBI NO: 37530900 NR Description: hypothetical protein [Oryza sativa (japonica
  misc_feature (1)..(242): Homolog of NCBI NO: 34914580 NR Description: P0455H0310.25 [Oryza sativa (japonica
  misc_feature (1)..(264): Homolog of NCBI NO: 34914942 NR Description: B1096D03.38 [Oryza sativa (japonica
  misc_feature (1)..(317): Homolog of NCBI NO: 34901902 NR Description: OSJNBa0036M16.17 [Oryza sativa (japonica
  misc_feature (1)..(240): Homolog of NCBI NO: 34901902 NR Description: OSJNBa0036M16.17 [Oryza sativa (japonica
MPIRRGSDRGHAAAVRGLDAFLTRVPHEDDVFPGWQIMECRGGCLLLLNWRTKQLAAYNPLTGALDLVPKLPDDICKGHRGKFISGDFFLVVPDDEAPDRRSFRVVSSCHDKYRVRVAVFSSATRKWQILPWSEPVPTQPASGKYWLLSGRQVSGFLCWSHHKNAYKVLLDTATLQFSVIDLPYGLSGQGHLYRTGDTKDGKLCIVAAIDFSLFVWFRTPDAGGIDRWVLRHVLQLEDEVLEATEGSRNELEQLKVFAILDGIVYMTTFETFRDATLPCWYLSFCLETRKLEKLFYVKANGHAHPYFMPWPTALVGNNLSP

SEQ ID NO: 1708 - DNA, 1406 bp, Zea mays subsp. mays
  misc_feature (1)..(1406): Ceres Seq. ID no. 12391368
  misc_feature: MA Experiment ID: 108528 Result: Down-regulated in Transcription
  misc_feature: MA Experiment 108528 PARAMETER Experiment Name: Zm_Imbibed_Seeds_P Parameter: Age (day) Value: 5 vs. 2
  misc_feature: MA Experiment 108528 PARAMETER Experiment Name: Zm_Imbibed_Seeds_P Parameter: Organism Value: Zea mays
  misc_feature: MA Experiment 108528 PARAMETER Experiment Name: Zm_Imbibed_Seeds_P Parameter: Plant Line Value: 35A19
  misc_feature: MA Experiment 108528 PARAMETER Experiment Name: Zm_Imbibed_Seeds_P Parameter: Tissue Value: Aerial vs. Embryo
  misc_feature: MA Experiment ID: 108529 Result: Down-regulated in Transcription
  misc_feature: MA Experiment 108529 PARAMETER Experiment Name: Zm_Imbibed_Seeds_P Parameter: Age (day) Value: 5 vs. 2
  misc_feature: MA Experiment 108529 PARAMETER Experiment Name: Zm_Imbibed_Seeds_P Parameter: Organism Value: Zea mays
  misc_feature: MA Experiment 108529 PARAMETER Experiment Name: Zm_Imbibed_Seeds_P Parameter: Plant Line Value: 35A19
  misc_feature: MA Experiment 108529 PARAMETER Experiment Name: Zm_Imbibed_Seeds_P Parameter: Tissue Value: Roots vs. Embryo
  misc_feature: MA Experiment ID: 108530 Result: Down-regulated in Transcription
  misc_feature: MA Experiment 108530 PARAMETER Experiment Name: Zm_Imbibed_Seeds_P Parameter: Age (day) Value: 6 vs. 2
  misc_feature: MA Experiment 108530 PARAMETER Experiment Name: Zm_Imbibed_Seeds_P Parameter: Organism Value: Zea mays
  misc_feature: MA Experiment 108530 PARAMETER Experiment Name: Zm_Imbibed_Seeds_P Parameter: Plant Line Value: 35A19
  misc_feature: MA Experiment 108530 PARAMETER Experiment Name: Zm_Imbibed_Seeds_P Parameter: Tissue Value: Aerial vs. Embryo
  misc_feature: MA Experiment ID: 108535 Result: Up-regulated in Transcription
  misc_feature: MA Experiment 108535 PARAMETER Experiment Name: Zm_Meristem_P Parameter: Age (day) Value: 8
  misc_feature: MA Experiment 108535 PARAMETER Experiment Name: Zm_Meristem_P Parameter: Organism Value: Zea mays
  misc_feature: MA Experiment 108535 PARAMETER Experiment Name: Zm_Meristem_P Parameter: Plant Line Value: 35A19
  misc_feature: MA Experiment 108535 PARAMETER Experiment Name: Zm_Meristem_P Parameter: Tissue Value: Root Meristem vs. Above Root Meristem
  misc_feature: MA Experiment ID: 108543 Result: Up-regulated in Transcription
  misc_feature: MA Experiment ID: 108689 Result: Down-regulated in Transcription
  misc_feature: MA Experiment 108689 PARAMETER Experiment Name: Zm_Drought_Roots_P Parameter: Age (day) Value: 9
  misc_feature: MA Experiment 108689 PARAMETER Experiment Name: Zm_Drought_Roots_P Parameter: Organism Value: Zea mays
  misc_feature: MA Experiment 108689 PARAMETER Experiment Name: Zm_Drought_Roots_P Parameter: Plant Line Value: 35A19
  misc_feature: MA Experiment 108689 PARAMETER Experiment Name: Zm_Drought_Roots_P Parameter: Timepoint (hr) Value: 24
  misc_feature: MA Experiment 108689 PARAMETER Experiment Name: Zm_Drought_Roots_P Parameter: Tissue Value: Roots
  misc_feature: MA Experiment 108689 PARAMETER Experiment Name: Zm_Drought_Roots_P Parameter: Treatment Value: Drought vs. No Drought
  misc_feature: MA Experiment ID: 20000108 Result: Up-regulated in Transcription
  misc_feature: MA Experiment 20000108 PARAMETER Experiment Name: Zm_Root-Tips_P Parameter: Age (day) Value: 12
  misc_feature: MA Experiment 20000108 PARAMETER Experiment Name: Zm_Root-Tips_P Parameter: Organism Value: Zea mays
  misc_feature: MA Experiment 20000108 PARAMETER Experiment Name: Zm_Root-Tips_P Parameter: Tissue Value: Root tips vs. Root mid region    35
  misc_feature: MA Experiment 20000108 PARAMETER Experiment Name: Zm_Root-Tips_P Parameter: Tissue Value: Root tips vs. Root mid region   Sequence Listing-Misc Features (4)
  misc_feature: MA Experiment ID: 20000477 Result: Down-regulated in Transcription
  misc_feature: MA Experiment 20000477 PARAMETER Experiment Name: Zm_5mM_SA_P Parameter: Age (day) Value: 10
  misc_feature: MA Experiment 20000477 PARAMETER Experiment Name: Zm_5mM_SA_P Parameter: Organism Value: Zea mays
  misc_feature: MA Experiment 20000477 PARAMETER Experiment Name: Zm_5mM_SA_P Parameter: Plant Line Value: 35A19
  misc_feature: MA Experiment 20000477 PARAMETER Experiment Name: Zm_5mM_SA_P Parameter: Timepoint (hr) Value: 48
  misc_feature: MA Experiment 20000477 PARAMETER Experiment Name: Zm_5mM_SA_P Parameter: Tissue Value: Aerial
  misc_feature: MA Experiment 20000477 PARAMETER Experiment Name: Zm_5mM_SA_P Parameter: Treatment Value: 5mM SA vs. No Treatment
aaagctaaaacagggcgggggcgggggcgtcgcttcgtggggacagccctcgtgatcgatccgcccgtgggatctcgcgcacgccaggattggagagctgcggcctccctccgccccaaccagccatgggttcccgcgttgattgcggcgcttagacgcggaggaggagagagacacggggaggggggaggccgaggcctaggaggcgtagcgctgtgcagggcgcgagcgcgttcgttcggcatggaacagaacgccggctcgttcctcgccgtgcgtcgcctctccggtggcgccatccaccaccatcgtcaccactcttccccggctgaggtcgtgggcgtgtccactgcgtggctcggtaaggggctttcatgcgtctgcgcgcagaggagggagagcgacgtgcgcctgtccttcgatttgagtcccattcaggaagagtgcttgaataggttgcagaaccggatagaggtgcagtatgatggttcaaatctggagcatcagaaagcactggaagccctttggcgttcttcttttcctggaactgaacttctagggttagtatcagaccagtggaaggagatgggatggcaagggaaagatccatctacagatttcaggggcggtggttttatatctttggagaatttactgtatttctctaggaactatccaaaatccttccaggagctccttcgtaagcagaatggtgatagagcattgtgggaatatccctttgctgtagctggtgtaaatattacattcatgctgattcagatgcttgaccttcaagcagctaagccaacgtcgttggttggagcggttttcctaaatctactcttagaaaatgatcgagcgttcgacattctttactgcataaccttcaaactgatggatcagaaatggcttgaaatgcacgccagttacatggatttcaatacggttattaaatcaacacggcgccagctcgagagggagctgttgctagaagatatccagagaatcgaggacatgccatcgtacaggtttctcgcctgctagcaattgaacctcctggtcgtaccgaacattgccacaagatagtgcagctccatacactcgaagaagaagctgagaggttggaaccacgtacaccgagcgaagggtgaatctaggttcatggactgtggatgtgttgttgctttgaattgcgctgtcgtgtttacctactccgagtccgacaacagcctcgacgccgagtgccttttcgtttcaacgatgtgctatatcttggggccacggaacggcagatcctagctttctttgtaaacaagaggatgtggaaagttggctgcgtatgctttgtggccatgtgcatggataatcttgctgctcgcctgaaagaaaaaaaggccgatcttaag

SEQ ID NO: 1709 - protein, 347 aa, Zea mays subsp. mays
  peptide (1)..(347): Ceres Seq. ID no. 12391369
  misc_feature (167)..(327): Pfam Name: Protein of unknown function, DUF609 Pfam Description: Protein of unknown function, DUF609
  misc_feature (118)..(346): Homolog of NCBI NO: 18408759 NR Description: hypothetical protein; protein id: At1g67400.1
  misc_feature (82)..(346): Homolog of NCBI NO: 11288393 NR Description: hypothetical protein F27H5.50 - Arabidopsis
  misc_feature (82)..(345): Homolog of NCBI NO: 7485547 NR Description: hypothetical protein At2g44770 [imported] -
  misc_feature (82)..(345): Homolog of NCBI NO: 15810014 NR Description: At2g44770/F16B22.26 [Arabidopsis thaliana]
  misc_feature (112)..(345): Homolog of NCBI NO: 38344760 NR Description: OSJNBa0068L06.3 [Oryza sativa (japonica
  misc_feature (112)..(345): Homolog of NCBI NO: 15218859 NR Description: hypothetical protein; protein id: At1g03620.1
  misc_feature (82)..(346): Homolog of NCBI NO: 18411543 NR Description: putative protein
  misc_feature (82)..(345): Homolog of NCBI NO: 18406626 NR Description: expressed protein
  misc_feature (82)..(346): Homolog of NCBI NO: 14140119 NR Description: putative protein [Oryza sativa]
  misc_feature (82)..(345): Homolog of NCBI NO: 38345956 NR Description: OSJNBb0038F03.14 [Oryza sativa (japonica
KAKTGRGRGRRFVGTALVIDPPVGSRARQDWRAAASLRPNQPWVPALIAALRRGGGERHGEGGGRGLGGVALCRARARSFGMEQNAGSFLAVRRLSGGAIHHHRHHSSPAEVVGVSTAWLGKGLSCVCAQRRESDVRLSFDLSPIQEECLNRLQNRIEVQYDGSNLEHQKALEALWRSSFPGTELLGLVSDQWKEMGWQGKDPSTDFRGGGFISLENLLYFSRNYPKSFQELLRKQNGDRALWEYPFAVAGVNITFMLIQMLDLQAAKPTSLVGAVFLNLLLENDRAFDILYCITFKLMDQKWLEMHASYMDFNTVIKSTRRQLERELLLEDIQRIEDMPSYRFLAC

SEQ ID NO: 1710 - protein, 266 aa, Zea mays subsp. mays
  peptide (1)..(266): Ceres Seq. ID no. 12391370
  misc_feature (86)..(246): Pfam Name: Protein of unknown function, DUF609 Pfam Description: Protein of unknown function, DUF609
  misc_feature (31)..(264): Homolog of NCBI NO: 38344760 NR Description: OSJNBa0068L06.3 [Oryza sativa (japonica
  misc_feature (31)..(264): Homolog of NCBI NO: 15218859 NR Description: hypothetical protein; protein id: At1g03620.1
  misc_feature (37)..(265): Homolog of NCBI NO: 18408759 NR Description: hypothetical protein; protein id: At1g67400.1
  misc_feature (1)..(265): Homolog of NCBI NO: 11288393 NR Description: hypothetical protein F27H5.50 - Arabidopsis
  misc_feature (1)..(264): Homolog of NCBI NO: 7485547 NR Description: hypothetical protein At2g44770 [imported] -
  misc_feature (1)..(264): Homolog of NCBI NO: 15810014 NR Description: At2g44770/F16B22.26 [Arabidopsis thaliana]
  misc_feature (1)..(265): Homolog of NCBI NO: 18411543 NR Description: putative protein
  misc_feature (1)..(264): Homolog of NCBI NO: 18406626 NR Description: expressed protein
  misc_feature (1)..(265): Homolog of NCBI NO: 14140119 NR Description: putative protein [Oryza sativa]
  misc_feature (1)..(264): Homolog of NCBI NO: 38345956 NR Description: OSJNBb0038F03.14 [Oryza sativa (japonica
MEQNAGSFLAVRRLSGGAIHHHRHHSSPAEVVGVSTAWLGKGLSCVCAQRRESDVRLSFDLSPIQEECLNRLQNRIEVQYDGSNLEHQKALEALWRSSFPGTELLGLVSDQWKEMGWQGKDPSTDFRGGGFISLENLLYFSRNYPKSFQELLRKQNGDRALWEYPFAVAGVNITFMLIQMLDLQAAKPTSLVGAVFLNLLLENDRAFDILYCITFKLMDQKWLEMHASYMDFNTVIKSTRRQLERELLLEDIQRIEDMPSYRFLAC

SEQ ID NO: 1711 - DNA, 1443 bp, Zea mays subsp. mays
  misc_feature (1)..(1443): Ceres Seq. ID no. 12342542
  misc_feature: MA Experiment ID: 20000534 Result: Down-regulated in Transcription
  misc_feature: MA Experiment 20000534 PARAMETER Experiment Name: Zm_Hybrid_Pollen_P Parameter: Age (day) Value: 8
  misc_feature: MA Experiment 20000534 PARAMETER Experiment Name: Zm_Hybrid_Pollen_P Parameter: Organism Value: Zea mays
  misc_feature: MA Experiment 20000534 PARAMETER Experiment Name: Zm_Hybrid_Pollen_P Parameter: Plant Line Value: 35A19
  misc_feature: MA Experiment 20000534 PARAMETER Experiment Name: Zm_Hybrid_Pollen_P Parameter: Tissue Value: Pollen vs. Aerial
gaccgtatttgttatcggactgggaagcagcggcggtacaaagtgtgggagagaaaggagaagagacttgatgtcctcgcagtttgtccaatagatctcctcgccgcctcacccgtctcctcctccgcagcttccccgcgatcccgaccatggagggcgacggtaccaaccttgatgcggcgatagagtcgctcctgaatgtcgagaagcagatgaggctggccggagatgtcgccggcactcggaaggccgtcatcgacatcgtcgagctctgctacaaggccggcgcgtggaagacgctaaacgaccagatcgttctcctatctaagaggagaggccagcttaagcaggctattactgctatggttcagaaagcaatggagtacattaatttgacaccaggcattgacacaagcatcgagctaataaaaacactgagcagtgtctctgctggcaaaatctatgttgagatagagagagcaagattgatcaaaaggcttgcaaaaattaaagaggagcagggacagatttacgaggctgctgatttgatgcaagaagttgctgttgaaacatttggctctatggcaaagacggagaaaattgctttcattcttgagcaggtccggctatgcctggatcggcaagattttgtcagagcacaaattttatccaggaaaatcagtactagagtatttcacgcaaatccatcaaaggaaaaaaagaaaccaaaggaaggtgacagtattgttcaggatgctcctgcagatattccttcccttctagaattgaagcgcgtctactacgaactgatgattcgttattactctcacaacaatgattacttggaaatctgccgttgttacaaggctatttatgatattccagcaataaaagaggatccaacaaagtggataccgattcttaggaagatctgttggtacttggtgctagcacctcatgatcctatgcaatcaagccttctcaatgctacactagaggataaaaacctttcagaaatcccaaatttcaggttattactgaagcagctggtcaccatggaggtgatacagtggacaagtctgtgggaattcttcaaggaggaatatgagaaggagaaggatcttgggggagctttgggtgccaaagcttcagaagatttgaggctgaggattatcgaacatgtattggttactttgtgtttggtctagttattttgctctatgcttgtccattgaatctgatctcttgctctcttcagaatatcttggttgtatccaagtactatgcaagggttaccctcaagaggcttgccgatcttctttgcctgactttgcaggtttgtttgttttttcacctttgcatgatattgtatttcctttgtgatgccaaccgtggcatcttgtgtttaaacccactacatgacaatcacctgaattgttaggc

SEQ ID NO: 1712 - protein, 352 aa, Zea mays subsp. mays
  peptide (1)..(352): Ceres Seq. ID no. 12342543
  misc_feature (291)..(347): Pfam Name: PCI domain Pfam Description: PCI domain
  misc_feature (1)..(201): Homolog of NCBI NO: 34874104 NR Description: similar to proteasome 26S non-ATPase subunit 12
  misc_feature (212)..(344): Homolog of NCBI NO: 4506221 NR Description: proteasome 26S non-ATPase subunit 12 isoform 1
  misc_feature (1)..(201): Homolog of NCBI NO: 4506221 NR Description: proteasome 26S non-ATPase subunit 12 isoform 1
  misc_feature (217)..(344): Homolog of NCBI NO: 27924244 NR Description: Similar to proteasome (prosome, macropain) 26S
  misc_feature (1)..(190): Homolog of NCBI NO: 27924244 NR Description: Similar to proteasome (prosome, macropain) 26S
  misc_feature (176)..(347): Homolog of NCBI NO: 17298157 NR Description: 26S proteasome regulatory particle non-ATPase
  misc_feature (1)..(347): Homolog of NCBI NO: 30698065 NR Description: 26S proteasome regulatory subunit (RPN5),
  misc_feature (1)..(347): Homolog of NCBI NO: 10177207 NR Description: proteasome regulatory subunit-like [Arabidopsis
  misc_feature (3)..(347): Homolog of NCBI NO: 15242545 NR Description: 26S proteasome regulatory subunit (RPN5), putative
  misc_feature (1)..(347): Homolog of NCBI NO: 27573351 NR Description: putative proteasome regulatory non-ATPase subunit
MEGDGTNLDAAIESLLNVEKQMRLAGDVAGTRKAVIDIVELCYKAGAWKTLNDQIVLLSKRRGQLKQAITAMVQKAMEYINLTPGIDTSIELIKTLSSVSAGKIYVEIERARLIKRLAKIKEEQGQIYEAADLMQEVAVETFGSMAKTEKIAFILEQVRLCLDRQDFVRAQILSRKISTRVFHANPSKEKKKPKEGDSIVQDAPADIPSLLELKRVYYELMIRYYSHNNDYLEICRCYKAIYDIPAIKEDPTKWIPILRKICWYLVLAPHDPMQSSLLNATLEDKNLSEIPNFRLLLKQLVTMEVIQWTSLWEFFKEEYEKEKDLGGALGAKASEDLRLRIIEHVLVTLCLV

SEQ ID NO: 1713 - protein, 331 aa, Zea mays subsp. mays
  peptide (1)..(331): Ceres Seq. ID no. 12342544
  misc_feature (270)..(326): Pfam Name: PCI domain Pfam Description: PCI domain
  misc_feature (1)..(180): Homolog of NCBI NO: 34874104 NR Description: similar to proteasome 26S non-ATPase subunit 12
  misc_feature (191)..(323): Homolog of NCBI NO: 4506221 NR Description: proteasome 26S non-ATPase subunit 12 isoform 1
  misc_feature (1)..(180): Homolog of NCBI NO: 4506221 NR Description: proteasome 26S non-ATPase subunit 12 isoform 1
  misc_feature (196)..(323): Homolog of NCBI NO: 27924244 NR Description: Similar to proteasome (prosome, macropain) 26S
  misc_feature (1)..(169): Homolog of NCBI NO: 27924244 NR Description: Similar to proteasome (prosome, macropain) 26S
  misc_feature (155)..(326): Homolog of NCBI NO: 17298157 NR Description: 26S proteasome regulatory particle non-ATPase
  misc_feature (1)..(326): Homolog of NCBI NO: 30698065 NR Description: 26S proteasome regulatory subunit (RPN5),
  misc_feature (1)..(326): Homolog of NCBI NO: 10177207 NR Description: proteasome regulatory subunit-like [Arabidopsis
  misc_feature (1)..(326): Homolog of NCBI NO: 15242545 NR Description: 26S proteasome regulatory subunit (RPN5), putative
  misc_feature (1)..(326): Homolog of NCBI NO: 27573351 NR Description: putative proteasome regulatory non-ATPase subunit
MRLAGDVAGTRKAVIDIVELCYKAGAWKTLNDQIVLLSKRRGQLKQAITAMVQKAMEYINLTPGIDTSIELIKTLSSVSAGKIYVEIERARLIKRLAKIKEEQGQIYEAADLMQEVAVETFGSMAKTEKIAFILEQVRLCLDRQDFVRAQILSRKISTRVFHANPSKEKKKPKEGDSIVQDAPADIPSLLELKRVYYELMIRYYSHNNDYLEICRCYKAIYDIPAIKEDPTKWIPILRKICWYLVLAPHDPMQSSLLNATLEDKNLSEIPNFRLLLKQLVTMEVIQWTSLWEFFKEEYEKEKDLGGALGAKASEDLRLRIIEHVLVTLCLV

SEQ ID NO: 1714 - protein, 281 aa, Zea mays subsp. mays
  peptide (1)..(281): Ceres Seq. ID no. 12342545
  misc_feature (220)..(276): Pfam Name: PCI domain Pfam Description: PCI domain
  misc_feature (1)..(130): Homolog of NCBI NO: 34874104 NR Description: similar to proteasome 26S non-ATPase subunit 12
  misc_feature (141)..(273): Homolog of NCBI NO: 4506221 NR Description: proteasome 26S non-ATPase subunit 12 isoform 1
  misc_feature (1)..(130): Homolog of NCBI NO: 4506221 NR Description: proteasome 26S non-ATPase subunit 12 isoform 1
  misc_feature (146)..(273): Homolog of NCBI NO: 27924244 NR Description: Similar to proteasome (prosome, macropain) 26S
  misc_feature (1)..(119): Homolog of NCBI NO: 27924244 NR Description: Similar to proteasome (prosome, macropain) 26S
  misc_feature (105)..(276): Homolog of NCBI NO: 17298157 NR Description: 26S proteasome regulatory particle non-ATPase
  misc_feature (1)..(276): Homolog of NCBI NO: 30698065 NR Description: 26S proteasome regulatory subunit (RPN5),
  misc_feature (1)..(276): Homolog of NCBI NO: 10177207 NR Description: proteasome regulatory subunit-like [Arabidopsis
  misc_feature (1)..(276): Homolog of NCBI NO: 15242545 NR Description: 26S proteasome regulatory subunit (RPN5), putative
  misc_feature (1)..(276): Homolog of NCBI NO: 27573351 NR Description: putative proteasome regulatory non-ATPase subunit
MVQKAMEYINLTPGIDTSIELIKTLSSVSAGKIYVEIERARLIKRLAKIKEEQGQIYEAADLMQEVAVETFGSMAKTEKIAFILEQVRLCLDRQDFVRAQILSRKISTRVFHANPSKEKKKPKEGDSIVQDAPADIPSLLELKRVYYELMIRYYSHNNDYLEICRCYKAIYDIPAIKEDPTKWIPILRKICWYLVLAPHDPMQSSLLNATLEDKNLSEIPNFRLLLKQLVTMEVIQWTSLWEFFKEEYEKEKDLGGALGAKASEDLRLRIIEHVLVTLCLV

SEQ ID NO: 1715 - DNA, 1495 bp, Zea mays subsp. mays
  misc_feature (1)..(1495): Ceres Seq. ID no. 12355866
  misc_feature: MA Experiment ID: 108547 Result: Up-regulated in Transcription
  misc_feature: MA Experiment 108547 PARAMETER Experiment Name: Zm_Imbibed_Seeds_P Parameter: Age (day) Value: 4 vs. 2
  misc_feature: MA Experiment 108547 PARAMETER Experiment Name: Zm_Imbibed_Seeds_P Parameter: Organism Value: Zea mays
  misc_feature: MA Experiment 108547 PARAMETER Experiment Name: Zm_Imbibed_Seeds_P Parameter: Plant Line Value: 35A19
  misc_feature: MA Experiment 108547 PARAMETER Experiment Name: Zm_Imbibed_Seeds_P Parameter: Tissue Value: Aerial vs. Embryo
atgtgggcacgtttcctcttcttcgttctctcccggtctcccccatcccaatcgtgcgtgttcgtcactcctcagctccgaccttcacggggcccacggggcccgacgctcggcggctttactcagtgcaccatggccttctcttcgtcactgccgccgttcttcccaccttctggaaccttccgagcccatcccgctaggaggctgcgggccgatgcacccgggagattcgtggcgtcctgcttgccccctcccgacgtcgtggtgacgcgcgagcagggaaagaacgccaggctcatctccgcgctggaaaagcataatgtacaccctctggaacttcctcttattaagcatgttgaaggccctgatacagataggctttcagatgtcctacgtaatgacaagttcgactggattattgtaacctctcctgaggcagctgcagtgttccttcagggatggaaggttgctggaagtcctaaggtgcgagtagctgttgttggagaaggaactgcaagggtttttcatgaagtatcagaatctgatgatcaatctctagagcttgcattttcaccttccaaagctttgggtagagtcttggcttcagagcttccaagaagcaacgggaactcatgtaaagtattgtaccctgcatctgcaaaggctggccatgaaattgaggatgtgctatcagaacgaggatttgacgtgacccgactgaatacatatacaactgttcctgtagaagatgtcgacccactgacattaaaccttgctatatcagctccagttgttgcggtagcttctccttctgcactgagggcatggctaaatcttatctcaaaatctgataactggaacaactccgtcgcctgcatcggtgagaccactgcatctgcagcgaagaaacagggcctgaagagcatatattacccaacgacccctggacttgaggggtgggtcgagagcattctcgaggcgctgagagtccacaggacagcatcaaaagaggccccaaaacgttgaaaacgggcggatggcggagcttcttgcttggcgttggtagccgtccgcagtgtcgaagaaattctttgcttctttgacgacaattgccccccgttgagggaggtggtggtgtcaagccatggctttccagtggcccagtttgtaatggattcttgggccgaaaggcccatctctacatgtcttggctcgcaaggcgattgcatcagtccatccatccatttcatggagggttttagcagtgccgtctctgtttcgctaatcggtgatggcagccagccttgttgtactttgtgggtttgttgacgcagccggtcggattcttcttattgccggattggttgcgtaacgctaggtggttctgaatatcggcgacggcgaggctgtggaatctccgccctccaccgaagattccctgtcgtcgtttctgaatttaattaacaacatggcatgatgaccaatcaaagctcgc

SEQ ID NO: 1716 - protein, 341 aa, Zea mays subsp. mays
  peptide (1)..(341): Ceres Seq. ID no. 12355867
  misc_feature (94)..(323): Pfam Name: Uroporphyrinogen-III synthase HemD Pfam Description: Uroporphyrinogen-III synthase HemD
  misc_feature (180)..(251): Homolog of NCBI NO: 7487883 NR Description: hypothetical protein At2g26540 [imported] -
  misc_feature (87)..(329): Homolog of NCBI NO: 15805812 NR Description: uroporphyrinogen-III synthase, putative
  misc_feature (246)..(340): Homolog of NCBI NO: 7487883 NR Description: hypothetical protein At2g26540 [imported] -
  misc_feature (150)..(340): Homolog of NCBI NO: 22045244 NR Description: unknown protein [Arabidopsis thaliana]
  misc_feature (48)..(340): Homolog of NCBI NO: 21592861 NR Description: uroporphyrinogen III synthase [Arabidopsis
  misc_feature (48)..(340): Homolog of NCBI NO: 18694346 NR Description: uroporphyrinogen III synthase [Arabidopsis
  misc_feature (48)..(340): Homolog of NCBI NO: 18401160 NR Description: expressed protein
MWARFLFFVLSRSPPSQSCVFVTPQLRPSRGPRGPTLGGFTQCTMAFSSSLPPFFPPSGTFRAHPARRLRADAPGRFVASCLPPPDVVVTREQGKNARLISALEKHNVHPLELPLIKHVEGPDTDRLSDVLRNDKFDWIIVTSPEAAAVFLQGWKVAGSPKVRVAVVGEGTARVFHEVSESDDQSLELAFSPSKALGRVLASELPRSNGNSCKVLYPASAKAGHEIEDVLSERGFDVTRLNTYTTVPVEDVDPLTLNLAISAPVVAVASPSALRAWLNLISKSDNWNNSVACIGETTASAAKKQGLKSIYYPTTPGLEGWVESILEALRVHRTASKEAPKR

SEQ ID NO: 1717 - protein, 297 aa, Zea mays subsp. mays
  peptide (1)..(297): Ceres Seq. ID no. 12355868
  misc_feature (50)..(279): Pfam Name: Uroporphyrinogen-III synthase HemD Pfam Description: Uroporphyrinogen-III synthase HemD
  misc_feature (136)..(207): Homolog of NCBI NO: 7487883 NR Description: hypothetical protein At2g26540 [imported] -
  misc_feature (43)..(285): Homolog of NCBI NO: 15805812 NR Description: uroporphyrinogen-III synthase, putative
  misc_feature (202)..(296): Homolog of NCBI NO: 7487883 NR Description: hypothetical protein At2g26540 [imported] -
  misc_feature (106)..(296): Homolog of NCBI NO: 22045244 NR Description: unknown protein [Arabidopsis thaliana]
  misc_feature (4)..(296): Homolog of NCBI NO: 21592861 NR Description: uroporphyrinogen III synthase [Arabidopsis
  misc_feature (4)..(296): Homolog of NCBI NO: 18694346 NR Description: uroporphyrinogen III synthase [Arabidopsis
  misc_feature (4)..(296): Homolog of NCBI NO: 18401160 NR Description: expressed protein
MAFSSSLPPFFPPSGTFRAHPARRLRADAPGRFVASCLPPPDVVVTREQGKNARLISALEKHNVHPLELPLIKHVEGPDTDRLSDVLRNDKFDWIIVTSPEAAAVFLQGWKVAGSPKVRVAVVGEGTARVFHEVSESDDQSLELAFSPSKALGRVLASELPRSNGNSCKVLYPASAKAGHEIEDVLSERGFDVTRLNTYTTVPVEDVDPLTLNLAISAPVVAVASPSALRAWLNLISKSDNWNNSVACIGETTASAAKKQGLKSIYYPTTPGLEGWVESILEALRVHRTASKEAPKR

SEQ ID NO: 1718 - DNA, 1323 bp, Zea mays subsp. mays
  misc_feature (1)..(1323): Ceres Seq. ID no. 12369036
  misc_feature: MA Experiment ID: 108523 Result: Down-regulated in Transcription
  misc_feature: MA Experiment 108523 PARAMETER Experiment Name: Zm_42deg_Heat_P Parameter: Age (day) Value: 8
  misc_feature: MA Experiment 108523 PARAMETER Experiment Name: Zm_42deg_Heat_P Parameter: Organism Value: Zea mays
  misc_feature: MA Experiment 108523 PARAMETER Experiment Name: Zm_42deg_Heat_P Parameter: Plant Line Value: 35A19
  misc_feature: MA Experiment 108523 PARAMETER Experiment Name: Zm_42deg_Heat_P Parameter: Temperature (deg C) Value: 42 vs. 22
  misc_feature: MA Experiment 108523 PARAMETER Experiment Name: Zm_42deg_Heat_P Parameter: Timepoint (hr) Value: 6
  misc_feature: MA Experiment 108523 PARAMETER Experiment Name: Zm_42deg_Heat_P Parameter: Tissue Value: Aerial
  misc_feature: MA Experiment ID: 108529 Result: Down-regulated in Transcription
  misc_feature: MA Experiment 108529 PARAMETER Experiment Name: Zm_Imbibed_Seeds_P Parameter: Age (day) Value: 5 vs. 2
  misc_feature: MA Experiment 108529 PARAMETER Experiment Name: Zm_Imbibed_Seeds_P Parameter: Organism Value: Zea mays
  misc_feature: MA Experiment 108529 PARAMETER Experiment Name: Zm_Imbibed_Seeds_P Parameter: Plant Line Value: 35A19
  misc_feature: MA Experiment 108529 PARAMETER Experiment Name: Zm_Imbibed_Seeds_P Parameter: Tissue Value: Roots vs. Embryo
  misc_feature: MA Experiment ID: 108532 Result: Down-regulated in Transcription
  misc_feature: MA Experiment 108532 PARAMETER Experiment Name: Zm_20uM_KNO3_H-to-L_P Parameter: Age (day) Value: 11
  misc_feature: MA Experiment 108532 PARAMETER Experiment Name: Zm_20uM_KNO3_H-to-L_P Parameter: Organism Value: Zea mays
  misc_feature: MA Experiment 108532 PARAMETER Experiment Name: Zm_20uM_KNO3_H-to-L_P Parameter: Plant Line Value: 35A19
  misc_feature: MA Experiment 108532 PARAMETER Experiment Name: Zm_20uM_KNO3_H-to-L_P Parameter: Timepoint (hr) Value: 16
  misc_feature: MA Experiment 108532 PARAMETER Experiment Name: Zm_20uM_KNO3_H-to-L_P Parameter: Tissue Value: Roots
  misc_feature: MA Experiment 108532 PARAMETER Experiment Name: Zm_20uM_KNO3_H-to-L_P Parameter: Treatment Value: 20uM KNO3 vs. 60mM KNO3
  misc_feature: MA Experiment ID: 108543 Result: Up-regulated in Transcription
  misc_feature: MA Experiment ID: 108544 Result: Down-regulated in Transcription
  misc_feature: MA Experiment ID: 108546 Result: Down-regulated in Transcription
  misc_feature: MA Experiment 108546 PARAMETER Experiment Name: Zm_Imbibed_Seeds_P Parameter: Age (day) Value: 3 vs. 2
  misc_feature: MA Experiment 108546 PARAMETER Experiment Name: Zm_Imbibed_Seeds_P Parameter: Organism Value: Zea mays
  misc_feature: MA Experiment 108546 PARAMETER Experiment Name: Zm_Imbibed_Seeds_P Parameter: Plant Line Value: 35A19
  misc_feature: MA Experiment 108546 PARAMETER Experiment Name: Zm_Imbibed_Seeds_P Parameter: Tissue Value: Roots vs. Embryo
  misc_feature: MA Experiment ID: 108556 Result: Down-regulated in Transcription
  misc_feature: MA Experiment 108556 PARAMETER Experiment Name: Zm_Drought_P Parameter: Age (day) Value: 9
  misc_feature: MA Experiment 108556 PARAMETER Experiment Name: Zm_Drought_P Parameter: Organism Value: Zea mays
  misc_feature: MA Experiment 108556 PARAMETER Experiment Name: Zm_Drought_P Parameter: Plant Line Value: 35A19
  misc_feature: MA Experiment 108556 PARAMETER Experiment Name: Zm_Drought_P Parameter: Timepoint (hr) Value: 24
  misc_feature: MA Experiment 108556 PARAMETER Experiment Name: Zm_Drought_P Parameter: Tissue Value: Aerial
  misc_feature: MA Experiment 108556 PARAMETER Experiment Name: Zm_Drought_P Parameter: Treatment Value: Drought vs. No Drought
  misc_feature: MA Experiment ID: 108559 Result: Down-regulated in Transcription
  misc_feature: MA Experiment 108559 PARAMETER Experiment Name: Zm_5mM_NO_P Parameter: Age (day) Value: 8
  misc_feature: MA Experiment 108559 PARAMETER Experiment Name: Zm_5mM_NO_P Parameter: Organism Value: Zea mays
  misc_feature: MA Experiment 108559 PARAMETER Experiment Name: Zm_5mM_NO_P Parameter: Plant Line Value: 35A19
  misc_feature: MA Experiment 108559 PARAMETER Experiment Name: Zm_5mM_NO_P Parameter: Timepoint (hr) Value: 12
  misc_feature: MA Experiment 108559 PARAMETER Experiment Name: Zm_5mM_NO_P Parameter: Tissue Value: Aerial
  misc_feature: MA Experiment 108559 PARAMETER Experiment Name: Zm_5mM_NO_P Parameter: Treatment Value: 5mM NO vs. No Treatment
  misc_feature: MA Experiment ID: 108687 Result: Down-regulated in Transcription
  misc_feature: MA Experiment 108687 PARAMETER Experiment Name: Zm_Embryos-Flowers__P Parameter: Tissue Value: Embryo vs. Aerial+
  misc_feature: MA Experiment ID: 108688 Result: Up-regulated in Transcription
  misc_feature: MA Experiment 108688 PARAMETER Experiment Name: Zm_Embryos-Flowers__P Parameter: Tissue Value: Immature Flowers vs. Aerial+
  misc_feature: MA Experiment ID: 108689 Result: Down-regulated in Transcription
  misc_feature: MA Experiment 108689 PARAMETER Experiment Name: Zm_Drought_Roots_P Parameter: Age (day) Value: 9
  misc_feature: MA Experiment 108689 PARAMETER Experiment Name: Zm_Drought_Roots_P Parameter: Organism Value: Zea mays
  misc_feature: MA Experiment 108689 PARAMETER Experiment Name: Zm_Drought_Roots_P Parameter: Plant Line Value: 35A19
  misc_feature: MA Experiment 108689 PARAMETER Experiment Name: Zm_Drought_Roots_P Parameter: Timepoint (hr) Value: 24
  misc_feature: MA Experiment 108689 PARAMETER Experiment Name: Zm_Drought_Roots_P Parameter: Tissue Value: Roots
  misc_feature: MA Experiment 108689 PARAMETER Experiment Name: Zm_Drought_Roots_P Parameter: Treatment Value: Drought vs. No Drought
  misc_feature: MA Experiment ID: 20000477 Result: Down-regulated in Transcription
  misc_feature: MA Experiment 20000477 PARAMETER Experiment Name: Zm_5mM_SA_P Parameter: Age (day) Value: 10
  misc_feature: MA Experiment 20000477 PARAMETER Experiment Name: Zm_5mM_SA_P Parameter: Organism Value: Zea mays
  misc_feature: MA Experiment 20000477 PARAMETER Experiment Name: Zm_5mM_SA_P Parameter: Plant Line Value: 35A19
  misc_feature: MA Experiment 20000477 PARAMETER Experiment Name: Zm_5mM_SA_P Parameter: Timepoint (hr) Value: 48
  misc_feature: MA Experiment 20000477 PARAMETER Experiment Name: Zm_5mM_SA_P Parameter: Tissue Value: Aerial
  misc_feature: MA Experiment 20000477 PARAMETER Experiment Name: Zm_5mM_SA_P Parameter: Treatment Value: 5mM SA vs. No Treatment
  misc_feature: MA Experiment ID: 20000478 Result: Down-regulated in Transcription
  misc_feature: MA Experiment 20000478 PARAMETER Experiment Name: Zm_5mM_SA_P Parameter: Age (day) Value: 11
  misc_feature: MA Experiment 20000478 PARAMETER Experiment Name: Zm_5mM_SA_P Parameter: Organism Value: Zea mays
  misc_feature: MA Experiment 20000478 PARAMETER Experiment Name: Zm_5mM_SA_P Parameter: Plant Line Value: 35A19
  misc_feature: MA Experiment 20000478 PARAMETER Experiment Name: Zm_5mM_SA_P Parameter: Timepoint (hr) Value: 72
  misc_feature: MA Experiment 20000478 PARAMETER Experiment Name: Zm_5mM_SA_P Parameter: Tissue Value: Aerial
  misc_feature: MA Experiment 20000478 PARAMETER Experiment Name: Zm_5mM_SA_P Parameter: Treatment Value: 5mM SA vs. No Treatment
  misc_feature: MA Experiment ID: 20000479 Result: Down-regulated in Transcription
  misc_feature: MA Experiment 20000479 PARAMETER Experiment Name: Zm_Drought_P Parameter: Age (day) Value: 10
  misc_feature: MA Experiment 20000479 PARAMETER Experiment Name: Zm_Drought_P Parameter: Organism Value: Zea mays
  misc_feature: MA Experiment 20000479 PARAMETER Experiment Name: Zm_Drought_P Parameter: Plant Line Value: 35A19
  misc_feature: MA Experiment 20000479 PARAMETER Experiment Name: Zm_Drought_P Parameter: Timepoint (hr) Value: 48
  misc_feature: MA Experiment 20000479 PARAMETER Experiment Name: Zm_Drought_P Parameter: Tissue Value: Aerial
  misc_feature: MA Experiment 20000479 PARAMETER Experiment Name: Zm_Drought_P Parameter: Treatment Value: Drought vs. No Drought
  misc_feature: MA Experiment ID: 20000480 Result: Down-regulated in Transcription
  misc_feature: MA Experiment 20000480 PARAMETER Experiment Name: Zm_Drought_P Parameter: Age (day) Value: 11
  misc_feature: MA Experiment 20000480 PARAMETER Experiment Name: Zm_Drought_P Parameter: Organism Value: Zea mays
  misc_feature: MA Experiment 20000480 PARAMETER Experiment Name: Zm_Drought_P Parameter: Plant Line Value: 35A19
  misc_feature: MA Experiment 20000480 PARAMETER Experiment Name: Zm_Drought_P Parameter: Timepoint (hr) Value: 72
  misc_feature: MA Experiment 20000480 PARAMETER Experiment Name: Zm_Drought_P Parameter: Tissue Value: Aerial
  misc_feature: MA Experiment 20000480 PARAMETER Experiment Name: Zm_Drought_P Parameter: Treatment Value: Drought vs. No Drought
  misc_feature: MA Experiment ID: 20000488 Result: Down-regulated in Transcription
  misc_feature: MA Experiment 20000488 PARAMETER Experiment Name: Zm_50mM_NH4NO3_L_to_H_P Parameter: Organism Value: Zea mays
  misc_feature: MA Experiment 20000488 PARAMETER Experiment Name: Zm_50mM_NH4NO3_L_to_H_P Parameter: Timepoint (hr) Value: 8
  misc_feature: MA Experiment 20000488 PARAMETER Experiment Name: Zm_50mM_NH4NO3_L_to_H_P Parameter: Tissue Value: Leaves
  misc_feature: MA Experiment 20000488 PARAMETER Experiment Name: Zm_50mM_NH4NO3_L_to_H_P Parameter: Treatment Value: 50mM NH4NO3 vs. 100mM Mannitol
  misc_feature: MA Experiment ID: 20000632 Result: Down-regulated in Transcription
  misc_feature: MA Experiment 20000632 PARAMETER Experiment Name: Zm_Herbicide-Treatments_P Parameter: Timepoint (hr) Value: 4
  misc_feature: MA Experiment 20000632 PARAMETER Experiment Name: Zm_Herbicide-Treatments_P Parameter: Tissue Value: Aerial
  misc_feature: MA Experiment 20000632 PARAMETER Experiment Name: Zm_Herbicide-Treatments_P Parameter: Treatment Value: Glean vs. No Treatment
  misc_feature: MA Experiment ID: 20001614 Result: Up-regulated in Transcription
  misc_feature: MA Experiment 20001614 PARAMETER Experiment Name: Zm_50ppm_KNO3_L-to-H_P Parameter: Age (day) Value: 21
  misc_feature: MA Experiment 20001614 PARAMETER Experiment Name: Zm_50ppm_KNO3_L-to-H_P Parameter: Organism Value: Zea mays
  misc_feature: MA Experiment 20001614 PARAMETER Experiment Name: Zm_50ppm_KNO3_L-to-H_P Parameter: Plant Line Value: 35A19
  misc_feature: MA Experiment 20001614 PARAMETER Experiment Name: Zm_50ppm_KNO3_L-to-H_P Parameter: Timepoint (hr) Value: 48
  misc_feature: MA Experiment 20001614 PARAMETER Experiment Name: Zm_50ppm_KNO3_L-to-H_P Parameter: Tissue Value: Roots
  misc_feature: MA Experiment 20001614 PARAMETER Experiment Name: Zm_50ppm_KNO3_L-to-H_P Parameter: Treatment Value: 50ppm KNO3 vs. 50ppm KCl
attcattgggggcatttgctacaccaccacacccacaccccatcccagcacacaacaagcagcctggtttacggtagctgctagcaaaacaatggagaaccctgctccgagcatcgtagtggccatcgccgcacccgtggcggctgagttcgtgaaactcaccttccgtgccctgtatatgcgccgggctggtcctggcagcagggagatgactgtgccgggaaggccatccgaccagctgggcaggagagtcgtcactgacagccccgtgtacgacggccgtggcgccgacgcccgcctcgtggctcgcatacagggagtcacggtcctggtcggtaacgcagacgccttgttcaccatggtgttcgaaaccgacaggctaaagggctccacgctcgtcatcaacggaatggtcacggatgggtcagacgaatgggcgatctacggcggaaccggggtgttcgccatggccaccggtgtcatgaagagaagaaaccttgccggcggtagcaacgacgggaactctgacgagcttgccctggaagttttctgcccggtgtttggcgcatcacagcaaccaattagcaagcagcaggagtccatctcctccgtcaccaagatcggactatggggcggacagggagggtcggcacaggacatcacggcagagcagccaccacggcgtctgcacagcatcaccgtccgcgctggcgttgccgtcgactccatcgagttcacctacaccgacgacgctgggcagaggcgcactgctgggcggtggggtggacttggcggcaatgttcgaacgatcgaccttggcgacgcagaggatgtcagggaagtctcgggaacatacggcgcatttgaaggtgccattacgctgacctcgctcaggctcgtcaccagcagcagaacctggggcccctggggggtcgagaacgggacgcgtttctccatcacggcgcccaacggcagcagcatcgcgggattctatgcgcgggcgggaaccaggctcgtcgacgctatcggtgtttacatacgtccagtggtgccaggcaggcctcggtgaacaagcgagccgagctcgctcgtattacgagctgtaggattatggttcggcttgacttgatgtaggctacctgctacatcatgctcgattcactatcctttaattcggtcatcgtcgtcgtcttgtctcgtgtcaaataaagctctcttgtgcctatatacggctctcatggttgtgccgtgtctctatatgttagtgtttatgtatatgtggagatcaaataatggccttgcaataatgatcaaagactcgct

SEQ ID NO: 1719 - protein, 355 aa, Zea mays subsp. mays
  peptide (1)..(355): Ceres Seq. ID no. 12369037
  misc_feature (215)..(347): Pfam Name: Jacalin-like lectin domain Pfam Description: Jacalin-like lectin domain
  misc_feature (203)..(348): Homolog of NCBI NO: 134190 NR Description: Salt-stress induced protein (Salt protein)
  misc_feature (203)..(348): Homolog of NCBI NO: 34915016 NR Description: putative Mannose-Binding Rice Lectin
  misc_feature (201)..(348): Homolog of NCBI NO: 38344523 NR Description: OSJNBa0016N04.16 [Oryza sativa (japonica
  misc_feature (60)..(349): Homolog of NCBI NO: 21311647 NR Description: hessian fly response gene 1 protein [Triticum
  misc_feature (45)..(345): Homolog of NCBI NO: 16151819 NR Description: VER2 [Triticum aestivum]
  misc_feature (24)..(350): Homolog of NCBI NO: 7489661 NR Description: benzothiadiazole-induced protein (clone WCI-1) -
  misc_feature (45)..(335): Homolog of NCBI NO: 7489384 NR Description: jacalin homolog - barley
  misc_feature (45)..(349): Homolog of NCBI NO: 7489385 NR Description: jakalin homolog - barley
  misc_feature (45)..(349): Homolog of NCBI NO: 7489383 NR Description: jacalin homolog - barley
  misc_feature (45)..(347): Homolog of NCBI NO: 9313027 NR Description: beta-glucosidase aggregating factor precursor
FIGGICYTTTPTPHPSTQQAAWFTVAASKTMENPAPSIVVAIAAPVAAEFVKLTFRALYMRRAGPGSREMTVPGRPSDQLGRRVVTDSPVYDGRGADARLVARIQGVTVLVGNADALFTMVFETDRLKGSTLVINGMVTDGSDEWAIYGGTGVFAMATGVMKRRNLAGGSNDGNSDELALEVFCPVFGASQQPISKQQESISSVTKIGLWGGQGGSAQDITAEQPPRRLHSITVRAGVAVDSIEFTYTDDAGQRRTAGRWGGLGGNVRTIDLGDAEDVREVSGTYGAFEGAITLTSLRLVTSSRTWGPWGVENGTRFSITAPNGSSIAGFYARAGTRLVDAIGVYIRPVVPGRPR

SEQ ID NO: 1720 - protein, 325 aa, Zea mays subsp. mays
  peptide (1)..(325): Ceres Seq. ID no. 12369038
  misc_feature (185)..(317): Pfam Name: Jacalin-like lectin domain Pfam Description: Jacalin-like lectin domain
  misc_feature (173)..(318): Homolog of NCBI NO: 134190 NR Description: Salt-stress induced protein (Salt protein)
  misc_feature (173)..(318): Homolog of NCBI NO: 34915016 NR Description: putative Mannose-Binding Rice Lectin
  misc_feature (171)..(318): Homolog of NCBI NO: 38344523 NR Description: OSJNBa0016N04.16 [Oryza sativa (japonica
  misc_feature (30)..(319): Homolog of NCBI NO: 21311647 NR Description: hessian fly response gene 1 protein [Triticum
  misc_feature (15)..(315): Homolog of NCBI NO: 16151819 NR Description: VER2 [Triticum aestivum]
  misc_feature (1)..(320): Homolog of NCBI NO: 7489661 NR Description: benzothiadiazole-induced protein (clone WCI-1) -
  misc_feature (15)..(305): Homolog of NCBI NO: 7489384 NR Description: jacalin homolog - barley
  misc_feature (15)..(319): Homolog of NCBI NO: 7489385 NR Description: jakalin homolog - barley
  misc_feature (15)..(319): Homolog of NCBI NO: 7489383 NR Description: jacalin homolog - barley
  misc_feature (15)..(317): Homolog of NCBI NO: 9313027 NR Description: beta-glucosidase aggregating factor precursor
MENPAPSIVVAIAAPVAAEFVKLTFRALYMRRAGPGSREMTVPGRPSDQLGRRVVTDSPVYDGRGADARLVARIQGVTVLVGNADALFTMVFETDRLKGSTLVINGMVTDGSDEWAIYGGTGVFAMATGVMKRRNLAGGSNDGNSDELALEVFCPVFGASQQPISKQQESISSVTKIGLWGGQGGSAQDITAEQPPRRLHSITVRAGVAVDSIEFTYTDDAGQRRTAGRWGGLGGNVRTIDLGDAEDVREVSGTYGAFEGAITLTSLRLVTSSRTWGPWGVENGTRFSITAPNGSSIAGFYARAGTRLVDAIGVYIRPVVPGRPR

SEQ ID NO: 1721 - protein, 296 aa, Zea mays subsp. mays
  peptide (1)..(296): Ceres Seq. ID no. 12369039
  misc_feature (156)..(288): Pfam Name: Jacalin-like lectin domain Pfam Description: Jacalin-like lectin domain
  misc_feature (144)..(289): Homolog of NCBI NO: 134190 NR Description: Salt-stress induced protein (Salt protein)
  misc_feature (144)..(289): Homolog of NCBI NO: 34915016 NR Description: putative Mannose-Binding Rice Lectin
  misc_feature (142)..(289): Homolog of NCBI NO: 38344523 NR Description: OSJNBa0016N04.16 [Oryza sativa (japonica
  misc_feature (1)..(290): Homolog of NCBI NO: 21311647 NR Description: hessian fly response gene 1 protein [Triticum
  misc_feature (1)..(286): Homolog of NCBI NO: 16151819 NR Description: VER2 [Triticum aestivum]
  misc_feature (1)..(291): Homolog of NCBI NO: 7489661 NR Description: benzothiadiazole-induced protein (clone WCI-1) -
  misc_feature (1)..(276): Homolog of NCBI NO: 7489384 NR Description: jacalin homolog - barley
  misc_feature (1)..(290): Homolog of NCBI NO: 7489385 NR Description: jakalin homolog - barley
  misc_feature (1)..(290): Homolog of NCBI NO: 7489383 NR Description: jacalin homolog - barley
  misc_feature (1)..(288): Homolog of NCBI NO: 9313027 NR Description: beta-glucosidase aggregating factor precursor
MRRAGPGSREMTVPGRPSDQLGRRVVTDSPVYDGRGADARLVARIQGVTVLVGNADALFTMVFETDRLKGSTLVINGMVTDGSDEWAIYGGTGVFAMATGVMKRRNLAGGSNDGNSDELALEVFCPVFGASQQPISKQQESISSVTKIGLWGGQGGSAQDITAEQPPRRLHSITVRAGVAVDSIEFTYTDDAGQRRTAGRWGGLGGNVRTIDLGDAEDVREVSGTYGAFEGAITLTSLRLVTSSRTWGPWGVENGTRFSITAPNGSSIAGFYARAGTRLVDAIGVYIRPVVPGRPR

SEQ ID NO: 1722 - DNA, 1413 bp, Zea mays subsp. mays
  misc_feature (1)..(1413): Ceres Seq. ID no. 12405846
  misc_feature: MA Experiment ID: 108535 Result: Up-regulated in Transcription
  misc_feature: MA Experiment 108535 PARAMETER Experiment Name: Zm_Meristem_P Parameter: Age (day) Value: 8
  misc_feature: MA Experiment 108535 PARAMETER Experiment Name: Zm_Meristem_P Parameter: Organism Value: Zea mays
  misc_feature: MA Experiment 108535 PARAMETER Experiment Name: Zm_Meristem_P Parameter: Plant Line Value: 35A19
  misc_feature: MA Experiment 108535 PARAMETER Experiment Name: Zm_Meristem_P Parameter: Tissue Value: Root Meristem vs. Above Root Meristem
  misc_feature: MA Experiment ID: 108544 Result: Down-regulated in Transcription
  misc_feature: MA Experiment ID: 108556 Result: Down-regulated in Transcription
  misc_feature: MA Experiment 108556 PARAMETER Experiment Name: Zm_Drought_P Parameter: Age (day) Value: 9
  misc_feature: MA Experiment 108556 PARAMETER Experiment Name: Zm_Drought_P Parameter: Organism Value: Zea mays
  misc_feature: MA Experiment 108556 PARAMETER Experiment Name: Zm_Drought_P Parameter: Plant Line Value: 35A19
  misc_feature: MA Experiment 108556 PARAMETER Experiment Name: Zm_Drought_P Parameter: Timepoint (hr) Value: 24
  misc_feature: MA Experiment 108556 PARAMETER Experiment Name: Zm_Drought_P Parameter: Tissue Value: Aerial
  misc_feature: MA Experiment 108556 PARAMETER Experiment Name: Zm_Drought_P Parameter: Treatment Value: Drought vs. No Drought
  misc_feature: MA Experiment ID: 20000488 Result: Up-regulated in Transcription
  misc_feature: MA Experiment 20000488 PARAMETER Experiment Name: Zm_50mM_NH4NO3_L_to_H_P Parameter: Organism Value: Zea mays
  misc_feature: MA Experiment 20000488 PARAMETER Experiment Name: Zm_50mM_NH4NO3_L_to_H_P Parameter: Timepoint (hr) Value: 8
  misc_feature: MA Experiment 20000488 PARAMETER Experiment Name: Zm_50mM_NH4NO3_L_to_H_P Parameter: Tissue Value: Leaves
  misc_feature: MA Experiment 20000488 PARAMETER Experiment Name: Zm_50mM_NH4NO3_L_to_H_P Parameter: Treatment Value: 50mM NH4NO3 vs. 100mM Mannitol
  misc_feature: MA Experiment ID: 20000492 Result: Up-regulated in Transcription
  misc_feature: MA Experiment 20000492 PARAMETER Experiment Name: Zm_Hybrid_Seed_Dev_P Parameter: DAP Value: 12
  misc_feature: MA Experiment 20000492 PARAMETER Experiment Name: Zm_Hybrid_Seed_Dev_P Parameter: Organism Value: Zea mays
  misc_feature: MA Experiment 20000492 PARAMETER Experiment Name: Zm_Hybrid_Seed_Dev_P Parameter: Plant Line Value: 35A19
  misc_feature: MA Experiment 20000492 PARAMETER Experiment Name: Zm_Hybrid_Seed_Dev_P Parameter: Tissue Value: Fert Kernel vs. Unfert Floret
  misc_feature: MA Experiment ID: 20001606 Result: Up-regulated in Transcription
  misc_feature: MA Experiment 20001606 PARAMETER Experiment Name: Zm_50ppm_KNO3_L-to-H_P Parameter: Age (day) Value: 19
  misc_feature: MA Experiment 20001606 PARAMETER Experiment Name: Zm_50ppm_KNO3_L-to-H_P Parameter: Organism Value: Zea mays
  misc_feature: MA Experiment 20001606 PARAMETER Experiment Name: Zm_50ppm_KNO3_L-to-H_P Parameter: Plant Line Value: 35A19
  misc_feature: MA Experiment 20001606 PARAMETER Experiment Name: Zm_50ppm_KNO3_L-to-H_P Parameter: Timepoint (hr) Value: 8
  misc_feature: MA Experiment 20001606 PARAMETER Experiment Name: Zm_50ppm_KNO3_L-to-H_P Parameter: Tissue Value: Shoots
  misc_feature: MA Experiment 20001606 PARAMETER Experiment Name: Zm_50ppm_KNO3_L-to-H_P Parameter: Treatment Value: 50ppm KNO3 vs. 50ppm KCl
atcgaaaaatcggcgtcgccatctccggagtgccacgcctaggagctattctctctagtactgcggcgacttcactccaagcctcccccttcagcgatcagcacacatcacgtaaagcgcaaccaaatgatttccaccaccgtcgctgctcaccccgccaccgtcacagcgctgcggcgaatgtacccgcttcgccctcgccagccactctgtgctccaatcttcacggcggcgacgaggcagtgcatggctacggcgaagccctcggtcacaaacgcgctcgctaacctatccgttgagagcgcccccgcggcgcttcccaagctttcgttcccgatactggtgaatagttgcactgggaaaatggggaaggctgttgctgaagcagctgtctcggctggtcttcagttagttcctgtatcattcagtgccattgaggtccctgatcgaaagattgaaatatgtgatagagaaatttttattcatgacccatctgaaagtgaaaaaattctgcctaccattgttaaagaatacccaaatgtcatagttgtagattacactgtgcctgatgctgttaatgcaaatgctgaactctattgcaaatttggtttgccatttgtaatgggcacaactggtggaaataggcaactcttgcacaaaactgtgcatgatgcgaatatctacgctgtgatatcccctcagatggggaagcaggttgttgcttttcttgctgccatggaaattatgtcagagcaatttcctggtgcattttcaggttacaagctggaggtcatggagtctcatcaagcaacaaaattggacatttctgggactgccaaggctgttatctcttgttttcagaagttgggtgtatcgtttgacatgaatgaggtaaagcaagttagggatcctgaggagcaggtaacgttagtgggtgtcccagaagaacatctcgggggccatgccttccacatgtaccatctcacttcgcctgatgggacagtttcgtttgagttccagcacaatgtatgtggccgttcaatatacgcagaaggaactgttgatgcagctatgtttctctacacaaagattcaatcgggtgcgagcaagaaattgtatgacatgattgatgtcttgagagaagggaacatgagatgaggtccatgttggcgtcagatgagctttcatgtaccaatttgcaagctcaattccaccgtgaattaggttacttttacaatgtacccttcccaatttaccagttaactcactttcagttttgaattggctgcttcaatgatggaaggtactccgttccagagtgtatgcaattttagtttctctaggtatattgattttggcgttttgctatacacctatatgcaatctatagattgtagtaaaaaaaatgtattc

SEQ ID NO: 1723 - protein, 343 aa, Zea mays subsp. mays
  peptide (1)..(343): Ceres Seq. ID no. 12405847
  misc_feature (196)..(338): Pfam Name: Dihydrodipicolinate reductase, C-terminus Pfam Description: Dihydrodipicolinate reductase, C-terminus
  misc_feature (58)..(343): Homolog of NCBI NO: 18411368 NR Description: putative protein
  misc_feature (72)..(337): Homolog of NCBI NO: 23052186 NR Description: hypothetical protein [Methanosarcina barkeri]
  misc_feature (58)..(321): Homolog of NCBI NO: 11357603 NR Description: hypothetical protein F24G16.160 - Arabidopsis
  misc_feature (47)..(322): Homolog of NCBI NO: 7486478 NR Description: hypothetical protein At2g44040 [imported] -
  misc_feature (47)..(343): Homolog of NCBI NO: 18406430 NR Description: expressed protein
MISTTVAAHPATVTALRRMYPLRPRQPLCAPIFTAATRQCMATAKPSVTNALANLSVESAPAALPKLSFPILVNSCTGKMGKAVAEAAVSAGLQLVPVSFSAIEVPDRKIEICDREIFIHDPSESEKILPTIVKEYPNVIVVDYTVPDAVNANAELYCKFGLPFVMGTTGGNRQLLHKTVHDANIYAVISPQMGKQVVAFLAAMEIMSEQFPGAFSGYKLEVMESHQATKLDISGTAKAVISCFQKLGVSFDMNEVKQVRDPEEQVTLVGVPEEHLGGHAFHMYHLTSPDGTVSFEFQHNVCGRSIYAEGTVDAAMFLYTKIQSGASKKLYDMIDVLREGNMR

SEQ ID NO: 1724 - protein, 325 aa, Zea mays subsp. mays
  peptide (1)..(325): Ceres Seq. ID no. 12405848
  misc_feature (178)..(320): Pfam Name: Dihydrodipicolinate reductase, C-terminus Pfam Description: Dihydrodipicolinate reductase, C-terminus
  misc_feature (54)..(319): Homolog of NCBI NO: 23052186 NR Description: hypothetical protein [Methanosarcina barkeri]
  misc_feature (40)..(303): Homolog of NCBI NO: 11357603 NR Description: hypothetical protein F24G16.160 - Arabidopsis
  misc_feature (29)..(304): Homolog of NCBI NO: 7486478 NR Description: hypothetical protein At2g44040 [imported] -
  misc_feature (29)..(325): Homolog of NCBI NO: 18406430 NR Description: expressed protein
  misc_feature (40)..(325): Homolog of NCBI NO: 18411368 NR Description: putative protein
MYPLRPRQPLCAPIFTAATRQCMATAKPSVTNALANLSVESAPAALPKLSFPILVNSCTGKMGKAVAEAAVSAGLQLVPVSFSAIEVPDRKIEICDREIFIHDPSESEKILPTIVKEYPNVIVVDYTVPDAVNANAELYCKFGLPFVMGTTGGNRQLLHKTVHDANIYAVISPQMGKQVVAFLAAMEIMSEQFPGAFSGYKLEVMESHQATKLDISGTAKAVISCFQKLGVSFDMNEVKQVRDPEEQVTLVGVPEEHLGGHAFHMYHLTSPDGTVSFEFQHNVCGRSIYAEGTVDAAMFLYTKIQSGASKKLYDMIDVLREGNMR

SEQ ID NO: 1725 - protein, 303 aa, Zea mays subsp. mays
  peptide (1)..(303): Ceres Seq. ID no. 12405849
  misc_feature (156)..(298): Pfam Name: Dihydrodipicolinate reductase, C-terminus Pfam Description: Dihydrodipicolinate reductase, C-terminus
  misc_feature (32)..(297): Homolog of NCBI NO: 23052186 NR Description: hypothetical protein [Methanosarcina barkeri]
  misc_feature (18)..(281): Homolog of NCBI NO: 11357603 NR Description: hypothetical protein F24G16.160 - Arabidopsis
  misc_feature (7)..(282): Homolog of NCBI NO: 7486478 NR Description: hypothetical protein At2g44040 [imported] -
  misc_feature (7)..(303): Homolog of NCBI NO: 18406430 NR Description: expressed protein
  misc_feature (18)..(303): Homolog of NCBI NO: 18411368 NR Description: putative protein
MATAKPSVTNALANLSVESAPAALPKLSFPILVNSCTGKMGKAVAEAAVSAGLQLVPVSFSAIEVPDRKIEICDREIFIHDPSESEKILPTIVKEYPNVIVVDYTVPDAVNANAELYCKFGLPFVMGTTGGNRQLLHKTVHDANIYAVISPQMGKQVVAFLAAMEIMSEQFPGAFSGYKLEVMESHQATKLDISGTAKAVISCFQKLGVSFDMNEVKQVRDPEEQVTLVGVPEEHLGGHAFHMYHLTSPDGTVSFEFQHNVCGRSIYAEGTVDAAMFLYTKIQSGASKKLYDMIDVLREGNMR

SEQ ID NO: 1726 - DNA, 1243 bp, Zea mays subsp. mays
  misc_feature (1)..(1243): Ceres Seq. ID no. 12348925
  misc_feature: MA Experiment ID: 20000492 Result: Down-regulated in Transcription
  misc_feature: MA Experiment 20000492 PARAMETER Experiment Name: Zm_Hybrid_Seed_Dev_P Parameter: DAP Value: 12
  misc_feature: MA Experiment 20000492 PARAMETER Experiment Name: Zm_Hybrid_Seed_Dev_P Parameter: Organism Value: Zea mays
  misc_feature: MA Experiment 20000492 PARAMETER Experiment Name: Zm_Hybrid_Seed_Dev_P Parameter: Plant Line Value: 35A19
  misc_feature: MA Experiment 20000492 PARAMETER Experiment Name: Zm_Hybrid_Seed_Dev_P Parameter: Tissue Value: Fert Kernel vs. Unfert Floret
aaaccacccgaccccacatggccacatccgcgatgcccacgccgtgagcccgtgaggcgcgccgctggagccgccgcagccgttactatgacctcgccggcccccacctcctggttctccggcctctcgcgctcctcctccaccatggccggcggcgtcgcctcggcctcggcctccgcctccgcctccggccccgcctccgcgttcctccccgacgcgcccaagtccgtaatcggcgccggctccggaggaggcaagcggaatcatctctgcggggcgctgttcaagtacggccccaaatctgcgcaggtagcattcaggactggggattttaaccatcaggtgatcttcattggtggcctcacagatgggcttttagctactgattacttggaaccattgtcacttgcattggaggttgagaaatggtccttggtacagccattgctttcttcatcatacactggatatggaatttccagcttacagcaagatgcgttagaactagagcaactcatcagttacctaataaataaggaaaattctgaaggagtaatattgcttggtcatagtactggatgccaggatattgtgcattatatgcgcacaaactttgcctgttcgaaagcggtttctggggtcatcttgcaggccccagtaagtgacagggagtatagagcaactcttccggaaacagctgaaatgatagacctggcagccaaattgattagcgagggccgtggaatggatttgatgcctagaaaagcaaactcagatgctcctattactgcctacaggtaccactccctttgttcatatatgggtgatgatgacatgttcagttcagatctaagtgaagatcagctgaggcagagacttggtcatgtcaaccacacagtgccaggttattttttcaatgggggatgaatatgtgcctgaatatgttgataagagggctctagtagacaggctatgtagggcactgggaggtgcagagaaagtcgagatagaatggggaaaccatgctctgtccaacagagtgcaagaagcagttgtggccattgtagattttgtcaagagggaggggcccaaaggctgggatgacccatggagctagatacagcagttataatctcatttgtaactagtttgtgcttttcctcttctctcttttctccaattgtaacttctttcttttgcattattattggtccatttttcaatagtgatatgctatttttcc

SEQ ID NO: 1727 - protein, 308 aa, Zea mays subsp. mays
  peptide (1)..(308): Ceres Seq. ID no. 12348926
  misc_feature (113)..(201): Homolog of NCBI NO: 40739433 NR Description: hypothetical protein AN6239.2 [Aspergillus
  misc_feature (87)..(293): Homolog of NCBI NO: 19173345 NR Description: hypothetical protein [Encephalitozoon cuniculi]
  misc_feature (275)..(298): Homolog of NCBI NO: 40739421 NR Description: hypothetical protein AN6793.2 [Aspergillus
  misc_feature (113)..(201): Homolog of NCBI NO: 40739421 NR Description: hypothetical protein AN6793.2 [Aspergillus
  misc_feature (92)..(201): Homolog of NCBI NO: 40741836 NR Description: hypothetical protein AN4948.2 [Aspergillus
  misc_feature (143)..(297): Homolog of NCBI NO: 32403674 NR Description: hypothetical protein [Neurospora crassa]
  misc_feature (115)..(296): Homolog of NCBI NO: 19114904 NR Description: hypothetical protein; sequence orphan
  misc_feature (30)..(279): Homolog of NCBI NO: 34900046 NR Description: contains EST C72879(E2411)~similar to Arabidopsis
  misc_feature (17)..(308): Homolog of NCBI NO: 15239639 NR Description: putative protein
  misc_feature (30)..(308): Homolog of NCBI NO: 34393295 NR Description: unknown protein [Oryza sativa (japonica
KPPDPTWPHPRCPRREPVRRAAGAAAAVTMTSPAPTSWFSGLSRSSSTMAGGVASASASASASGPASAFLPDAPKSVIGAGSGGGKRNHLCGALFKYGPKSAQVAFRTGDFNHQVIFIGGLTDGLLATDYLEPLSLALEVEKWSLVQPLLSSSYTGYGISSLQQDALELEQLISYLINKENSEGVILLGHSTGCQDIVHYMRTNFACSKAVSGVILQAPVSDREYRATLPETAEMIDLAAKLISEGRGMDLMPRKANSDAPITAYRYHSLCSYMGDDDMFSSDLSEDQLRQRLGHVNHTVPGYFFNGG

SEQ ID NO: 1728 - protein, 279 aa, Zea mays subsp. mays
  peptide (1)..(279): Ceres Seq. ID no. 12348927
  misc_feature (84)..(172): Homolog of NCBI NO: 40739433 NR Description: hypothetical protein AN6239.2 [Aspergillus
  misc_feature (58)..(264): Homolog of NCBI NO: 19173345 NR Description: hypothetical protein [Encephalitozoon cuniculi]
  misc_feature (246)..(269): Homolog of NCBI NO: 40739421 NR Description: hypothetical protein AN6793.2 [Aspergillus
  misc_feature (84)..(172): Homolog of NCBI NO: 40739421 NR Description: hypothetical protein AN6793.2 [Aspergillus
  misc_feature (63)..(172): Homolog of NCBI NO: 40741836 NR Description: hypothetical protein AN4948.2 [Aspergillus
  misc_feature (114)..(268): Homolog of NCBI NO: 32403674 NR Description: hypothetical protein [Neurospora crassa]
  misc_feature (86)..(267): Homolog of NCBI NO: 19114904 NR Description: hypothetical protein; sequence orphan
  misc_feature (1)..(250): Homolog of NCBI NO: 34900046 NR Description: contains EST C72879(E2411)~similar to Arabidopsis
  misc_feature (1)..(279): Homolog of NCBI NO: 15239639 NR Description: putative protein
  misc_feature (1)..(279): Homolog of NCBI NO: 34393295 NR Description: unknown protein [Oryza sativa (japonica
MTSPAPTSWFSGLSRSSSTMAGGVASASASASASGPASAFLPDAPKSVIGAGSGGGKRNHLCGALFKYGPKSAQVAFRTGDFNHQVIFIGGLTDGLLATDYLEPLSLALEVEKWSLVQPLLSSSYTGYGISSLQQDALELEQLISYLINKENSEGVILLGHSTGCQDIVHYMRTNFACSKAVSGVILQAPVSDREYRATLPETAEMIDLAAKLISEGRGMDLMPRKANSDAPITAYRYHSLCSYMGDDDMFSSDLSEDQLRQRLGHVNHTVPGYFFNGG

SEQ ID NO: 1729 - protein, 260 aa, Zea mays subsp. mays
  peptide (1)..(260): Ceres Seq. ID no. 12348928
  misc_feature (65)..(153): Homolog of NCBI NO: 40739433 NR Description: hypothetical protein AN6239.2 [Aspergillus
  misc_feature (39)..(245): Homolog of NCBI NO: 19173345 NR Description: hypothetical protein [Encephalitozoon cuniculi]
  misc_feature (227)..(250): Homolog of NCBI NO: 40739421 NR Description: hypothetical protein AN6793.2 [Aspergillus
  misc_feature (65)..(153): Homolog of NCBI NO: 40739421 NR Description: hypothetical protein AN6793.2 [Aspergillus
  misc_feature (44)..(153): Homolog of NCBI NO: 40741836 NR Description: hypothetical protein AN4948.2 [Aspergillus
  misc_feature (95)..(249): Homolog of NCBI NO: 32403674 NR Description: hypothetical protein [Neurospora crassa]
  misc_feature (67)..(248): Homolog of NCBI NO: 19114904 NR Description: hypothetical protein; sequence orphan
  misc_feature (1)..(231): Homolog of NCBI NO: 34900046 NR Description: contains EST C72879(E2411)~similar to Arabidopsis
  misc_feature (1)..(260): Homolog of NCBI NO: 15239639 NR Description: putative protein
  misc_feature (1)..(260): Homolog of NCBI NO: 34393295 NR Description: unknown protein [Oryza sativa (japonica
MAGGVASASASASASGPASAFLPDAPKSVIGAGSGGGKRNHLCGALFKYGPKSAQVAFRTGDFNHQVIFIGGLTDGLLATDYLEPLSLALEVEKWSLVQPLLSSSYTGYGISSLQQDALELEQLISYLINKENSEGVILLGHSTGCQDIVHYMRTNFACSKAVSGVILQAPVSDREYRATLPETAEMIDLAAKLISEGRGMDLMPRKANSDAPITAYRYHSLCSYMGDDDMFSSDLSEDQLRQRLGHVNHTVPGYFFNGG

SEQ ID NO: 1730 - DNA, 1431 bp, Zea mays subsp. mays
  misc_feature (1)..(1431): Ceres Seq. ID no. 13498943
  misc_feature: MA Experiment ID: 108543 Result: Up-regulated in Transcription
cccaaatcgacctgggctggacccagccgcgccccgtctgcctcctgcttctctctccgcttccgcttcctgcgcctccaggctccacttctccgctcggcagtctgcactggaaggacagcatgtcggcctcggcgtcgtcaccggcggcggcggcgggcgatgagaagcaggaggcggcgcccgtcaggcgctgcaagggcgtcaacgacctcgacaaggtcgttctccgcgaggtccggggcagctccgcagaggtgtacttgtatggtgggcatgtgacatcatggaaagatgagcatggagatgaattactttttgttagcaataaggctattttcaagcctccaaaagctatacgtggaggaataccaatatgctttccgcagttctccaactttgggaatctggaaccacatggatttgcaaggaataggacatggagtgttgatgatgatcctccgccatttccagtgccaacctccaatagcgcttatattgacttgatcctcaaacctactgaagatgatttgaagatctggcctcatagttttgaataccgcctgagggttgcacttagtcctggtggtgatttgatgctaacttcacgtataagaaacactaatgcagacgggaagccattctctttcacttttgcataccacacatacttcaagatttctgatatcagtgaggtgcgagtagaaggattggaaactctggattacctagacaacttacaagatagagctcgttccactgaacaaggcgatgcaattgtttttgaatccgaactggacagaatatatctgggcacaccatcgaaaattgccattattgatcatgagaagaaaagaacatttgttgtgaggaaaggaggccttcctgatgctgttgtttggaatccctgggataaaaaagcaaaggctatgtcagattttggggatgatgaatataaacgaatggtatgtgtggaggcggctgctattgaaaagactgtcactctgaagcctggtgaagagtggactggaaagttggaactttctgctgtgccatctagctattacagtggtcagctagaccctgaccgtgtgattcaggattccactgtcccggaggactccatcagctagtccttattctatttttgcaggtagagcattgtatcattatgcataagagatgctggcaacaagggctgtccacatgtttcttccattctgttcaaatcttcggtgtttttttattccgaatgcatatccgaaccaaggaatgtgaaattggtttccgctttttgaggatctatgtagcataatggataagtcggtgtttcgtaccctatttagggatgcttgaagcaagaaacatcttcatgggttgtaaaataaaagaaaaattctctttattatatttgatcaattcttttgcctc

SEQ ID NO: 1731 - protein, 376 aa, Zea mays subsp. mays
  peptide (1)..(376): Ceres Seq. ID no. 13498944
  misc_feature (72)..(348): Pfam Name: Aldose 1-epimerase Pfam Description: Aldose 1-epimerase
  misc_feature (68)..(365): Homolog of NCBI NO: 18417396 NR Description: aldose 1-epimerase family [Arabidopsis thaliana]
  misc_feature (48)..(353): Homolog of NCBI NO: 15236591 NR Description: aldose 1-epimerase family [Arabidopsis thaliana]
  misc_feature (69)..(365): Homolog of NCBI NO: 16612258 NR Description: AT3g01590/F4P13_13 [Arabidopsis thaliana]
  misc_feature (69)..(365): Homolog of NCBI NO: 18395868 NR Description: aldose 1-epimerase family [Arabidopsis thaliana]
  misc_feature (50)..(360): Homolog of NCBI NO: 15233165 NR Description: aldose 1-epimerase family [Arabidopsis thaliana]
  misc_feature (41)..(365): Homolog of NCBI NO: 2501555 NR Description: POSSIBLE APOSPORY-ASSOCIATED PROTEIN C
  misc_feature (43)..(366): Homolog of NCBI NO: 40253263 NR Description: putative Aldose 1-epimerase
  misc_feature (66)..(366): Homolog of NCBI NO: 15242099 NR Description: aldose 1-epimerase family [Arabidopsis thaliana]
  misc_feature (43)..(366): Homolog of NCBI NO: 38344152 NR Description: OSJNBa0041A02.19 [Oryza sativa (japonica
  misc_feature (40)..(376): Homolog of NCBI NO: 19387263 NR Description: putative apospory-associated protein C
QIDLGWTQPRPVCLLLLSPLPLPAPPGSTSPLGSLHWKDSMSASASSPAAAAGDEKQEAAPVRRCKGVNDLDKVVLREVRGSSAEVYLYGGHVTSWKDEHGDELLFVSNKAIFKPPKAIRGGIPICFPQFSNFGNLEPHGFARNRTWSVDDDPPPFPVPTSNSAYIDLILKPTEDDLKIWPHSFEYRLRVALSPGGDLMLTSRIRNTNADGKPFSFTFAYHTYFKISDISEVRVEGLETLDYLDNLQDRARSTEQGDAIVFESELDRIYLGTPSKIAIIDHEKKRTFVVRKGGLPDAVVWNPWDKKAKAMSDFGDDEYKRMVCVEAAAIEKTVTLKPGEEWTGKLELSAVPSSYYSGQLDPDRVIQDSTVPEDSIS

SEQ ID NO: 1732 - protein, 336 aa, Zea mays subsp. mays
  peptide (1)..(336): Ceres Seq. ID no. 13498945
  misc_feature (32)..(308): Pfam Name: Aldose 1-epimerase Pfam Description: Aldose 1-epimerase
  misc_feature (28)..(325): Homolog of NCBI NO: 18417396 NR Description: aldose 1-epimerase family [Arabidopsis thaliana]
  misc_feature (8)..(313): Homolog of NCBI NO: 15236591 NR Description: aldose 1-epimerase family [Arabidopsis thaliana]
  misc_feature (29)..(325): Homolog of NCBI NO: 16612258 NR Description: AT3g01590/F4P13_13 [Arabidopsis thaliana]
  misc_feature (29)..(325): Homolog of NCBI NO: 18395868 NR Description: aldose 1-epimerase family [Arabidopsis thaliana]
  misc_feature (10)..(320): Homolog of NCBI NO: 15233165 NR Description: aldose 1-epimerase family [Arabidopsis thaliana]
  misc_feature (1)..(325): Homolog of NCBI NO: 2501555 NR Description: POSSIBLE APOSPORY-ASSOCIATED PROTEIN C
  misc_feature (3)..(326): Homolog of NCBI NO: 40253263 NR Description: putative Aldose 1-epimerase
  misc_feature (26)..(326): Homolog of NCBI NO: 15242099 NR Description: aldose 1-epimerase family [Arabidopsis thaliana]
  misc_feature (3)..(326): Homolog of NCBI NO: 38344152 NR Description: OSJNBa0041A02.19 [Oryza sativa (japonica
  misc_feature (1)..(336): Homolog of NCBI NO: 19387263 NR Description: putative apospory-associated protein C
MSASASSPAAAAGDEKQEAAPVRRCKGVNDLDKVVLREVRGSSAEVYLYGGHVTSWKDEHGDELLFVSNKAIFKPPKAIRGGIPICFPQFSNFGNLEPHGFARNRTWSVDDDPPPFPVPTSNSAYIDLILKPTEDDLKIWPHSFEYRLRVALSPGGDLMLTSRIRNTNADGKPFSFTFAYHTYFKISDISEVRVEGLETLDYLDNLQDRARSTEQGDAIVFESELDRIYLGTPSKIAIIDHEKKRTFVVRKGGLPDAVVWNPWDKKAKAMSDFGDDEYKRMVCVEAAAIEKTVTLKPGEEWTGKLELSAVPSSYYSGQLDPDRVIQDSTVPEDSIS

SEQ ID NO: 1733 - DNA, 1673 bp, Zea mays subsp. mays
  misc_feature (1)..(1673): Ceres Seq. ID no. 12387134
  misc_feature: MA Experiment ID: 108504 Result: Down-regulated in Transcription
  misc_feature: MA Experiment 108504 PARAMETER Experiment Name: Zm_Drought_P Parameter: Age (day) Value: 8
  misc_feature: MA Experiment 108504 PARAMETER Experiment Name: Zm_Drought_P Parameter: Organism Value: Zea mays
  misc_feature: MA Experiment 108504 PARAMETER Experiment Name: Zm_Drought_P Parameter: Plant Line Value: 35A19
  misc_feature: MA Experiment 108504 PARAMETER Experiment Name: Zm_Drought_P Parameter: Timepoint (hr) Value: 12
  misc_feature: MA Experiment 108504 PARAMETER Experiment Name: Zm_Drought_P Parameter: Tissue Value: Aerial
  misc_feature: MA Experiment 108504 PARAMETER Experiment Name: Zm_Drought_P Parameter: Treatment Value: Drought vs. No Drought
  misc_feature: MA Experiment ID: 108523 Result: Down-regulated in Transcription
  misc_feature: MA Experiment 108523 PARAMETER Experiment Name: Zm_42deg_Heat_P Parameter: Age (day) Value: 8
  misc_feature: MA Experiment 108523 PARAMETER Experiment Name: Zm_42deg_Heat_P Parameter: Organism Value: Zea mays
  misc_feature: MA Experiment 108523 PARAMETER Experiment Name: Zm_42deg_Heat_P Parameter: Plant Line Value: 35A19
  misc_feature: MA Experiment 108523 PARAMETER Experiment Name: Zm_42deg_Heat_P Parameter: Temperature (deg C) Value: 42 vs. 22
  misc_feature: MA Experiment 108523 PARAMETER Experiment Name: Zm_42deg_Heat_P Parameter: Timepoint (hr) Value: 6
  misc_feature: MA Experiment 108523 PARAMETER Experiment Name: Zm_42deg_Heat_P Parameter: Tissue Value: Aerial
  misc_feature: MA Experiment ID: 108527 Result: Down-regulated in Transcription
  misc_feature: MA Experiment 108527 PARAMETER Experiment Name: Zm_5mM_NO_P Parameter: Age (day) Value: 8
  misc_feature: MA Experiment 108527 PARAMETER Experiment Name: Zm_5mM_NO_P Parameter: Organism Value: Zea mays
  misc_feature: MA Experiment 108527 PARAMETER Experiment Name: Zm_5mM_NO_P Parameter: Plant Line Value: 35A19
  misc_feature: MA Experiment 108527 PARAMETER Experiment Name: Zm_5mM_NO_P Parameter: Timepoint (hr) Value: 6
  misc_feature: MA Experiment 108527 PARAMETER Experiment Name: Zm_5mM_NO_P Parameter: Tissue Value: Aerial
  misc_feature: MA Experiment 108527 PARAMETER Experiment Name: Zm_5mM_NO_P Parameter: Treatment Value: 5mM NO vs. No Treatment
  misc_feature: MA Experiment ID: 108528 Result: Up-regulated in Transcription
  misc_feature: MA Experiment 108528 PARAMETER Experiment Name: Zm_Imbibed_Seeds_P Parameter: Age (day) Value: 5 vs. 2
  misc_feature: MA Experiment 108528 PARAMETER Experiment Name: Zm_Imbibed_Seeds_P Parameter: Organism Value: Zea mays
  misc_feature: MA Experiment 108528 PARAMETER Experiment Name: Zm_Imbibed_Seeds_P Parameter: Plant Line Value: 35A19
  misc_feature: MA Experiment 108528 PARAMETER Experiment Name: Zm_Imbibed_Seeds_P Parameter: Tissue Value: Aerial vs. Embryo
  misc_feature: MA Experiment ID: 108535 Result: Up-regulated in Transcription
  misc_feature: MA Experiment 108535 PARAMETER Experiment Name: Zm_Meristem_P Parameter: Age (day) Value: 8
  misc_feature: MA Experiment 108535 PARAMETER Experiment Name: Zm_Meristem_P Parameter: Organism Value: Zea mays
  misc_feature: MA Experiment 108535 PARAMETER Experiment Name: Zm_Meristem_P Parameter: Plant Line Value: 35A19
  misc_feature: MA Experiment 108535 PARAMETER Experiment Name: Zm_Meristem_P Parameter: Tissue Value: Root Meristem vs. Above Root Meristem
  misc_feature: MA Experiment ID: 108536 Result: Down-regulated in Transcription
  misc_feature: MA Experiment 108536 PARAMETER Experiment Name: Zm_Meristem_P Parameter: Age (day) Value: 8
  misc_feature: MA Experiment 108536 PARAMETER Experiment Name: Zm_Meristem_P Parameter: Organism Value: Zea mays
  misc_feature: MA Experiment 108536 PARAMETER Experiment Name: Zm_Meristem_P Parameter: Plant Line Value: 35A19
  misc_feature: MA Experiment 108536 PARAMETER Experiment Name: Zm_Meristem_P Parameter: Tissue Value: Shoot Meristem vs. Above Shoot Meristem
  misc_feature: MA Experiment ID: 108544 Result: Down-regulated in Transcription
  misc_feature: MA Experiment ID: 108545 Result: Up-regulated in Transcription
  misc_feature: MA Experiment 108545 PARAMETER Experiment Name: Zm_Imbibed_Seeds_P Parameter: Age (day) Value: 3 vs. 2
  misc_feature: MA Experiment 108545 PARAMETER Experiment Name: Zm_Imbibed_Seeds_P Parameter: Organism Value: Zea mays
  misc_feature: MA Experiment 108545 PARAMETER Experiment Name: Zm_Imbibed_Seeds_P Parameter: Plant Line Value: 35A19
  misc_feature: MA Experiment 108545 PARAMETER Experiment Name: Zm_Imbibed_Seeds_P Parameter: Tissue Value: Aerial vs. Embryo
  misc_feature: MA Experiment ID: 108556 Result: Down-regulated in Transcription
  misc_feature: MA Experiment 108556 PARAMETER Experiment Name: Zm_Drought_P Parameter: Age (day) Value: 9
  misc_feature: MA Experiment 108556 PARAMETER Experiment Name: Zm_Drought_P Parameter: Organism Value: Zea mays
  misc_feature: MA Experiment 108556 PARAMETER Experiment Name: Zm_Drought_P Parameter: Plant Line Value: 35A19
  misc_feature: MA Experiment 108556 PARAMETER Experiment Name: Zm_Drought_P Parameter: Timepoint (hr) Value: 24
  misc_feature: MA Experiment 108556 PARAMETER Experiment Name: Zm_Drought_P Parameter: Tissue Value: Aerial
  misc_feature: MA Experiment 108556 PARAMETER Experiment Name: Zm_Drought_P Parameter: Treatment Value: Drought vs. No Drought
  misc_feature: MA Experiment ID: 108559 Result: Down-regulated in Transcription
  misc_feature: MA Experiment 108559 PARAMETER Experiment Name: Zm_5mM_NO_P Parameter: Age (day) Value: 8
  misc_feature: MA Experiment 108559 PARAMETER Experiment Name: Zm_5mM_NO_P Parameter: Organism Value: Zea mays
  misc_feature: MA Experiment 108559 PARAMETER Experiment Name: Zm_5mM_NO_P Parameter: Plant Line Value: 35A19
  misc_feature: MA Experiment 108559 PARAMETER Experiment Name: Zm_5mM_NO_P Parameter: Timepoint (hr) Value: 12
  misc_feature: MA Experiment 108559 PARAMETER Experiment Name: Zm_5mM_NO_P Parameter: Tissue Value: Aerial
  misc_feature: MA Experiment 108559 PARAMETER Experiment Name: Zm_5mM_NO_P Parameter: Treatment Value: 5mM NO vs. No Treatment
  misc_feature: MA Experiment ID: 20000477 Result: Down-regulated in Transcription
  misc_feature: MA Experiment 20000477 PARAMETER Experiment Name: Zm_5mM_SA_P Parameter: Age (day) Value: 10
  misc_feature: MA Experiment 20000477 PARAMETER Experiment Name: Zm_5mM_SA_P Parameter: Organism Value: Zea mays
  misc_feature: MA Experiment 20000477 PARAMETER Experiment Name: Zm_5mM_SA_P Parameter: Plant Line Value: 35A19
  misc_feature: MA Experiment 20000477 PARAMETER Experiment Name: Zm_5mM_SA_P Parameter: Timepoint (hr) Value: 48
  misc_feature: MA Experiment 20000477 PARAMETER Experiment Name: Zm_5mM_SA_P Parameter: Tissue Value: Aerial
  misc_feature: MA Experiment 20000477 PARAMETER Experiment Name: Zm_5mM_SA_P Parameter: Treatment Value: 5mM SA vs. No Treatment
  misc_feature: MA Experiment ID: 20000478 Result: Down-regulated in Transcription
  misc_feature: MA Experiment 20000478 PARAMETER Experiment Name: Zm_5mM_SA_P Parameter: Age (day) Value: 11
  misc_feature: MA Experiment 20000478 PARAMETER Experiment Name: Zm_5mM_SA_P Parameter: Organism Value: Zea mays
  misc_feature: MA Experiment 20000478 PARAMETER Experiment Name: Zm_5mM_SA_P Parameter: Plant Line Value: 35A19
  misc_feature: MA Experiment 20000478 PARAMETER Experiment Name: Zm_5mM_SA_P Parameter: Timepoint (hr) Value: 72
  misc_feature: MA Experiment 20000478 PARAMETER Experiment Name: Zm_5mM_SA_P Parameter: Tissue Value: Aerial
  misc_feature: MA Experiment 20000478 PARAMETER Experiment Name: Zm_5mM_SA_P Parameter: Treatment Value: 5mM SA vs. No Treatment
  misc_feature: MA Experiment ID: 20000480 Result: Down-regulated in Transcription
  misc_feature: MA Experiment 20000480 PARAMETER Experiment Name: Zm_Drought_P Parameter: Age (day) Value: 11
  misc_feature: MA Experiment 20000480 PARAMETER Experiment Name: Zm_Drought_P Parameter: Organism Value: Zea mays
  misc_feature: MA Experiment 20000480 PARAMETER Experiment Name: Zm_Drought_P Parameter: Plant Line Value: 35A19
  misc_feature: MA Experiment 20000480 PARAMETER Experiment Name: Zm_Drought_P Parameter: Timepoint (hr) Value: 72
  misc_feature: MA Experiment 20000480 PARAMETER Experiment Name: Zm_Drought_P Parameter: Tissue Value: Aerial
  misc_feature: MA Experiment 20000480 PARAMETER Experiment Name: Zm_Drought_P Parameter: Treatment Value: Drought vs. No Drought
  misc_feature: MA Experiment ID: 20000488 Result: Down-regulated in Transcription
  misc_feature: MA Experiment 20000488 PARAMETER Experiment Name: Zm_50mM_NH4NO3_L_to_H_P Parameter: Organism Value: Zea mays
  misc_feature: MA Experiment 20000488 PARAMETER Experiment Name: Zm_50mM_NH4NO3_L_to_H_P Parameter: Timepoint (hr) Value: 8
  misc_feature: MA Experiment 20000488 PARAMETER Experiment Name: Zm_50mM_NH4NO3_L_to_H_P Parameter: Tissue Value: Leaves
  misc_feature: MA Experiment 20000488 PARAMETER Experiment Name: Zm_50mM_NH4NO3_L_to_H_P Parameter: Treatment Value: 50mM NH4NO3 vs. 100mM Mannitol
  misc_feature: MA Experiment ID: 20000532 Result: Down-regulated in Transcription
  misc_feature: MA Experiment 20000532 PARAMETER Experiment Name: Zm_0.001percent_MeJA_P Parameter: Age (day) Value: 10
  misc_feature: MA Experiment 20000532 PARAMETER Experiment Name: Zm_0.001percent_MeJA_P Parameter: Organism Value: Zea mays
  misc_feature: MA Experiment 20000532 PARAMETER Experiment Name: Zm_0.001percent_MeJA_P Parameter: Plant Line Value: 35A19
  misc_feature: MA Experiment 20000532 PARAMETER Experiment Name: Zm_0.001percent_MeJA_P Parameter: Timepoint (hr) Value: 48
  misc_feature: MA Experiment 20000532 PARAMETER Experiment Name: Zm_0.001percent_MeJA_P Parameter: Tissue Value: Aerial
  misc_feature: MA Experiment 20000532 PARAMETER Experiment Name: Zm_0.001percent_MeJA_P Parameter: Treatment Value: 0.001percent MeJA vs. No Treatment
  misc_feature: MA Experiment ID: 20000533 Result: Down-regulated in Transcription
  misc_feature: MA Experiment 20000533 PARAMETER Experiment Name: Zm_0.001percent_MeJA_P Parameter: Age (day) Value: 11
  misc_feature: MA Experiment 20000533 PARAMETER Experiment Name: Zm_0.001percent_MeJA_P Parameter: Organism Value: Zea mays
  misc_feature: MA Experiment 20000533 PARAMETER Experiment Name: Zm_0.001percent_MeJA_P Parameter: Plant Line Value: 35A19
  misc_feature: MA Experiment 20000533 PARAMETER Experiment Name: Zm_0.001percent_MeJA_P Parameter: Timepoint (hr) Value: 72
  misc_feature: MA Experiment 20000533 PARAMETER Experiment Name: Zm_0.001percent_MeJA_P Parameter: Tissue Value: Aerial
  misc_feature: MA Experiment 20000533 PARAMETER Experiment Name: Zm_0.001percent_MeJA_P Parameter: Treatment Value: 0.001percent MeJA vs. No Treatment
  misc_feature: MA Experiment ID: 20000626 Result: Down-regulated in Transcription
  misc_feature: MA Experiment 20000626 PARAMETER Experiment Name: Zm_Herbicide-Treatments_P Parameter: Timepoint (hr) Value: 12
  misc_feature: MA Experiment 20000626 PARAMETER Experiment Name: Zm_Herbicide-Treatments_P Parameter: Tissue Value: Aerial
  misc_feature: MA Experiment 20000626 PARAMETER Experiment Name: Zm_Herbicide-Treatments_P Parameter: Treatment Value: Roundup vs. No Treatment
attcagaagcagtgaagtgagagaggtaaaacaagctgagactctaacttcaaaggaagatacacacacaaaggacagtgagaaggaggccaagaagcttgctcgcaaggcgctagggaggaagaagacaaccacgcactattgctgttgcttgtgcttagtgtgtgctcgtggctagaagcagacaagcagctgcgggagcataagggcggcatggcttcttgcggtagcttctactttgttcccatgctcctgctgatgctcctgctcgcttctcccgccactgctgcactggtgacatcctcccagcctggcggcaatgccactgctgcaaggccgaggccggggatggagcagctcaagcgcaagaggatcagggctctgctcaccaagcttaacaagcctgctctcaagactatccagagctcggatggcgacatcatagactgtgttccctctcacctccagcccgcatttgaccacccaaagctcaggggcgaaaagattctggatccgccggagaggcccaagaaccgcaacttcacctttggcggcagcggcagaagcagggtcggcgaggtggtggtgcaggcgtggcacgccaccggcgaggcgtgtccagaggggaccgtgccgatacggcggacgacggagaaggatctgctcagggctagctccctcaggaggtacggcaggaagccagcgcgccggggtgttcgccgtgattccacaagcagcggccatgagcatgcagttgggtatgtaaactcagaacagtactatggggccaaggccagtgttaatgtgtggtcgccaaggataggtgacccatctgagttcagcctgtctcagatctgggtcctctctggctccttcggcaatgatctcaacaccatcgaagctggatggcaggtaagcccagagctatacggagacagtaacccaagattcttcacctactggacaactgacgcgtaccaagaaaccgggtgctacaaccacaattgccgcggattcgtgcagacgacgaacaagattgcaattggggcggctatcaccccggagtcggtgtacaatggcaggcagttcgacatcactctcatgctatggaaggacccaaagcaggggcactggtggctggagctgggcccgggcctcgtagtcgggtactggccgtcgcacctcttcagccacctggctcgccacgccaacatggtgcagttcggcggcgaggtcgtcaacacccggccgtcggggtcgcataccgcgacgcagatgggcagcggccacttccccagagagggcttcgaccgcgccgcctacttccggaacctgcaggtggtggactgggacaacaacctcatcccggcggccaacctgaaactcctcgccgaccatcctggatgctacgatatccagggaggcactaacagctactggggaagctacttctactacggaggacccgggaggaacgccaaatgtccctgagatcaattcggaccggatgtctctttcttgttcgatgttcttttttcgttgccctttctaggatttggtaggtcttatacgtctttaacgaaagaatgcatccacggttgagacttgggaggaatttgtaaatttggcaagtacctgttatatttaatatccctatggctcatattttattt

SEQ ID NO: 1734 - protein, 425 aa, Zea mays subsp. mays
  peptide (1)..(425): Ceres Seq. ID no. 12387135
  misc_feature (189)..(384): Pfam Name: Arabidopsis proteins of unknown function Pfam Description: Arabidopsis proteins of unknown function
  misc_feature (189)..(384): Pfam Name: Arabidopsis proteins of unknown function Pfam Description: Arabidopsis proteins of unknown function
  misc_feature (12)..(99): Homolog of NCBI NO: 6573746 NR Description: F20B24.18 [Arabidopsis thaliana]
  misc_feature (132)..(425): Homolog of NCBI NO: 6573746 NR Description: F20B24.18 [Arabidopsis thaliana]
  misc_feature (1)..(425): Homolog of NCBI NO: 25345695 NR Description: protein F26F24.22 [imported] - Arabidopsis
  misc_feature (12)..(425): Homolog of NCBI NO: 15220207 NR Description: putative carboxyl-terminal peptidase; protein id:
  misc_feature (2)..(424): Homolog of NCBI NO: 34913794 NR Description: OSJNBa0026J14.25 [Oryza sativa (japonica
  misc_feature (12)..(99): Homolog of NCBI NO: 6573746 NR Description: F20B24.18 [Arabidopsis thaliana]
  misc_feature (1)..(425): Homolog of NCBI NO: 25345695 NR Description: protein F26F24.22 [imported] - Arabidopsis
  misc_feature (2)..(424): Homolog of NCBI NO: 34913794 NR Description: OSJNBa0026J14.25 [Oryza sativa (japonica
  misc_feature (2)..(425): Homolog of NCBI NO: 21389708 NR Description: putative carboxyl-terminal proteinase [Gossypium
  misc_feature (15)..(425): Homolog of NCBI NO: 15240622 NR Description: putative protein
  misc_feature (13)..(425): Homolog of NCBI NO: 28416687 NR Description: At1g70550 [Arabidopsis thaliana]
  misc_feature (179)..(425): Homolog of NCBI NO: 15528706 NR Description: P0583G08.7 [Oryza sativa (japonica
  misc_feature (12)..(178): Homolog of NCBI NO: 15528706 NR Description: P0583G08.7 [Oryza sativa (japonica
  misc_feature (12)..(425): Homolog of NCBI NO: 15220207 NR Description: putative carboxyl-terminal peptidase; protein id:
  misc_feature (132)..(425): Homolog of NCBI NO: 6573746 NR Description: F20B24.18 [Arabidopsis thaliana]
  misc_feature (12)..(178): Homolog of NCBI NO: 15528706 NR Description: P0583G08.7 [Oryza sativa (japonica
  misc_feature (179)..(425): Homolog of NCBI NO: 15528706 NR Description: P0583G08.7 [Oryza sativa (japonica
  misc_feature (13)..(425): Homolog of NCBI NO: 28416687 NR Description: At1g70550 [Arabidopsis thaliana]
  misc_feature (15)..(425): Homolog of NCBI NO: 15240622 NR Description: putative protein
  misc_feature (2)..(425): Homolog of NCBI NO: 21389708 NR Description: putative carboxyl-terminal proteinase [Gossypium
MASCGSFYFVPMLLLMLLLASPATAALVTSSQPGGNATAARPRPGMEQLKRKRIRALLTKLNKPALKTIQSSDGDIIDCVPSHLQPAFDHPKLRGEKILDPPERPKNRNFTFGGSGRSRVGEVVVQAWHATGEACPEGTVPIRRTTEKDLLRASSLRRYGRKPARRGVRRDSTSSGHEHAVGYVNSEQYYGAKASVNVWSPRIGDPSEFSLSQIWVLSGSFGNDLNTIEAGWQVSPELYGDSNPRFFTYWTTDAYQETGCYNHNCRGFVQTTNKIAIGAAITPESVYNGRQFDITLMLWKDPKQGHWWLELGPGLVVGYWPSHLFSHLARHANMVQFGGEVVNTRPSGSHTATQMGSGHFPREGFDRAAYFRNLQVVDWDNNLIPAANLKLLADHPGCYDIQGGTNSYWGSYFYYGGPGRNAKCP

SEQ ID NO: 1735 - protein, 414 aa, Zea mays subsp. mays
  peptide (1)..(414): Ceres Seq. ID no. 12387136
  misc_feature (178)..(373): Pfam Name: Arabidopsis proteins of unknown function Pfam Description: Arabidopsis proteins of unknown function
  misc_feature (178)..(373): Pfam Name: Arabidopsis proteins of unknown function Pfam Description: Arabidopsis proteins of unknown function
  misc_feature (1)..(88): Homolog of NCBI NO: 6573746 NR Description: F20B24.18 [Arabidopsis thaliana]
  misc_feature (121)..(414): Homolog of NCBI NO: 6573746 NR Description: F20B24.18 [Arabidopsis thaliana]
  misc_feature (1)..(414): Homolog of NCBI NO: 25345695 NR Description: protein F26F24.22 [imported] - Arabidopsis
  misc_feature (1)..(414): Homolog of NCBI NO: 15220207 NR Description: putative carboxyl-terminal peptidase; protein id:
  misc_feature (1)..(413): Homolog of NCBI NO: 34913794 NR Description: OSJNBa0026J14.25 [Oryza sativa (japonica
  misc_feature (1)..(88): Homolog of NCBI NO: 6573746 NR Description: F20B24.18 [Arabidopsis thaliana]
  misc_feature (1)..(414): Homolog of NCBI NO: 25345695 NR Description: protein F26F24.22 [imported] - Arabidopsis
  misc_feature (1)..(413): Homolog of NCBI NO: 34913794 NR Description: OSJNBa0026J14.25 [Oryza sativa (japonica
  misc_feature (1)..(414): Homolog of NCBI NO: 21389708 NR Description: putative carboxyl-terminal proteinase [Gossypium
  misc_feature (4)..(414): Homolog of NCBI NO: 15240622 NR Description: putative protein
  misc_feature (2)..(414): Homolog of NCBI NO: 28416687 NR Description: At1g70550 [Arabidopsis thaliana]
  misc_feature (168)..(414): Homolog of NCBI NO: 15528706 NR Description: P0583G08.7 [Oryza sativa (japonica
  misc_feature (1)..(167): Homolog of NCBI NO: 15528706 NR Description: P0583G08.7 [Oryza sativa (japonica
  misc_feature (1)..(414): Homolog of NCBI NO: 15220207 NR Description: putative carboxyl-terminal peptidase; protein id:
  misc_feature (121)..(414): Homolog of NCBI NO: 6573746 NR Description: F20B24.18 [Arabidopsis thaliana]
  misc_feature (1)..(167): Homolog of NCBI NO: 15528706 NR Description: P0583G08.7 [Oryza sativa (japonica
  misc_feature (168)..(414): Homolog of NCBI NO: 15528706 NR Description: P0583G08.7 [Oryza sativa (japonica
  misc_feature (2)..(414): Homolog of NCBI NO: 28416687 NR Description: At1g70550 [Arabidopsis thaliana]
  misc_feature (4)..(414): Homolog of NCBI NO: 15240622 NR Description: putative protein
  misc_feature (1)..(414): Homolog of NCBI NO: 21389708 NR Description: putative carboxyl-terminal proteinase [Gossypium
MLLLMLLLASPATAALVTSSQPGGNATAARPRPGMEQLKRKRIRALLTKLNKPALKTIQSSDGDIIDCVPSHLQPAFDHPKLRGEKILDPPERPKNRNFTFGGSGRSRVGEVVVQAWHATGEACPEGTVPIRRTTEKDLLRASSLRRYGRKPARRGVRRDSTSSGHEHAVGYVNSEQYYGAKASVNVWSPRIGDPSEFSLSQIWVLSGSFGNDLNTIEAGWQVSPELYGDSNPRFFTYWTTDAYQETGCYNHNCRGFVQTTNKIAIGAAITPESVYNGRQFDITLMLWKDPKQGHWWLELGPGLVVGYWPSHLFSHLARHANMVQFGGEVVNTRPSGSHTATQMGSGHFPREGFDRAAYFRNLQVVDWDNNLIPAANLKLLADHPGCYDIQGGTNSYWGSYFYYGGPGRNAKCP

SEQ ID NO: 1736 - protein, 410 aa, Zea mays subsp. mays
  peptide (1)..(410): Ceres Seq. ID no. 12387137
  misc_feature (174)..(369): Pfam Name: Arabidopsis proteins of unknown function Pfam Description: Arabidopsis proteins of unknown function
  misc_feature (174)..(369): Pfam Name: Arabidopsis proteins of unknown function Pfam Description: Arabidopsis proteins of unknown function
  misc_feature (1)..(163): Homolog of NCBI NO: 15528706 NR Description: P0583G08.7 [Oryza sativa (japonica
  misc_feature (164)..(410): Homolog of NCBI NO: 15528706 NR Description: P0583G08.7 [Oryza sativa (japonica
  misc_feature (1)..(410): Homolog of NCBI NO: 28416687 NR Description: At1g70550 [Arabidopsis thaliana]
  misc_feature (117)..(410): Homolog of NCBI NO: 6573746 NR Description: F20B24.18 [Arabidopsis thaliana]
  misc_feature (1)..(410): Homolog of NCBI NO: 15220207 NR Description: putative carboxyl-terminal peptidase; protein id:
  misc_feature (1)..(84): Homolog of NCBI NO: 6573746 NR Description: F20B24.18 [Arabidopsis thaliana]
  misc_feature (1)..(410): Homolog of NCBI NO: 25345695 NR Description: protein F26F24.22 [imported] - Arabidopsis
  misc_feature (1)..(409): Homolog of NCBI NO: 34913794 NR Description: OSJNBa0026J14.25 [Oryza sativa (japonica
  misc_feature (1)..(410): Homolog of NCBI NO: 21389708 NR Description: putative carboxyl-terminal proteinase [Gossypium
  misc_feature (1)..(410): Homolog of NCBI NO: 15240622 NR Description: putative protein
  misc_feature (1)..(410): Homolog of NCBI NO: 28416687 NR Description: At1g70550 [Arabidopsis thaliana]
  misc_feature (164)..(410): Homolog of NCBI NO: 15528706 NR Description: P0583G08.7 [Oryza sativa (japonica
  misc_feature (1)..(163): Homolog of NCBI NO: 15528706 NR Description: P0583G08.7 [Oryza sativa (japonica
  misc_feature (1)..(410): Homolog of NCBI NO: 15220207 NR Description: putative carboxyl-terminal peptidase; protein id:
  misc_feature (117)..(410): Homolog of NCBI NO: 6573746 NR Description: F20B24.18 [Arabidopsis thaliana]
  misc_feature (1)..(409): Homolog of NCBI NO: 34913794 NR Description: OSJNBa0026J14.25 [Oryza sativa (japonica
  misc_feature (1)..(410): Homolog of NCBI NO: 25345695 NR Description: protein F26F24.22 [imported] - Arabidopsis
  misc_feature (1)..(84): Homolog of NCBI NO: 6573746 NR Description: F20B24.18 [Arabidopsis thaliana]
  misc_feature (1)..(410): Homolog of NCBI NO: 15240622 NR Description: putative protein
  misc_feature (1)..(410): Homolog of NCBI NO: 21389708 NR Description: putative carboxyl-terminal proteinase [Gossypium
MLLLASPATAALVTSSQPGGNATAARPRPGMEQLKRKRIRALLTKLNKPALKTIQSSDGDIIDCVPSHLQPAFDHPKLRGEKILDPPERPKNRNFTFGGSGRSRVGEVVVQAWHATGEACPEGTVPIRRTTEKDLLRASSLRRYGRKPARRGVRRDSTSSGHEHAVGYVNSEQYYGAKASVNVWSPRIGDPSEFSLSQIWVLSGSFGNDLNTIEAGWQVSPELYGDSNPRFFTYWTTDAYQETGCYNHNCRGFVQTTNKIAIGAAITPESVYNGRQFDITLMLWKDPKQGHWWLELGPGLVVGYWPSHLFSHLARHANMVQFGGEVVNTRPSGSHTATQMGSGHFPREGFDRAAYFRNLQVVDWDNNLIPAANLKLLADHPGCYDIQGGTNSYWGSYFYYGGPGRNAKCP

SEQ ID NO: 1737 - DNA, 997 bp, Zea mays subsp. mays
  misc_feature (1)..(997): Ceres Seq. ID no. 13498415
  misc_feature: MA Experiment ID: 108515 Result: Down-regulated in Transcription
  misc_feature: MA Experiment 108515 PARAMETER Experiment Name: Zm_2mM_SA_P Parameter: Age (day) Value: 8
  misc_feature: MA Experiment 108515 PARAMETER Experiment Name: Zm_2mM_SA_P Parameter: Organism Value: Zea mays
  misc_feature: MA Experiment 108515 PARAMETER Experiment Name: Zm_2mM_SA_P Parameter: Plant Line Value: 35A19
  misc_feature: MA Experiment 108515 PARAMETER Experiment Name: Zm_2mM_SA_P Parameter: Timepoint (hr) Value: 12
  misc_feature: MA Experiment 108515 PARAMETER Experiment Name: Zm_2mM_SA_P Parameter: Tissue Value: Aerial
  misc_feature: MA Experiment 108515 PARAMETER Experiment Name: Zm_2mM_SA_P Parameter: Treatment Value: 2mM SA vs. No Treatment
  misc_feature: MA Experiment ID: 108528 Result: Up-regulated in Transcription
  misc_feature: MA Experiment 108528 PARAMETER Experiment Name: Zm_Imbibed_Seeds_P Parameter: Age (day) Value: 5 vs. 2
  misc_feature: MA Experiment 108528 PARAMETER Experiment Name: Zm_Imbibed_Seeds_P Parameter: Organism Value: Zea mays
  misc_feature: MA Experiment 108528 PARAMETER Experiment Name: Zm_Imbibed_Seeds_P Parameter: Plant Line Value: 35A19
  misc_feature: MA Experiment 108528 PARAMETER Experiment Name: Zm_Imbibed_Seeds_P Parameter: Tissue Value: Aerial vs. Embryo
  misc_feature: MA Experiment ID: 108529 Result: Down-regulated in Transcription
  misc_feature: MA Experiment 108529 PARAMETER Experiment Name: Zm_Imbibed_Seeds_P Parameter: Age (day) Value: 5 vs. 2
  misc_feature: MA Experiment 108529 PARAMETER Experiment Name: Zm_Imbibed_Seeds_P Parameter: Organism Value: Zea mays
  misc_feature: MA Experiment 108529 PARAMETER Experiment Name: Zm_Imbibed_Seeds_P Parameter: Plant Line Value: 35A19
  misc_feature: MA Experiment 108529 PARAMETER Experiment Name: Zm_Imbibed_Seeds_P Parameter: Tissue Value: Roots vs. Embryo
  misc_feature: MA Experiment ID: 108530 Result: Up-regulated in Transcription
  misc_feature: MA Experiment 108530 PARAMETER Experiment Name: Zm_Imbibed_Seeds_P Parameter: Age (day) Value: 6 vs. 2
  misc_feature: MA Experiment 108530 PARAMETER Experiment Name: Zm_Imbibed_Seeds_P Parameter: Organism Value: Zea mays
  misc_feature: MA Experiment 108530 PARAMETER Experiment Name: Zm_Imbibed_Seeds_P Parameter: Plant Line Value: 35A19
  misc_feature: MA Experiment 108530 PARAMETER Experiment Name: Zm_Imbibed_Seeds_P Parameter: Tissue Value: Aerial vs. Embryo
  misc_feature: MA Experiment ID: 108536 Result: Down-regulated in Transcription
  misc_feature: MA Experiment 108536 PARAMETER Experiment Name: Zm_Meristem_P Parameter: Age (day) Value: 8
  misc_feature: MA Experiment 108536 PARAMETER Experiment Name: Zm_Meristem_P Parameter: Organism Value: Zea mays
  misc_feature: MA Experiment 108536 PARAMETER Experiment Name: Zm_Meristem_P Parameter: Plant Line Value: 35A19
  misc_feature: MA Experiment 108536 PARAMETER Experiment Name: Zm_Meristem_P Parameter: Tissue Value: Shoot Meristem vs. Above Shoot Meristem
  misc_feature: MA Experiment ID: 108543 Result: Up-regulated in Transcription
  misc_feature: MA Experiment ID: 108545 Result: Up-regulated in Transcription
  misc_feature: MA Experiment 108545 PARAMETER Experiment Name: Zm_Imbibed_Seeds_P Parameter: Age (day) Value: 3 vs. 2
  misc_feature: MA Experiment 108545 PARAMETER Experiment Name: Zm_Imbibed_Seeds_P Parameter: Organism Value: Zea mays
  misc_feature: MA Experiment 108545 PARAMETER Experiment Name: Zm_Imbibed_Seeds_P Parameter: Plant Line Value: 35A19
  misc_feature: MA Experiment 108545 PARAMETER Experiment Name: Zm_Imbibed_Seeds_P Parameter: Tissue Value: Aerial vs. Embryo
  misc_feature: MA Experiment ID: 108546 Result: Down-regulated in Transcription
  misc_feature: MA Experiment 108546 PARAMETER Experiment Name: Zm_Imbibed_Seeds_P Parameter: Age (day) Value: 3 vs. 2
  misc_feature: MA Experiment 108546 PARAMETER Experiment Name: Zm_Imbibed_Seeds_P Parameter: Organism Value: Zea mays
  misc_feature: MA Experiment 108546 PARAMETER Experiment Name: Zm_Imbibed_Seeds_P Parameter: Plant Line Value: 35A19
  misc_feature: MA Experiment 108546 PARAMETER Experiment Name: Zm_Imbibed_Seeds_P Parameter: Tissue Value: Roots vs. Embryo
  misc_feature: MA Experiment ID: 108547 Result: Up-regulated in Transcription
  misc_feature: MA Experiment 108547 PARAMETER Experiment Name: Zm_Imbibed_Seeds_P Parameter: Age (day) Value: 4 vs. 2
  misc_feature: MA Experiment 108547 PARAMETER Experiment Name: Zm_Imbibed_Seeds_P Parameter: Organism Value: Zea mays
  misc_feature: MA Experiment 108547 PARAMETER Experiment Name: Zm_Imbibed_Seeds_P Parameter: Plant Line Value: 35A19
  misc_feature: MA Experiment 108547 PARAMETER Experiment Name: Zm_Imbibed_Seeds_P Parameter: Tissue Value: Aerial vs. Embryo
  misc_feature: MA Experiment ID: 108687 Result: Down-regulated in Transcription
  misc_feature: MA Experiment 108687 PARAMETER Experiment Name: Zm_Embryos-Flowers__P Parameter: Tissue Value: Embryo vs. Aerial+
  misc_feature: MA Experiment ID: 20000478 Result: Down-regulated in Transcription
  misc_feature: MA Experiment 20000478 PARAMETER Experiment Name: Zm_5mM_SA_P Parameter: Age (day) Value: 11
  misc_feature: MA Experiment 20000478 PARAMETER Experiment Name: Zm_5mM_SA_P Parameter: Organism Value: Zea mays
  misc_feature: MA Experiment 20000478 PARAMETER Experiment Name: Zm_5mM_SA_P Parameter: Plant Line Value: 35A19
  misc_feature: MA Experiment 20000478 PARAMETER Experiment Name: Zm_5mM_SA_P Parameter: Timepoint (hr) Value: 72
  misc_feature: MA Experiment 20000478 PARAMETER Experiment Name: Zm_5mM_SA_P Parameter: Tissue Value: Aerial
  misc_feature: MA Experiment 20000478 PARAMETER Experiment Name: Zm_5mM_SA_P Parameter: Treatment Value: 5mM SA vs. No Treatment
  misc_feature: MA Experiment ID: 20000480 Result: Down-regulated in Transcription
  misc_feature: MA Experiment 20000480 PARAMETER Experiment Name: Zm_Drought_P Parameter: Age (day) Value: 11
  misc_feature: MA Experiment 20000480 PARAMETER Experiment Name: Zm_Drought_P Parameter: Organism Value: Zea mays
  misc_feature: MA Experiment 20000480 PARAMETER Experiment Name: Zm_Drought_P Parameter: Plant Line Value: 35A19
  misc_feature: MA Experiment 20000480 PARAMETER Experiment Name: Zm_Drought_P Parameter: Timepoint (hr) Value: 72
  misc_feature: MA Experiment 20000480 PARAMETER Experiment Name: Zm_Drought_P Parameter: Tissue Value: Aerial
  misc_feature: MA Experiment 20000480 PARAMETER Experiment Name: Zm_Drought_P Parameter: Treatment Value: Drought vs. No Drought
  misc_feature: MA Experiment ID: 20000535 Result: Down-regulated in Transcription
  misc_feature: MA Experiment 20000535 PARAMETER Experiment Name: Zm_Hybrid_Seed_Dev_P Parameter: DAP Value: 30 vs. 12
  misc_feature: MA Experiment 20000535 PARAMETER Experiment Name: Zm_Hybrid_Seed_Dev_P Parameter: Organism Value: Zea mays
  misc_feature: MA Experiment 20000535 PARAMETER Experiment Name: Zm_Hybrid_Seed_Dev_P Parameter: Plant Line Value: 35A19
  misc_feature: MA Experiment 20000535 PARAMETER Experiment Name: Zm_Hybrid_Seed_Dev_P Parameter: Tissue Value: Embryo vs. Unfert Floret
aaagataaagttaggctcggcaccgggggctcatccgcaagcctgtggacgcgagtgagtgaacaccagccgtattgtcccgaccccgaccgatcctcgcctgctgcagccatggcgacctccgcggcgctctctaccgccgccaatcccacccagctctgccggtcccgcgcttcgctgggcaagccggtgaaggggcttggcctgagcatgggccgcgagcgcgcccagcggagcattgtgtgccaggcggcgagcagcatctccgccgaccgcgtccccgacatggagaagcggaagctgatgaacctcctcctcctcggcgccatctcgttgcccaccgtcggcatggtcgtcccctacggcgccttcttcgtccctgccggctccgggaacgccggcggcgggacctacgcgaaggacaagctgggcaacgacatcacggnggaggcgtggctcaacacgcacggtcccaacgaccgcacgctngcgcaggggctcaagggtgaccccacgtacctggtggtggagcaggacaanacgctggccacctacgggatcaacgccgtgtgcactcacctcggctgcgtcgtgccgtggaacggcgccganaacaagttcatntgcccatgccncggatcccagtacaacaaccagggcaaggtggtccgtggaccggngcctctgtcgctggccctggttcacgccgacgtngacgacggcaaggtcctnttngtcccgtgggtggagaccgacttcaggaccggcgaggacccgtggtggaaggcatgaggatgatccgaaaccancggtgntcagtgctcacacatgagacctacgtatgcctccgttccttgtgatgaggaaatatgcttgcgttcgttntccgtgggcgttgttcctacaaattcacttgctttctgtctctctctctatanacncnctgtataaaacaagaacagctgtttatcatctcttnttatataaccttttgaac

SEQ ID NO: 1738 - protein, 263 aa, Zea mays subsp. mays
  peptide (1)..(263): Ceres Seq. ID no. 13498416
  misc_feature (147)..(239): Pfam Name: Rieske [2Fe-2S] domain Pfam Description: Rieske [2Fe-2S] domain
  misc_feature (40)..(261): Homolog of NCBI NO: 136707 NR Description: Cytochrome B6-F complex iron-sulfur subunit,
  misc_feature (36)..(263): Homolog of NCBI NO: 136712 NR Description: Cytochrome B6-F complex iron-sulfur subunit,
  misc_feature (62)..(261): Homolog of NCBI NO: 30679426 NR Description: Rieske FeS protein (component of cytochrome B6-F
  misc_feature (45)..(261): Homolog of NCBI NO: 15236275 NR Description: Rieske FeS protein (component of cytochrome B6-F
  misc_feature (45)..(261): Homolog of NCBI NO: 9843639 NR Description: Rieske FeS protein [Arabidopsis thaliana]
  misc_feature (43)..(261): Homolog of NCBI NO: 401249 NR Description: Cytochrome B6-F complex iron-sulfur subunit 2,
  misc_feature (43)..(261): Homolog of NCBI NO: 19999 NR Description: Rieske Fe/S protein of cytochrome b6/f complex
  misc_feature (43)..(261): Homolog of NCBI NO: 401247 NR Description: Cytochrome B6-F complex iron-sulfur subunit 1,
  misc_feature (32)..(261): Homolog of NCBI NO: 2921504 NR Description: cytochrome B6-F complex iron-sulfur subunit
  misc_feature (41)..(261): Homolog of NCBI NO: 3885886 NR Description: Rieske Fe-S precursor protein [Oryza sativa]
  misc_feature (149)..(149): Xaa is any aa, unknown or other
  misc_feature (163)..(163): Xaa is any aa, unknown or other
  misc_feature (180)..(180): Xaa is any aa, unknown or other
  misc_feature (204)..(204): Xaa is any aa, unknown or other
  misc_feature (208)..(208): Xaa is any aa, unknown or other
  misc_feature (212)..(212): Xaa is any aa, unknown or other
  misc_feature (227)..(227): Xaa is any aa, unknown or other
  misc_feature (238)..(238): Xaa is any aa, unknown or other
  misc_feature (244)..(244): Xaa is any aa, unknown or other
  misc_feature (245)..(245): Xaa is any aa, unknown or other
KDKVRLGTGGSSASLWTRVSEHQPYCPDPDRSSPAAAMATSAALSTAANPTQLCRSRASLGKPVKGLGLSMGRERAQRSIVCQAASSISADRVPDMEKRKLMNLLLLGAISLPTVGMVVPYGAFFVPAGSGNAGGGTYAKDKLGNDITXEAWLNTHGPNDRTXAQGLKGDPTYLVVEQDXTLATYGINAVCTHLGCVVPWNGAXNKFXCPCXGSQYNNQGKVVRGPXPLSLALVHADXDDGKVXXVPWVETDFRTGEDPWWKA

SEQ ID NO: 1739 - protein, 226 aa, Zea mays subsp. mays
  peptide (1)..(226): Ceres Seq. ID no. 13498417
  misc_feature (110)..(202): Pfam Name: Rieske [2Fe-2S] domain Pfam Description: Rieske [2Fe-2S] domain
  misc_feature (3)..(224): Homolog of NCBI NO: 136707 NR Description: Cytochrome B6-F complex iron-sulfur subunit,
  misc_feature (1)..(226): Homolog of NCBI NO: 136712 NR Description: Cytochrome B6-F complex iron-sulfur subunit,
  misc_feature (25)..(224): Homolog of NCBI NO: 30679426 NR Description: Rieske FeS protein (component of cytochrome B6-F
  misc_feature (8)..(224): Homolog of NCBI NO: 15236275 NR Description: Rieske FeS protein (component of cytochrome B6-F
  misc_feature (8)..(224): Homolog of NCBI NO: 9843639 NR Description: Rieske FeS protein [Arabidopsis thaliana]
  misc_feature (6)..(224): Homolog of NCBI NO: 401249 NR Description: Cytochrome B6-F complex iron-sulfur subunit 2,
  misc_feature (6)..(224): Homolog of NCBI NO: 19999 NR Description: Rieske Fe/S protein of cytochrome b6/f complex
  misc_feature (6)..(224): Homolog of NCBI NO: 401247 NR Description: Cytochrome B6-F complex iron-sulfur subunit 1,
  misc_feature (1)..(224): Homolog of NCBI NO: 2921504 NR Description: cytochrome B6-F complex iron-sulfur subunit
  misc_feature (4)..(224): Homolog of NCBI NO: 3885886 NR Description: Rieske Fe-S precursor protein [Oryza sativa]
  misc_feature (112)..(112): Xaa is any aa, unknown or other
  misc_feature (126)..(126): Xaa is any aa, unknown or other
  misc_feature (143)..(143): Xaa is any aa, unknown or other
  misc_feature (167)..(167): Xaa is any aa, unknown or other
  misc_feature (171)..(171): Xaa is any aa, unknown or other
  misc_feature (175)..(175): Xaa is any aa, unknown or other
  misc_feature (190)..(190): Xaa is any aa, unknown or other
  misc_feature (201)..(201): Xaa is any aa, unknown or other
  misc_feature (207)..(207): Xaa is any aa, unknown or other
  misc_feature (208)..(208): Xaa is any aa, unknown or other
MATSAALSTAANPTQLCRSRASLGKPVKGLGLSMGRERAQRSIVCQAASSISADRVPDMEKRKLMNLLLLGAISLPTVGMVVPYGAFFVPAGSGNAGGGTYAKDKLGNDITXEAWLNTHGPNDRTXAQGLKGDPTYLVVEQDXTLATYGINAVCTHLGCVVPWNGAXNKFXCPCXGSQYNNQGKVVRGPXPLSLALVHADXDDGKVXXVPWVETDFRTGEDPWWKA

SEQ ID NO: 1740 - protein, 193 aa, Zea mays subsp. mays
  peptide (1)..(193): Ceres Seq. ID no. 13498418
  misc_feature (77)..(169): Pfam Name: Rieske [2Fe-2S] domain Pfam Description: Rieske [2Fe-2S] domain
  misc_feature (1)..(191): Homolog of NCBI NO: 136707 NR Description: Cytochrome B6-F complex iron-sulfur subunit,
  misc_feature (1)..(193): Homolog of NCBI NO: 136712 NR Description: Cytochrome B6-F complex iron-sulfur subunit,
  misc_feature (1)..(191): Homolog of NCBI NO: 30679426 NR Description: Rieske FeS protein (component of cytochrome B6-F
  misc_feature (1)..(191): Homolog of NCBI NO: 15236275 NR Description: Rieske FeS protein (component of cytochrome B6-F
  misc_feature (1)..(191): Homolog of NCBI NO: 9843639 NR Description: Rieske FeS protein [Arabidopsis thaliana]
  misc_feature (1)..(191): Homolog of NCBI NO: 401249 NR Description: Cytochrome B6-F complex iron-sulfur subunit 2,
  misc_feature (1)..(191): Homolog of NCBI NO: 19999 NR Description: Rieske Fe/S protein of cytochrome b6/f complex
  misc_feature (1)..(191): Homolog of NCBI NO: 401247 NR Description: Cytochrome B6-F complex iron-sulfur subunit 1,
  misc_feature (1)..(191): Homolog of NCBI NO: 2921504 NR Description: cytochrome B6-F complex iron-sulfur subunit
  misc_feature (1)..(191): Homolog of NCBI NO: 3885886 NR Description: Rieske Fe-S precursor protein [Oryza sativa]
  misc_feature (79)..(79): Xaa is any aa, unknown or other
  misc_feature (93)..(93): Xaa is any aa, unknown or other
  misc_feature (110)..(110): Xaa is any aa, unknown or other
  misc_feature (134)..(134): Xaa is any aa, unknown or other
  misc_feature (138)..(138): Xaa is any aa, unknown or other
  misc_feature (142)..(142): Xaa is any aa, unknown or other
  misc_feature (157)..(157): Xaa is any aa, unknown or other
  misc_feature (168)..(168): Xaa is any aa, unknown or other
  misc_feature (174)..(174): Xaa is any aa, unknown or other
  misc_feature (175)..(175): Xaa is any aa, unknown or other
MGRERAQRSIVCQAASSISADRVPDMEKRKLMNLLLLGAISLPTVGMVVPYGAFFVPAGSGNAGGGTYAKDKLGNDITXEAWLNTHGPNDRTXAQGLKGDPTYLVVEQDXTLATYGINAVCTHLGCVVPWNGAXNKFXCPCXGSQYNNQGKVVRGPXPLSLALVHADXDDGKVXXVPWVETDFRTGEDPWWKA

SEQ ID NO: 1741 - DNA, 1141 bp, Zea mays subsp. mays
  misc_feature (1)..(1141): Ceres Seq. ID no. 12349900
  misc_feature: MA Experiment ID: 108535 Result: Up-regulated in Transcription
  misc_feature: MA Experiment 108535 PARAMETER Experiment Name: Zm_Meristem_P Parameter: Age (day) Value: 8
  misc_feature: MA Experiment 108535 PARAMETER Experiment Name: Zm_Meristem_P Parameter: Organism Value: Zea mays
  misc_feature: MA Experiment 108535 PARAMETER Experiment Name: Zm_Meristem_P Parameter: Plant Line Value: 35A19
  misc_feature: MA Experiment 108535 PARAMETER Experiment Name: Zm_Meristem_P Parameter: Tissue Value: Root Meristem vs. Above Root Meristem
  misc_feature: MA Experiment ID: 108689 Result: Up-regulated in Transcription
  misc_feature: MA Experiment 108689 PARAMETER Experiment Name: Zm_Drought_Roots_P Parameter: Age (day) Value: 9
  misc_feature: MA Experiment 108689 PARAMETER Experiment Name: Zm_Drought_Roots_P Parameter: Organism Value: Zea mays
  misc_feature: MA Experiment 108689 PARAMETER Experiment Name: Zm_Drought_Roots_P Parameter: Plant Line Value: 35A19
  misc_feature: MA Experiment 108689 PARAMETER Experiment Name: Zm_Drought_Roots_P Parameter: Timepoint (hr) Value: 24
  misc_feature: MA Experiment 108689 PARAMETER Experiment Name: Zm_Drought_Roots_P Parameter: Tissue Value: Roots
  misc_feature: MA Experiment 108689 PARAMETER Experiment Name: Zm_Drought_Roots_P Parameter: Treatment Value: Drought vs. No Drought
  misc_feature: MA Experiment ID: 20000108 Result: Up-regulated in Transcription
  misc_feature: MA Experiment 20000108 PARAMETER Experiment Name: Zm_Root-Tips_P Parameter: Age (day) Value: 12
  misc_feature: MA Experiment 20000108 PARAMETER Experiment Name: Zm_Root-Tips_P Parameter: Organism Value: Zea mays
  misc_feature: MA Experiment 20000108 PARAMETER Experiment Name: Zm_Root-Tips_P Parameter: Tissue Value: Root tips vs. Root mid region    35
  misc_feature: MA Experiment 20000108 PARAMETER Experiment Name: Zm_Root-Tips_P Parameter: Tissue Value: Root tips vs. Root mid region   Sequence Listing-Misc Features (4)
ctgatcctctccgccatttctgtgcgcatctggagctgttgttctaaacccccaaaccctccgtcctaacctctgcgccaccggcgtcaccaccgccggagccgcagccatgaacgccttcaggttcctcggggacatgacccacctcttctcggtcctcgtcctcctcctcaagatctacgccaccaagtcctgctcaggggtgtcgaggaagacgcaggagctgtacatgttggtgttcgtggcgaggtacctggacctcttcacggattatgtctcgctctacaactcggtgatgaaggtggtgttcatcaccagctcggcggccatcgtgtggtgcatgcgccgccacccgcaggtacgaaggacgtacgacaaggagcaggacaccttccgccacacggtgctcgtcgccgccgcattcctgctcgcgctgatattccacgagcggttcaccttccgtgagatatgctgggcattttcaatctatttggaggcagtggctattctcccacaattagtgttgctccagagaagcagaaatgtggataacttaactggacaatatgttttcttccttggggcctaccgtgcgttttacattctaaactggatttatcgttatttcacggagggtcatcgcagcagatggatcccttggcttgctggtttggtgcaaacagctctgtatgcagatttcttttactattatttcttaagttggaagaacaatgtgaagctcgagttgcctgcttgagcatgcttcgttttgccagaaagcgtgcaagctacgtgactcaagttttatagaatttagttgattatatgggcatggagagacttggtaatgacgtgagcagttgcagttgatgccaaacccttgatcttgtctgcgaaaattggcatttgtgtttcccatggccaagacgatacgattccaaagctaacagatgctgctgcacagaagtaggctagttcctttttgtacctcaatacttttgatatggaaaatcatatacagttcagttggtctgtttaacattcgatttcacttgctccaaacgaaaaatgcgatccaatgttcgtgcgatttctgtgtaaaactgttacacttttgactgtcctcaacaatccatttttt

SEQ ID NO: 1742 - protein, 215 aa, Zea mays subsp. mays
  peptide (1)..(215): Ceres Seq. ID no. 12349901
  misc_feature (1)..(205): Pfam Name: ER lumen protein retaining receptor Pfam Description: ER lumen protein retaining receptor
  misc_feature (1)..(215): Homolog of NCBI NO: 5803048 NR Description: KDEL receptor 1
  misc_feature (1)..(215): Homolog of NCBI NO: 17137442 NR Description: KDEL receptor CG5183-PA [Drosophila melanogaster]
  misc_feature (1)..(214): Homolog of NCBI NO: 22656361 NR Description: endoplasmic reticulum retention receptor
  misc_feature (1)..(215): Homolog of NCBI NO: 14285310 NR Description: ERD2 protein [Scherffelia dubia]
  misc_feature (1)..(215): Homolog of NCBI NO: 9293986 NR Description: ER lumen protein-retaining receptor-like protein
  misc_feature (1)..(215): Homolog of NCBI NO: 18404390 NR Description: ER lumen retaining receptor (HDEL receptor),
  misc_feature (1)..(215): Homolog of NCBI NO: 21592401 NR Description: ER lumen retaining receptor (HDEL receptor),
  misc_feature (1)..(214): Homolog of NCBI NO: 21743051 NR Description: OSJNBa0083D01.1 [Oryza sativa (japonica
  misc_feature (1)..(215): Homolog of NCBI NO: 6685428 NR Description: ER lumen protein retaining receptor (HDEL
  misc_feature (1)..(215): Homolog of NCBI NO: 18397049 NR Description: ER lumen protein retaining receptor
MNAFRFLGDMTHLFSVLVLLLKIYATKSCSGVSRKTQELYMLVFVARYLDLFTDYVSLYNSVMKVVFITSSAAIVWCMRRHPQVRRTYDKEQDTFRHTVLVAAAFLLALIFHERFTFREICWAFSIYLEAVAILPQLVLLQRSRNVDNLTGQYVFFLGAYRAFYILNWIYRYFTEGHRSRWIPWLAGLVQTALYADFFYYYFLSWKNNVKLELPA

SEQ ID NO: 1743 - protein, 206 aa, Zea mays subsp. mays
  peptide (1)..(206): Ceres Seq. ID no. 12349902
  misc_feature (1)..(196): Pfam Name: ER lumen protein retaining receptor Pfam Description: ER lumen protein retaining receptor
  misc_feature (1)..(206): Homolog of NCBI NO: 5803048 NR Description: KDEL receptor 1
  misc_feature (1)..(206): Homolog of NCBI NO: 17137442 NR Description: KDEL receptor CG5183-PA [Drosophila melanogaster]
  misc_feature (1)..(205): Homolog of NCBI NO: 22656361 NR Description: endoplasmic reticulum retention receptor
  misc_feature (1)..(206): Homolog of NCBI NO: 14285310 NR Description: ERD2 protein [Scherffelia dubia]
  misc_feature (1)..(206): Homolog of NCBI NO: 9293986 NR Description: ER lumen protein-retaining receptor-like protein
  misc_feature (1)..(206): Homolog of NCBI NO: 18404390 NR Description: ER lumen retaining receptor (HDEL receptor),
  misc_feature (1)..(206): Homolog of NCBI NO: 21592401 NR Description: ER lumen retaining receptor (HDEL receptor),
  misc_feature (1)..(205): Homolog of NCBI NO: 21743051 NR Description: OSJNBa0083D01.1 [Oryza sativa (japonica
  misc_feature (1)..(206): Homolog of NCBI NO: 6685428 NR Description: ER lumen protein retaining receptor (HDEL
  misc_feature (1)..(206): Homolog of NCBI NO: 18397049 NR Description: ER lumen protein retaining receptor
MTHLFSVLVLLLKIYATKSCSGVSRKTQELYMLVFVARYLDLFTDYVSLYNSVMKVVFITSSAAIVWCMRRHPQVRRTYDKEQDTFRHTVLVAAAFLLALIFHERFTFREICWAFSIYLEAVAILPQLVLLQRSRNVDNLTGQYVFFLGAYRAFYILNWIYRYFTEGHRSRWIPWLAGLVQTALYADFFYYYFLSWKNNVKLELPA

SEQ ID NO: 1744 - protein, 175 aa, Zea mays subsp. mays
  peptide (1)..(175): Ceres Seq. ID no. 12349903
  misc_feature (1)..(165): Pfam Name: ER lumen protein retaining receptor Pfam Description: ER lumen protein retaining receptor
  misc_feature (1)..(175): Homolog of NCBI NO: 5803048 NR Description: KDEL receptor 1
  misc_feature (1)..(175): Homolog of NCBI NO: 17137442 NR Description: KDEL receptor CG5183-PA [Drosophila melanogaster]
  misc_feature (1)..(174): Homolog of NCBI NO: 22656361 NR Description: endoplasmic reticulum retention receptor
  misc_feature (1)..(175): Homolog of NCBI NO: 14285310 NR Description: ERD2 protein [Scherffelia dubia]
  misc_feature (1)..(175): Homolog of NCBI NO: 9293986 NR Description: ER lumen protein-retaining receptor-like protein
  misc_feature (1)..(175): Homolog of NCBI NO: 18404390 NR Description: ER lumen retaining receptor (HDEL receptor),
  misc_feature (1)..(175): Homolog of NCBI NO: 21592401 NR Description: ER lumen retaining receptor (HDEL receptor),
  misc_feature (1)..(174): Homolog of NCBI NO: 21743051 NR Description: OSJNBa0083D01.1 [Oryza sativa (japonica
  misc_feature (1)..(175): Homolog of NCBI NO: 6685428 NR Description: ER lumen protein retaining receptor (HDEL
  misc_feature (1)..(175): Homolog of NCBI NO: 18397049 NR Description: ER lumen protein retaining receptor
MLVFVARYLDLFTDYVSLYNSVMKVVFITSSAAIVWCMRRHPQVRRTYDKEQDTFRHTVLVAAAFLLALIFHERFTFREICWAFSIYLEAVAILPQLVLLQRSRNVDNLTGQYVFFLGAYRAFYILNWIYRYFTEGHRSRWIPWLAGLVQTALYADFFYYYFLSWKNNVKLELPA

SEQ ID NO: 1745 - DNA, 1157 bp, Zea mays subsp. mays
  misc_feature (1)..(1157): Ceres Seq. ID no. 12373468
  misc_feature: MA Experiment ID: 108544 Result: Up-regulated in Transcription
aaaaatttcgagtttttttaaatacactataaccgagagcctgaaaatgggaacaaactagcaactgaagcgtaccaacaaaaaacgcccgattcgcctcgcaaaatcgccgccgccatcgcctactccaccagacgccgatagttccgccttcctttcctgctgcgcgcctgtcgccatggtgaagcggtggcttcggcctcgaggccaaccccgacgtcatgaaccagttcatgtggggactgggggtccccgaggacgtggggttctgcgacgtgtacggcctcgatgacgagttgctcgccatggtgccccagccggtgctcgcggtcctacttctctacccccaggaccggagcaaggagtcccaagcttcagctacctcgtcggtggagaccaaggagcccagcaagaacgtatatttcacaaagcaaactgttgggaatgcctgtggccacagttggtattattcatgcactggggaatgctacttccagaatcaagttaggtgaggggtcatattttgatagattttataaacgaactgctgacatggatcctatccagcgtgctgcatttcttgaggaggacgaggaaatggagaatgctcattccattgccgctactgctggtgacacagaggccaaggacggtgtaattgaacattacatttgtttctcttgtgtcgatggagagctttatgagcttgatggggggacatcacagccaataccccatgggccttccactcctgataccttgttgcaggatgctgcagaagttataaaagcaagaatcgccatgtattcgcagtcaaacaacttcaatgtcatggctctttcaggcaaagcgatatagcattatagcactttcagtcataggcacttgatatcccacatttgctttgcagctgccttagcccaacactgcagcatgttctattgttttcttgccttcgttttattatttaaacacgttaaaacaagataaataaaagcgtggctacagaaaagttcccgttggtagtatcacttactctgtagaagagctaatgtgccgtttcgttcacgaaatgtgacgtaaatgataatagtaatgattcacgttcgaataccggtggtaaaagtttaaataagtcggtatctatttctagtgtt

SEQ ID NO: 1746 - protein, 189 aa, Zea mays subsp. mays
  peptide (1)..(189): Ceres Seq. ID no. 12373469
  misc_feature (57)..(185): Homolog of NCBI NO: 27705170 NR Description: similar to ubiqutin carboxyl-terminal hydrolase
  misc_feature (57)..(185): Homolog of NCBI NO: 7710106 NR Description: ubiquitin carboxyl-terminal esterase L3
  misc_feature (57)..(185): Homolog of NCBI NO: 7522621 NR Description: ubiquitin carboxy-terminal hydrolase-6 (EC
  misc_feature (54)..(185): Homolog of NCBI NO: 5805326 NR Description: ubiquitin carboxyl-terminal hydrolase-6 [Gallus
  misc_feature (57)..(185): Homolog of NCBI NO: 17380334 NR Description: Ubiquitin carboxyl-terminal hydrolase isozyme L3
  misc_feature (57)..(185): Homolog of NCBI NO: 5174741 NR Description: ubiquitin carboxyl-terminal esterase L3
  misc_feature (51)..(129): Homolog of NCBI NO: 7488069 NR Description: probable carboxyl-terminal proteinase -
  misc_feature (51)..(185): Homolog of NCBI NO: 15236549 NR Description: carboxyl-terminal proteinase like protein
  misc_feature (42)..(185): Homolog of NCBI NO: 14140139 NR Description: putative protein [Oryza sativa]
  misc_feature (51)..(185): Homolog of NCBI NO: 38346164 NR Description: OSJNBa0079A21.11 [Oryza sativa (japonica
  misc_feature (57)..(185): Homolog of NCBI NO: 27705170 NR Description: similar to ubiqutin carboxyl-terminal hydrolase
  misc_feature (57)..(185): Homolog of NCBI NO: 7710106 NR Description: ubiquitin carboxyl-terminal esterase L3
  misc_feature (57)..(185): Homolog of NCBI NO: 7522621 NR Description: ubiquitin carboxy-terminal hydrolase-6 (EC
  misc_feature (54)..(185): Homolog of NCBI NO: 5805326 NR Description: ubiquitin carboxyl-terminal hydrolase-6 [Gallus
  misc_feature (57)..(185): Homolog of NCBI NO: 17380334 NR Description: Ubiquitin carboxyl-terminal hydrolase isozyme L3
  misc_feature (57)..(185): Homolog of NCBI NO: 5174741 NR Description: ubiquitin carboxyl-terminal esterase L3
  misc_feature (51)..(129): Homolog of NCBI NO: 7488069 NR Description: probable carboxyl-terminal proteinase -
  misc_feature (51)..(185): Homolog of NCBI NO: 15236549 NR Description: carboxyl-terminal proteinase like protein
  misc_feature (42)..(185): Homolog of NCBI NO: 14140139 NR Description: putative protein [Oryza sativa]
  misc_feature (51)..(185): Homolog of NCBI NO: 38346164 NR Description: OSJNBa0079A21.11 [Oryza sativa (japonica
MTSCSPWCPSRCSRSYFSTPRTGARSPKLQLPRRWRPRSPARTYISQSKLLGMPVATVGIIHALGNATSRIKLGEGSYFDRFYKRTADMDPIQRAAFLEEDEEMENAHSIAATAGDTEAKDGVIEHYICFSCVDGELYELDGGTSQPIPHGPSTPDTLLQDAAEVIKARIAMYSQSNNFNVMALSGKAI

SEQ ID NO: 1747 - protein, 137 aa, Zea mays subsp. mays
  peptide (1)..(137): Ceres Seq. ID no. 12373470
  misc_feature (1)..(133): Homolog of NCBI NO: 15236549 NR Description: carboxyl-terminal proteinase like protein
  misc_feature (1)..(133): Homolog of NCBI NO: 14140139 NR Description: putative protein [Oryza sativa]
  misc_feature (1)..(133): Homolog of NCBI NO: 38346164 NR Description: OSJNBa0079A21.11 [Oryza sativa (japonica
  misc_feature (5)..(133): Homolog of NCBI NO: 27705170 NR Description: similar to ubiqutin carboxyl-terminal hydrolase
  misc_feature (5)..(133): Homolog of NCBI NO: 7710106 NR Description: ubiquitin carboxyl-terminal esterase L3
  misc_feature (5)..(133): Homolog of NCBI NO: 7522621 NR Description: ubiquitin carboxy-terminal hydrolase-6 (EC
  misc_feature (2)..(133): Homolog of NCBI NO: 5805326 NR Description: ubiquitin carboxyl-terminal hydrolase-6 [Gallus
  misc_feature (5)..(133): Homolog of NCBI NO: 17380334 NR Description: Ubiquitin carboxyl-terminal hydrolase isozyme L3
  misc_feature (5)..(133): Homolog of NCBI NO: 5174741 NR Description: ubiquitin carboxyl-terminal esterase L3
  misc_feature (1)..(77): Homolog of NCBI NO: 7488069 NR Description: probable carboxyl-terminal proteinase -
  misc_feature (5)..(133): Homolog of NCBI NO: 27705170 NR Description: similar to ubiqutin carboxyl-terminal hydrolase
  misc_feature (5)..(133): Homolog of NCBI NO: 7710106 NR Description: ubiquitin carboxyl-terminal esterase L3
  misc_feature (5)..(133): Homolog of NCBI NO: 7522621 NR Description: ubiquitin carboxy-terminal hydrolase-6 (EC
  misc_feature (2)..(133): Homolog of NCBI NO: 5805326 NR Description: ubiquitin carboxyl-terminal hydrolase-6 [Gallus
  misc_feature (5)..(133): Homolog of NCBI NO: 17380334 NR Description: Ubiquitin carboxyl-terminal hydrolase isozyme L3
  misc_feature (5)..(133): Homolog of NCBI NO: 5174741 NR Description: ubiquitin carboxyl-terminal esterase L3
  misc_feature (1)..(77): Homolog of NCBI NO: 7488069 NR Description: probable carboxyl-terminal proteinase -
  misc_feature (1)..(133): Homolog of NCBI NO: 15236549 NR Description: carboxyl-terminal proteinase like protein
  misc_feature (1)..(133): Homolog of NCBI NO: 14140139 NR Description: putative protein [Oryza sativa]
  misc_feature (1)..(133): Homolog of NCBI NO: 38346164 NR Description: OSJNBa0079A21.11 [Oryza sativa (japonica
MPVATVGIIHALGNATSRIKLGEGSYFDRFYKRTADMDPIQRAAFLEEDEEMENAHSIAATAGDTEAKDGVIEHYICFSCVDGELYELDGGTSQPIPHGPSTPDTLLQDAAEVIKARIAMYSQSNNFNVMALSGKAI

SEQ ID NO: 1748 - protein, 101 aa, Zea mays subsp. mays
  peptide (1)..(101): Ceres Seq. ID no. 12373471
  misc_feature (1)..(97): Homolog of NCBI NO: 27705170 NR Description: similar to ubiqutin carboxyl-terminal hydrolase
  misc_feature (1)..(97): Homolog of NCBI NO: 7710106 NR Description: ubiquitin carboxyl-terminal esterase L3
  misc_feature (1)..(97): Homolog of NCBI NO: 7522621 NR Description: ubiquitin carboxy-terminal hydrolase-6 (EC
  misc_feature (1)..(97): Homolog of NCBI NO: 5805326 NR Description: ubiquitin carboxyl-terminal hydrolase-6 [Gallus
  misc_feature (1)..(97): Homolog of NCBI NO: 17380334 NR Description: Ubiquitin carboxyl-terminal hydrolase isozyme L3
  misc_feature (1)..(97): Homolog of NCBI NO: 5174741 NR Description: ubiquitin carboxyl-terminal esterase L3
  misc_feature (1)..(41): Homolog of NCBI NO: 7488069 NR Description: probable carboxyl-terminal proteinase -
  misc_feature (1)..(97): Homolog of NCBI NO: 15236549 NR Description: carboxyl-terminal proteinase like protein
  misc_feature (1)..(97): Homolog of NCBI NO: 14140139 NR Description: putative protein [Oryza sativa]
  misc_feature (1)..(97): Homolog of NCBI NO: 38346164 NR Description: OSJNBa0079A21.11 [Oryza sativa (japonica
  misc_feature (1)..(97): Homolog of NCBI NO: 27705170 NR Description: similar to ubiqutin carboxyl-terminal hydrolase
  misc_feature (1)..(97): Homolog of NCBI NO: 7710106 NR Description: ubiquitin carboxyl-terminal esterase L3
  misc_feature (1)..(97): Homolog of NCBI NO: 7522621 NR Description: ubiquitin carboxy-terminal hydrolase-6 (EC
  misc_feature (1)..(97): Homolog of NCBI NO: 5805326 NR Description: ubiquitin carboxyl-terminal hydrolase-6 [Gallus
  misc_feature (1)..(97): Homolog of NCBI NO: 17380334 NR Description: Ubiquitin carboxyl-terminal hydrolase isozyme L3
  misc_feature (1)..(97): Homolog of NCBI NO: 5174741 NR Description: ubiquitin carboxyl-terminal esterase L3
  misc_feature (1)..(41): Homolog of NCBI NO: 7488069 NR Description: probable carboxyl-terminal proteinase -
  misc_feature (1)..(97): Homolog of NCBI NO: 15236549 NR Description: carboxyl-terminal proteinase like protein
  misc_feature (1)..(97): Homolog of NCBI NO: 14140139 NR Description: putative protein [Oryza sativa]
  misc_feature (1)..(97): Homolog of NCBI NO: 38346164 NR Description: OSJNBa0079A21.11 [Oryza sativa (japonica
MDPIQRAAFLEEDEEMENAHSIAATAGDTEAKDGVIEHYICFSCVDGELYELDGGTSQPIPHGPSTPDTLLQDAAEVIKARIAMYSQSNNFNVMALSGKAI

SEQ ID NO: 1749 - DNA, 1886 bp, Zea mays subsp. mays
  misc_feature (1)..(1886): Ceres Seq. ID no. 12369040
  misc_feature: MA Experiment ID: 108528 Result: Up-regulated in Transcription
  misc_feature: MA Experiment 108528 PARAMETER Experiment Name: Zm_Imbibed_Seeds_P Parameter: Age (day) Value: 5 vs. 2
  misc_feature: MA Experiment 108528 PARAMETER Experiment Name: Zm_Imbibed_Seeds_P Parameter: Organism Value: Zea mays
  misc_feature: MA Experiment 108528 PARAMETER Experiment Name: Zm_Imbibed_Seeds_P Parameter: Plant Line Value: 35A19
  misc_feature: MA Experiment 108528 PARAMETER Experiment Name: Zm_Imbibed_Seeds_P Parameter: Tissue Value: Aerial vs. Embryo
  misc_feature: MA Experiment ID: 108545 Result: Up-regulated in Transcription
  misc_feature: MA Experiment 108545 PARAMETER Experiment Name: Zm_Imbibed_Seeds_P Parameter: Age (day) Value: 3 vs. 2
  misc_feature: MA Experiment 108545 PARAMETER Experiment Name: Zm_Imbibed_Seeds_P Parameter: Organism Value: Zea mays
  misc_feature: MA Experiment 108545 PARAMETER Experiment Name: Zm_Imbibed_Seeds_P Parameter: Plant Line Value: 35A19
  misc_feature: MA Experiment 108545 PARAMETER Experiment Name: Zm_Imbibed_Seeds_P Parameter: Tissue Value: Aerial vs. Embryo
  misc_feature: MA Experiment ID: 108547 Result: Up-regulated in Transcription
  misc_feature: MA Experiment 108547 PARAMETER Experiment Name: Zm_Imbibed_Seeds_P Parameter: Age (day) Value: 4 vs. 2
  misc_feature: MA Experiment 108547 PARAMETER Experiment Name: Zm_Imbibed_Seeds_P Parameter: Organism Value: Zea mays
  misc_feature: MA Experiment 108547 PARAMETER Experiment Name: Zm_Imbibed_Seeds_P Parameter: Plant Line Value: 35A19
  misc_feature: MA Experiment 108547 PARAMETER Experiment Name: Zm_Imbibed_Seeds_P Parameter: Tissue Value: Aerial vs. Embryo
  misc_feature: MA Experiment ID: 20000492 Result: Down-regulated in Transcription
  misc_feature: MA Experiment 20000492 PARAMETER Experiment Name: Zm_Hybrid_Seed_Dev_P Parameter: DAP Value: 12
  misc_feature: MA Experiment 20000492 PARAMETER Experiment Name: Zm_Hybrid_Seed_Dev_P Parameter: Organism Value: Zea mays
  misc_feature: MA Experiment 20000492 PARAMETER Experiment Name: Zm_Hybrid_Seed_Dev_P Parameter: Plant Line Value: 35A19
  misc_feature: MA Experiment 20000492 PARAMETER Experiment Name: Zm_Hybrid_Seed_Dev_P Parameter: Tissue Value: Fert Kernel vs. Unfert Floret
  misc_feature: MA Experiment ID: 20000535 Result: Down-regulated in Transcription
  misc_feature: MA Experiment 20000535 PARAMETER Experiment Name: Zm_Hybrid_Seed_Dev_P Parameter: DAP Value: 30 vs. 12
  misc_feature: MA Experiment 20000535 PARAMETER Experiment Name: Zm_Hybrid_Seed_Dev_P Parameter: Organism Value: Zea mays
  misc_feature: MA Experiment 20000535 PARAMETER Experiment Name: Zm_Hybrid_Seed_Dev_P Parameter: Plant Line Value: 35A19
  misc_feature: MA Experiment 20000535 PARAMETER Experiment Name: Zm_Hybrid_Seed_Dev_P Parameter: Tissue Value: Embryo vs. Unfert Floret
gcacgagaccattacctagaacatcctaatcgaaaaaaaccgatcgagcctcgacgagcgagcagaggactcatcctaggtagctaagctgtccgacagcacagcagaccgatacgatacgacgatgatgagtagcaccggcggcgagagcaagctggagagcccgctgctgggcctgcccgcgccgggctcgtcggccggcagcgggcacagccacggcgaggcggtgagcgggcagctggagagcatcctcagcgacgcctccctgccgtggaggcagcggatgctgtcagcgtccatggttgagatgcggctgctcgtgcgcctggccgcgcccgccgtgctcgtctacatgatcaactacctcatgtccatgtccacgcagatcttctcgggacacctcggcacgctcgagctcgccgccgcgtcgctcggcaacaccggcatccaggtcttcgcctatggcctcatgctgggcatggggagcgcggtggagacgctgtgcgggcaggcgtacggcgcgcacaagtacgacatgctgggcatctacttgcagcgctccaccatcctgctgatggccacgggggtgcctctgaccgtgctctacgccttctcccgccccatcctggtcctcctcggggagtcccccgagatcgcctccgccgccgccgtcttcgtgtacggcctcatcccgcagatcttcgcgtacgccgccaacttccccatccagaagttcatgcaggcgcagagcatcatggcccccagtgcgtacatctccgccgccacgctggccgtgcacctcgccctcagctacctcgtcgtgtaccagttcgggctgggcctcctcggcgcgtcgctcatgctcagcgtcagctggtgggtcatcgtcgccgcgcagttcgcctacatcgccaccagccagcggtgccgcctcacctggacgggcttctcgtgggaggccttctcggggctccccggcttcctcaagctgtccctcgcctccgccgtcatgctctgcctcgagacctggtacttccagatactcgtgctcatcgcgggactcctcaaggaccccgagcttgccttggcctcactctctgtctgcatgtcaattacagggtgggtgttcatgatatcagttgggttcaatgcagcagccagcgtaagagtgagcaacgagcttggcgccggcaacccaaagtccgcggcgttctctgtggtggtagtgacgctgctctccttcgtcctgtcggtcataatctccgtcgtcatcctgctgtgccgggactacatcagctacatcttcaccgagggcgacgacgtgtcgcgggcggtcgcccagctcagcccgctgctggcggtcaccctcatcctcaacggcatccagcccgtcctctctggggtagctgtggggtgtggatggcaagcgttggtcgcatacgtcaatgtcggctgctactacatcgtcggcatcccccttgggtgcctcctgggattctacttcgacctaggagcagcgggtatctggagcggtatgatcgggggcaccctgatgcagaccatgatcctggtgtgggttacattcaggacgaactggaacaaggaggttgaagaagcgcagaaaagactgaacaaatgggaagacagtaaagcgcctgtccagtgagcccaagaactaaataaggcttctctgttgccaaaccaagaacgagagacgtgggaaattgatgcaattcaccctgatgcagattcggaaattgatgcaaggttgcaattcagtgtcctgaaatgtctacgaggagaggagaggagaggagatgagatggctggaattttaaatactactcttgcatcacgcaattcaattctgtgttccgttattatat

SEQ ID NO: 1750 - protein, 513 aa, Zea mays subsp. mays
  peptide (1)..(513): Ceres Seq. ID no. 12369041
  misc_feature (82)..(504): Homolog of NCBI NO: 15234633 NR Description: putative protein; protein id: At4g21900.1
  misc_feature (39)..(474): Homolog of NCBI NO: 7487826 NR Description: hypothetical protein T8O5.120 - Arabidopsis
  misc_feature (39)..(513): Homolog of NCBI NO: 21553843 NR Description: unknown [Arabidopsis thaliana]
  misc_feature (39)..(513): Homolog of NCBI NO: 18415793 NR Description: putative protein; protein id: At4g21910.1
  misc_feature (35)..(512): Homolog of NCBI NO: 15081773 NR Description: At1g61890/F8K4_9 [Arabidopsis thaliana]
  misc_feature (35)..(512): Homolog of NCBI NO: 18407368 NR Description: expressed protein
  misc_feature (38)..(508): Homolog of NCBI NO: 22655139 NR Description: unknown protein [Arabidopsis thaliana]
  misc_feature (38)..(508): Homolog of NCBI NO: 15221073 NR Description: unknown protein; protein id: At1g11670.1
  misc_feature (13)..(512): Homolog of NCBI NO: 20466556 NR Description: integral membrane protein, putative [Arabidopsis
  misc_feature (13)..(512): Homolog of NCBI NO: 15233127 NR Description: integral membrane protein, putative
MMSSTGGESKLESPLLGLPAPGSSAGSGHSHGEAVSGQLESILSDASLPWRQRMLSASMVEMRLLVRLAAPAVLVYMINYLMSMSTQIFSGHLGTLELAAASLGNTGIQVFAYGLMLGMGSAVETLCGQAYGAHKYDMLGIYLQRSTILLMATGVPLTVLYAFSRPILVLLGESPEIASAAAVFVYGLIPQIFAYAANFPIQKFMQAQSIMAPSAYISAATLAVHLALSYLVVYQFGLGLLGASLMLSVSWWVIVAAQFAYIATSQRCRLTWTGFSWEAFSGLPGFLKLSLASAVMLCLETWYFQILVLIAGLLKDPELALASLSVCMSITGWVFMISVGFNAAASVRVSNELGAGNPKSAAFSVVVVTLLSFVLSVIISVVILLCRDYISYIFTEGDDVSRAVAQLSPLLAVTLILNGIQPVLSGVAVGCGWQALVAYVNVGCYYIVGIPLGCLLGFYFDLGAAGIWSGMIGGTLMQTMILVWVTFRTNWNKEVEEAQKRLNKWEDSKAPVQ

SEQ ID NO: 1751 - protein, 512 aa, Zea mays subsp. mays
  peptide (1)..(512): Ceres Seq. ID no. 12369042
  misc_feature (81)..(503): Homolog of NCBI NO: 15234633 NR Description: putative protein; protein id: At4g21900.1
  misc_feature (38)..(473): Homolog of NCBI NO: 7487826 NR Description: hypothetical protein T8O5.120 - Arabidopsis
  misc_feature (38)..(512): Homolog of NCBI NO: 21553843 NR Description: unknown [Arabidopsis thaliana]
  misc_feature (38)..(512): Homolog of NCBI NO: 18415793 NR Description: putative protein; protein id: At4g21910.1
  misc_feature (34)..(511): Homolog of NCBI NO: 15081773 NR Description: At1g61890/F8K4_9 [Arabidopsis thaliana]
  misc_feature (34)..(511): Homolog of NCBI NO: 18407368 NR Description: expressed protein
  misc_feature (37)..(507): Homolog of NCBI NO: 22655139 NR Description: unknown protein [Arabidopsis thaliana]
  misc_feature (37)..(507): Homolog of NCBI NO: 15221073 NR Description: unknown protein; protein id: At1g11670.1
  misc_feature (12)..(511): Homolog of NCBI NO: 20466556 NR Description: integral membrane protein, putative [Arabidopsis
  misc_feature (12)..(511): Homolog of NCBI NO: 15233127 NR Description: integral membrane protein, putative
MSSTGGESKLESPLLGLPAPGSSAGSGHSHGEAVSGQLESILSDASLPWRQRMLSASMVEMRLLVRLAAPAVLVYMINYLMSMSTQIFSGHLGTLELAAASLGNTGIQVFAYGLMLGMGSAVETLCGQAYGAHKYDMLGIYLQRSTILLMATGVPLTVLYAFSRPILVLLGESPEIASAAAVFVYGLIPQIFAYAANFPIQKFMQAQSIMAPSAYISAATLAVHLALSYLVVYQFGLGLLGASLMLSVSWWVIVAAQFAYIATSQRCRLTWTGFSWEAFSGLPGFLKLSLASAVMLCLETWYFQILVLIAGLLKDPELALASLSVCMSITGWVFMISVGFNAAASVRVSNELGAGNPKSAAFSVVVVTLLSFVLSVIISVVILLCRDYISYIFTEGDDVSRAVAQLSPLLAVTLILNGIQPVLSGVAVGCGWQALVAYVNVGCYYIVGIPLGCLLGFYFDLGAAGIWSGMIGGTLMQTMILVWVTFRTNWNKEVEEAQKRLNKWEDSKAPVQ

SEQ ID NO: 1752 - protein, 460 aa, Zea mays subsp. mays
  peptide (1)..(460): Ceres Seq. ID no. 12369043
  misc_feature (29)..(451): Homolog of NCBI NO: 15234633 NR Description: putative protein; protein id: At4g21900.1
  misc_feature (1)..(421): Homolog of NCBI NO: 7487826 NR Description: hypothetical protein T8O5.120 - Arabidopsis
  misc_feature (1)..(460): Homolog of NCBI NO: 21553843 NR Description: unknown [Arabidopsis thaliana]
  misc_feature (1)..(460): Homolog of NCBI NO: 18415793 NR Description: putative protein; protein id: At4g21910.1
  misc_feature (1)..(459): Homolog of NCBI NO: 15081773 NR Description: At1g61890/F8K4_9 [Arabidopsis thaliana]
  misc_feature (1)..(459): Homolog of NCBI NO: 18407368 NR Description: expressed protein
  misc_feature (1)..(455): Homolog of NCBI NO: 22655139 NR Description: unknown protein [Arabidopsis thaliana]
  misc_feature (1)..(455): Homolog of NCBI NO: 15221073 NR Description: unknown protein; protein id: At1g11670.1
  misc_feature (1)..(459): Homolog of NCBI NO: 20466556 NR Description: integral membrane protein, putative [Arabidopsis
  misc_feature (1)..(459): Homolog of NCBI NO: 15233127 NR Description: integral membrane protein, putative
MLSASMVEMRLLVRLAAPAVLVYMINYLMSMSTQIFSGHLGTLELAAASLGNTGIQVFAYGLMLGMGSAVETLCGQAYGAHKYDMLGIYLQRSTILLMATGVPLTVLYAFSRPILVLLGESPEIASAAAVFVYGLIPQIFAYAANFPIQKFMQAQSIMAPSAYISAATLAVHLALSYLVVYQFGLGLLGASLMLSVSWWVIVAAQFAYIATSQRCRLTWTGFSWEAFSGLPGFLKLSLASAVMLCLETWYFQILVLIAGLLKDPELALASLSVCMSITGWVFMISVGFNAAASVRVSNELGAGNPKSAAFSVVVVTLLSFVLSVIISVVILLCRDYISYIFTEGDDVSRAVAQLSPLLAVTLILNGIQPVLSGVAVGCGWQALVAYVNVGCYYIVGIPLGCLLGFYFDLGAAGIWSGMIGGTLMQTMILVWVTFRTNWNKEVEEAQKRLNKWEDSKAPVQ

SEQ ID NO: 1753 - DNA, 1588 bp, Zea mays subsp. mays
  misc_feature (1)..(1588): Ceres Seq. ID no. 12411029
  misc_feature: MA Experiment ID: 20000477 Result: Down-regulated in Transcription
  misc_feature: MA Experiment 20000477 PARAMETER Experiment Name: Zm_5mM_SA_P Parameter: Age (day) Value: 10
  misc_feature: MA Experiment 20000477 PARAMETER Experiment Name: Zm_5mM_SA_P Parameter: Organism Value: Zea mays
  misc_feature: MA Experiment 20000477 PARAMETER Experiment Name: Zm_5mM_SA_P Parameter: Plant Line Value: 35A19
  misc_feature: MA Experiment 20000477 PARAMETER Experiment Name: Zm_5mM_SA_P Parameter: Timepoint (hr) Value: 48
  misc_feature: MA Experiment 20000477 PARAMETER Experiment Name: Zm_5mM_SA_P Parameter: Tissue Value: Aerial
  misc_feature: MA Experiment 20000477 PARAMETER Experiment Name: Zm_5mM_SA_P Parameter: Treatment Value: 5mM SA vs. No Treatment
  misc_feature: MA Experiment ID: 20000478 Result: Down-regulated in Transcription
  misc_feature: MA Experiment 20000478 PARAMETER Experiment Name: Zm_5mM_SA_P Parameter: Age (day) Value: 11
  misc_feature: MA Experiment 20000478 PARAMETER Experiment Name: Zm_5mM_SA_P Parameter: Organism Value: Zea mays
  misc_feature: MA Experiment 20000478 PARAMETER Experiment Name: Zm_5mM_SA_P Parameter: Plant Line Value: 35A19
  misc_feature: MA Experiment 20000478 PARAMETER Experiment Name: Zm_5mM_SA_P Parameter: Timepoint (hr) Value: 72
  misc_feature: MA Experiment 20000478 PARAMETER Experiment Name: Zm_5mM_SA_P Parameter: Tissue Value: Aerial
  misc_feature: MA Experiment 20000478 PARAMETER Experiment Name: Zm_5mM_SA_P Parameter: Treatment Value: 5mM SA vs. No Treatment
accaaaaggggtttcggcatggatggatagcacacagcgagcgagcgagagcggtgagcccggccaccagcgccggaggccgtcgtcgtcttactagccgacgctcgacttgggcatgaattgctagccgcgcgggtgagagattgctaggtagccagctaggtacggtgtggggagttgaatcggaggtctgccgctcgaggcggcggcggcagaaggccggtaggatgaagaagctccactggctggtgcggttcctgttcgggccggtgccggtctacttctcggcgctggccatcctcatcgtgctcaccaacgcgcagtacttcgggctggtgggcgtcggcgtggcgccgcgcaccgcgaagctggcctcctcggcgcccgtggtcagcgtcatgaagtactgcgacatcttccgcggcgagtgggtgccggacgcggaggcgccctactacaaccacaagacgtgccacatgatccaggagcaccagaactgcctcaagtacggccgccccgacctgggcttcctcaagtggcggtggcggccctccggatgcgagctgccgcgcttcgacccgctgcagttcctgcagttcgcccgcgggaagtcgctggccttcgtcggggactcgctggcgcggaaccacatgcagtcgctgctctgcctcctgtcccaggtggcgtatcccaaggacctgtcggcgaacccgtcggaccagaacaaggtgtaccactaccgggcgtacaacttcaccatcagcatgttctggtcgccgttcctggtgcgcgcccgggagcccgaccacgacggccccgcgcacacgggccactggagcctctacctggacgagcccgacgacaagtgggtgtcccagatgccccgcttcgactacgtgctggtgtcggcggccaactggttctcccgcccctccctcttctacgagcggcggcgcctcgtcgggtgcagcttctgcagccgccagtacggcgtgcccgacctgacgctctactactcgcagcgccgcgcgtggcgcgtggcgctgcgcgccatcaacgacctggagcgcctgcgagggcgcgtcatcgtgcgcatgctctccccgatgtcgcacttcgagaacgggacctgggaccacggcggcgactgcaggcgcacgcagccgctgcgggcgaaccagaccgccatggagggccgcgacctgcacttctacaccgcgcagatggaggagttccgcgccgcggagaaggccgccgccgagaaggggcggcgcctgatgctcatggacgccacggcggcgatgctgatgcggcccgacggccaccccagccgctacgggcactggcccaacgagaaggtgcagctctacaacgactgcatccactggtgcctcccgggacccatcgacatctggaacgacatgctcttccagatgctcctcgcctagcagcaagcagcaaagattaaaaaaaaaactcagcaattcggtcgccggtaaccgtgcacagattggccttcttttttttgccttgtttcgtttttttaaaaaaagaagaaaatggtgcaattttgacaagcaaggattcg

SEQ ID NO: 1754 - protein, 406 aa, Zea mays subsp. mays
  peptide (1)..(406): Ceres Seq. ID no. 12411030
  misc_feature (232)..(404): Pfam Name: Arabidopsis proteins of unknown function Pfam Description: Arabidopsis proteins of unknown function
  misc_feature (71)..(405): Homolog of NCBI NO: 25518737 NR Description: hypothetical protein F6F3.23 [imported] -
  misc_feature (17)..(405): Homolog of NCBI NO: 28393189 NR Description: unknown protein [Arabidopsis thaliana]
  misc_feature (17)..(405): Homolog of NCBI NO: 15234058 NR Description: hypothetical protein; protein id: At4g01080.1
  misc_feature (56)..(405): Homolog of NCBI NO: 30678135 NR Description: expressed protein [Arabidopsis thaliana]
  misc_feature (1)..(404): Homolog of NCBI NO: 15232914 NR Description: hypothetical protein
  misc_feature (61)..(404): Homolog of NCBI NO: 15237211 NR Description: putative protein; protein id: At5g15890.1
  misc_feature (54)..(404): Homolog of NCBI NO: 15237213 NR Description: putative protein; protein id: At5g15900.1
  misc_feature (20)..(405): Homolog of NCBI NO: 34898638 NR Description: contains ESTs
  misc_feature (9)..(404): Homolog of NCBI NO: 34911888 NR Description: OSJNBb0032K15.21 [Oryza sativa (japonica
  misc_feature (3)..(405): Homolog of NCBI NO: 34911880 NR Description: OSJNBb0032K15.17 [Oryza sativa (japonica
MKKLHWLVRFLFGPVPVYFSALAILIVLTNAQYFGLVGVGVAPRTAKLASSAPVVSVMKYCDIFRGEWVPDAEAPYYNHKTCHMIQEHQNCLKYGRPDLGFLKWRWRPSGCELPRFDPLQFLQFARGKSLAFVGDSLARNHMQSLLCLLSQVAYPKDLSANPSDQNKVYHYRAYNFTISMFWSPFLVRAREPDHDGPAHTGHWSLYLDEPDDKWVSQMPRFDYVLVSAANWFSRPSLFYERRRLVGCSFCSRQYGVPDLTLYYSQRRAWRVALRAINDLERLRGRVIVRMLSPMSHFENGTWDHGGDCRRTQPLRANQTAMEGRDLHFYTAQMEEFRAAEKAAAEKGRRLMLMDATAAMLMRPDGHPSRYGHWPNEKVQLYNDCIHWCLPGPIDIWNDMLFQMLLA

SEQ ID NO: 1755 - protein, 349 aa, Zea mays subsp. mays
  peptide (1)..(349): Ceres Seq. ID no. 12411031
  misc_feature (175)..(347): Pfam Name: Arabidopsis proteins of unknown function Pfam Description: Arabidopsis proteins of unknown function
  misc_feature (14)..(348): Homolog of NCBI NO: 25518737 NR Description: hypothetical protein F6F3.23 [imported] -
  misc_feature (1)..(348): Homolog of NCBI NO: 28393189 NR Description: unknown protein [Arabidopsis thaliana]
  misc_feature (1)..(348): Homolog of NCBI NO: 15234058 NR Description: hypothetical protein; protein id: At4g01080.1
  misc_feature (1)..(348): Homolog of NCBI NO: 30678135 NR Description: expressed protein [Arabidopsis thaliana]
  misc_feature (1)..(347): Homolog of NCBI NO: 15232914 NR Description: hypothetical protein
  misc_feature (4)..(347): Homolog of NCBI NO: 15237211 NR Description: putative protein; protein id: At5g15890.1
  misc_feature (1)..(347): Homolog of NCBI NO: 15237213 NR Description: putative protein; protein id: At5g15900.1
  misc_feature (1)..(348): Homolog of NCBI NO: 34898638 NR Description: contains ESTs
  misc_feature (1)..(347): Homolog of NCBI NO: 34911888 NR Description: OSJNBb0032K15.21 [Oryza sativa (japonica
  misc_feature (1)..(348): Homolog of NCBI NO: 34911880 NR Description: OSJNBb0032K15.17 [Oryza sativa (japonica
MKYCDIFRGEWVPDAEAPYYNHKTCHMIQEHQNCLKYGRPDLGFLKWRWRPSGCELPRFDPLQFLQFARGKSLAFVGDSLARNHMQSLLCLLSQVAYPKDLSANPSDQNKVYHYRAYNFTISMFWSPFLVRAREPDHDGPAHTGHWSLYLDEPDDKWVSQMPRFDYVLVSAANWFSRPSLFYERRRLVGCSFCSRQYGVPDLTLYYSQRRAWRVALRAINDLERLRGRVIVRMLSPMSHFENGTWDHGGDCRRTQPLRANQTAMEGRDLHFYTAQMEEFRAAEKAAAEKGRRLMLMDATAAMLMRPDGHPSRYGHWPNEKVQLYNDCIHWCLPGPIDIWNDMLFQMLLA

SEQ ID NO: 1756 - protein, 323 aa, Zea mays subsp. mays
  peptide (1)..(323): Ceres Seq. ID no. 12411032
  misc_feature (149)..(321): Pfam Name: Arabidopsis proteins of unknown function Pfam Description: Arabidopsis proteins of unknown function
  misc_feature (1)..(321): Homolog of NCBI NO: 15237213 NR Description: putative protein; protein id: At5g15900.1
  misc_feature (1)..(322): Homolog of NCBI NO: 34898638 NR Description: contains ESTs
  misc_feature (1)..(322): Homolog of NCBI NO: 25518737 NR Description: hypothetical protein F6F3.23 [imported] -
  misc_feature (1)..(322): Homolog of NCBI NO: 15234058 NR Description: hypothetical protein; protein id: At4g01080.1
  misc_feature (1)..(321): Homolog of NCBI NO: 15232914 NR Description: hypothetical protein
  misc_feature (1)..(321): Homolog of NCBI NO: 15237211 NR Description: putative protein; protein id: At5g15890.1
  misc_feature (1)..(322): Homolog of NCBI NO: 30678135 NR Description: expressed protein [Arabidopsis thaliana]
  misc_feature (1)..(322): Homolog of NCBI NO: 28393189 NR Description: unknown protein [Arabidopsis thaliana]
  misc_feature (1)..(321): Homolog of NCBI NO: 34911888 NR Description: OSJNBb0032K15.21 [Oryza sativa (japonica
  misc_feature (1)..(322): Homolog of NCBI NO: 34911880 NR Description: OSJNBb0032K15.17 [Oryza sativa (japonica
MIQEHQNCLKYGRPDLGFLKWRWRPSGCELPRFDPLQFLQFARGKSLAFVGDSLARNHMQSLLCLLSQVAYPKDLSANPSDQNKVYHYRAYNFTISMFWSPFLVRAREPDHDGPAHTGHWSLYLDEPDDKWVSQMPRFDYVLVSAANWFSRPSLFYERRRLVGCSFCSRQYGVPDLTLYYSQRRAWRVALRAINDLERLRGRVIVRMLSPMSHFENGTWDHGGDCRRTQPLRANQTAMEGRDLHFYTAQMEEFRAAEKAAAEKGRRLMLMDATAAMLMRPDGHPSRYGHWPNEKVQLYNDCIHWCLPGPIDIWNDMLFQMLLA

SEQ ID NO: 1757 - DNA, 1576 bp, Zea mays subsp. mays
  misc_feature (1)..(1576): Ceres Seq. ID no. 12351922
  misc_feature: MA Experiment ID: 108522 Result: Down-regulated in Transcription
  misc_feature: MA Experiment 108522 PARAMETER Experiment Name: Zm_42deg_Heat_P Parameter: Age (day) Value: 8
  misc_feature: MA Experiment 108522 PARAMETER Experiment Name: Zm_42deg_Heat_P Parameter: Organism Value: Zea mays
  misc_feature: MA Experiment 108522 PARAMETER Experiment Name: Zm_42deg_Heat_P Parameter: Plant Line Value: 35A19
  misc_feature: MA Experiment 108522 PARAMETER Experiment Name: Zm_42deg_Heat_P Parameter: Temperature (deg C) Value: 42 vs. 22
  misc_feature: MA Experiment 108522 PARAMETER Experiment Name: Zm_42deg_Heat_P Parameter: Timepoint (hr) Value: 1
  misc_feature: MA Experiment 108522 PARAMETER Experiment Name: Zm_42deg_Heat_P Parameter: Tissue Value: Aerial
  misc_feature: MA Experiment ID: 108544 Result: Up-regulated in Transcription
agatacccgttcatccctcgctctcgctgccacttctcccgttcggcctctttttccttccaccaatggaagctctcacagcccgctcctccgtactctcgccgccggggattgccggagacacctcgccctcccttcccctgcccctccgccgagcctccgccgcgtttcttgggcctcgcaggagcccctccgccctcgccatctccacgcgctggctgcgcgctccgcctcgacgcggcggccgcctgctcgcgggggaaggggaagaagtgccccccgaccccgccgatgacgcggctggccgggcggaagattttctagtactcgagaataatgtaactctacgccaaagcaatgacatggataccattaaacatgatgatgctggcacttctggaattggtgggagtaacactggtggctctaggactggcctattcagaacacctatttcaggtggtgtgcacagtgcaactgctgttcatgatttaccaccaccagctttggctgttcgcaacctcatggaacaggcaaggtttgctcatctgtgcactgtaatgtctcggatgcatcaccgccgtgagggatacccattcggttccctagtagattttgcacctgacccatttggccacccgatcttctcattatccccactagctatccacacaagaaatttgttggcagacccaagatgcacccttgttgtacaggttcctggatggagtgggctatcaaatgcacgagtaactatctttggcgatgtcattccgttgcccactgaacaacaggaatgggctcatcagcagtatgtttcaaagcaccagcagtgggcatcccaacagtggggtaacttttactattacagaatgcacacaataagtgacatatatttcattggaggttttggtactgttgcttgggtagatgtgaacgaatatgaggctctgcaacctgacaagattgctatggatggaggggaacaaaatctgaaggaactcaacgcaatgttctcaaagcctctgaaagagcttttgtcaactgatgaaggagaggtagacgatgttgctcttatttcaatggacagcaaaggtatcgatatccgtgtccgacaaggtgcacagttcaacatccagagggtgccctttgaggtggatcacagcgtcgaaacactagatgaagccacggaagctctcaggaggataatcagcaagtctaggtggcacacaaagagctcagtcataggacgcccttgaaagctgaagctggaggctctatagaacagtttgtacagtgcggcagcagtctctactacggtatgtgccaataaggggaactccgttccagagtttcgtctactgccaagggcctcgtgtttgtgggtgggttgaataaacacgcaatttgagatgatgctgttttgaccatgaatttagattgaacgcacatcggcaaaaggatttaatgtgaagttgtcgatgggttgaaaaagatgtgaccatctctgacctgcttcattcttgaggaattgaggataaagcacatttgaacatgcgcatgccattttgttttt

SEQ ID NO: 1758 - protein, 418 aa, Zea mays subsp. mays
  peptide (1)..(418): Ceres Seq. ID no. 12351923
  misc_feature (166)..(383): Homolog of NCBI NO: 34393557 NR Description: putative root border cell-specific protein
  misc_feature (163)..(393): Homolog of NCBI NO: 22962352 NR Description: hypothetical protein [Rhodopseudomonas palustris]
  misc_feature (183)..(323): Homolog of NCBI NO: 6006853 NR Description: unknown protein [Arabidopsis thaliana]
  misc_feature (183)..(383): Homolog of NCBI NO: 30678976 NR Description: auxin-regulated protein [Arabidopsis thaliana]
  misc_feature (183)..(383): Homolog of NCBI NO: 18396698 NR Description: auxin-regulated protein
  misc_feature (140)..(405): Homolog of NCBI NO: 11994274 NR Description: gb|AAF00629.1~gene_id:MSA6.18~similar to unknown
  misc_feature (140)..(405): Homolog of NCBI NO: 15232479 NR Description: unknown protein
  misc_feature (129)..(403): Homolog of NCBI NO: 34905136 NR Description: P0700D12.12 [Oryza sativa (japonica
  misc_feature (118)..(409): Homolog of NCBI NO: 18377805 NR Description: unknown protein [Arabidopsis thaliana]
  misc_feature (118)..(409): Homolog of NCBI NO: 15217955 NR Description: unknown protein
IPVHPSLSLPLLPFGLFFLPPMEALTARSSVLSPPGIAGDTSPSLPLPLRRASAAFLGPRRSPSALAISTRWLRAPPRRGGRLLAGEGEEVPPDPADDAAGRAEDFLVLENNVTLRQSNDMDTIKHDDAGTSGIGGSNTGGSRTGLFRTPISGGVHSATAVHDLPPPALAVRNLMEQARFAHLCTVMSRMHHRREGYPFGSLVDFAPDPFGHPIFSLSPLAIHTRNLLADPRCTLVVQVPGWSGLSNARVTIFGDVIPLPTEQQEWAHQQYVSKHQQWASQQWGNFYYYRMHTISDIYFIGGFGTVAWVDVNEYEALQPDKIAMDGGEQNLKELNAMFSKPLKELLSTDEGEVDDVALISMDSKGIDIRVRQGAQFNIQRVPFEVDHSVETLDEATEALRRIISKSRWHTKSSVIGRP

SEQ ID NO: 1759 - protein, 397 aa, Zea mays subsp. mays
  peptide (1)..(397): Ceres Seq. ID no. 12351924
  misc_feature (145)..(362): Homolog of NCBI NO: 34393557 NR Description: putative root border cell-specific protein
  misc_feature (142)..(372): Homolog of NCBI NO: 22962352 NR Description: hypothetical protein [Rhodopseudomonas palustris]
  misc_feature (162)..(302): Homolog of NCBI NO: 6006853 NR Description: unknown protein [Arabidopsis thaliana]
  misc_feature (162)..(362): Homolog of NCBI NO: 30678976 NR Description: auxin-regulated protein [Arabidopsis thaliana]
  misc_feature (162)..(362): Homolog of NCBI NO: 18396698 NR Description: auxin-regulated protein
  misc_feature (119)..(384): Homolog of NCBI NO: 11994274 NR Description: gb|AAF00629.1~gene_id:MSA6.18~similar to unknown
  misc_feature (119)..(384): Homolog of NCBI NO: 15232479 NR Description: unknown protein
  misc_feature (108)..(382): Homolog of NCBI NO: 34905136 NR Description: P0700D12.12 [Oryza sativa (japonica
  misc_feature (97)..(388): Homolog of NCBI NO: 18377805 NR Description: unknown protein [Arabidopsis thaliana]
  misc_feature (97)..(388): Homolog of NCBI NO: 15217955 NR Description: unknown protein
MEALTARSSVLSPPGIAGDTSPSLPLPLRRASAAFLGPRRSPSALAISTRWLRAPPRRGGRLLAGEGEEVPPDPADDAAGRAEDFLVLENNVTLRQSNDMDTIKHDDAGTSGIGGSNTGGSRTGLFRTPISGGVHSATAVHDLPPPALAVRNLMEQARFAHLCTVMSRMHHRREGYPFGSLVDFAPDPFGHPIFSLSPLAIHTRNLLADPRCTLVVQVPGWSGLSNARVTIFGDVIPLPTEQQEWAHQQYVSKHQQWASQQWGNFYYYRMHTISDIYFIGGFGTVAWVDVNEYEALQPDKIAMDGGEQNLKELNAMFSKPLKELLSTDEGEVDDVALISMDSKGIDIRVRQGAQFNIQRVPFEVDHSVETLDEATEALRRIISKSRWHTKSSVIGRP

SEQ ID NO: 1760 - protein, 298 aa, Zea mays subsp. mays
  peptide (1)..(298): Ceres Seq. ID no. 12351925
  misc_feature (46)..(263): Homolog of NCBI NO: 34393557 NR Description: putative root border cell-specific protein
  misc_feature (43)..(273): Homolog of NCBI NO: 22962352 NR Description: hypothetical protein [Rhodopseudomonas palustris]
  misc_feature (63)..(203): Homolog of NCBI NO: 6006853 NR Description: unknown protein [Arabidopsis thaliana]
  misc_feature (63)..(263): Homolog of NCBI NO: 30678976 NR Description: auxin-regulated protein [Arabidopsis thaliana]
  misc_feature (63)..(263): Homolog of NCBI NO: 18396698 NR Description: auxin-regulated protein
  misc_feature (20)..(285): Homolog of NCBI NO: 11994274 NR Description: gb|AAF00629.1~gene_id:MSA6.18~similar to unknown
  misc_feature (20)..(285): Homolog of NCBI NO: 15232479 NR Description: unknown protein
  misc_feature (9)..(283): Homolog of NCBI NO: 34905136 NR Description: P0700D12.12 [Oryza sativa (japonica
  misc_feature (1)..(289): Homolog of NCBI NO: 18377805 NR Description: unknown protein [Arabidopsis thaliana]
  misc_feature (1)..(289): Homolog of NCBI NO: 15217955 NR Description: unknown protein
MDTIKHDDAGTSGIGGSNTGGSRTGLFRTPISGGVHSATAVHDLPPPALAVRNLMEQARFAHLCTVMSRMHHRREGYPFGSLVDFAPDPFGHPIFSLSPLAIHTRNLLADPRCTLVVQVPGWSGLSNARVTIFGDVIPLPTEQQEWAHQQYVSKHQQWASQQWGNFYYYRMHTISDIYFIGGFGTVAWVDVNEYEALQPDKIAMDGGEQNLKELNAMFSKPLKELLSTDEGEVDDVALISMDSKGIDIRVRQGAQFNIQRVPFEVDHSVETLDEATEALRRIISKSRWHTKSSVIGRP

SEQ ID NO: 1761 - DNA, 1388 bp, Zea mays subsp. mays
  misc_feature (1)..(1388): Ceres Seq. ID no. 12588453
  misc_feature: MA Experiment ID: 20000492 Result: Up-regulated in Transcription
  misc_feature: MA Experiment 20000492 PARAMETER Experiment Name: Zm_Hybrid_Seed_Dev_P Parameter: DAP Value: 12
  misc_feature: MA Experiment 20000492 PARAMETER Experiment Name: Zm_Hybrid_Seed_Dev_P Parameter: Organism Value: Zea mays
  misc_feature: MA Experiment 20000492 PARAMETER Experiment Name: Zm_Hybrid_Seed_Dev_P Parameter: Plant Line Value: 35A19
  misc_feature: MA Experiment 20000492 PARAMETER Experiment Name: Zm_Hybrid_Seed_Dev_P Parameter: Tissue Value: Fert Kernel vs. Unfert Floret
aacgcctcacgccatgcgactcgtcacggcctcggcgtgccgcctgcgtgcccggtgcccgtgcggccgtgacgaacgacactgacgagcaaagcaaagccaacggagccgagcgagacgacgagaccgcgattgctagctagctagttcgggcagcgagcggggtgagacggctatggcgtgctgctccgccgtcctgcaccatccgctgggcttctcactcaccccgtgctccgcctcccgagccccaccgcgcatccagcgcgtgggcgtggcaactccctcggccgcctccgcccgccctctttctcgcgccaggatctcaccgcgctgcacctactccggtggcgccagcgctgcccctggtcctggggagctacccgcggcggcgctccgacgggtccttgagatgccgggtgcgcaccaggcgcccgcctgctacgacgcgctgagcgcacgcctcgtcgagcgcgccgagttcagggcctgcttcacgagcggtttctcaatctctgccgcacggcttggattaccagatgttggtctcatctcgtacggggaaatgatcgatcaggggcgtctgatgactgaagcagtttcaatccctgtgatcggtgatgcggataatggttacggaaactgtatgaatgttaagaggacagtgaaaggatttattaatgctggttttgctggaattattcttgaagatcaggtgtcaccaaaggcatgtggacacacacaaggaaggaaggttgtctcaagggaggaagcaattatgcacataaaagctgctgttgatgccaggaatgagagtggctctgatattgttattgtggcaaggacagattctcgtcaagctgtgtctcttaatgaagcattatggagagtacgggcctttgctgatgctggagcagatgttctattcattgatgccctcgcctcaagggaagaaatgaaggcattttgcgctatcgcgcctggagttccaaaaatggccaacatgttagaaggtggtggtaaaactcctatactgagccctgttgaactggaagaaataggttataaaatcatagcctatccattatctctaattggtgtatcgatgcgtgcaatggagtttatggaggtgggctgcattggacaagctcgcatctggaaattgctgggtgtcttgaaccttttgggtgacagaaagttatctcatgtacaaaatgtttacacagcccagttgctaccaattgctgatttgtgtacttcttgggctttaccacttgcacggttcagaaacctgcactatgtaaggggatgttgatggcaattgacctcattttgtaaatgatcctcgtttatcttggattcatttttagtgttcagtttggcagttgacc

SEQ ID NO: 1762 - protein, 378 aa, Zea mays subsp. mays
  peptide (1)..(378): Ceres Seq. ID no. 12588454
  misc_feature (70)..(308): Pfam Name: Isocitrate lyase family Pfam Description: Isocitrate lyase family
  misc_feature (1)..(314): Homolog of NCBI NO: 32490267 NR Description: OSJNBb0116K07.9 [Oryza sativa (japonica
  misc_feature (66)..(314): Homolog of NCBI NO: 38347227 NR Description: OSJNBa0044M19.9 [Oryza sativa (japonica
  misc_feature (1)..(314): Homolog of NCBI NO: 30689278 NR Description: carboxyphosphonoenolpyruvate mutase -related thaliana] >gi|26450281|dbj|BAC42257.1| putative mutase [Arabidopsis thaliana] >gi|28827730|gb|AAO50709.1|
  misc_feature (1)..(314): Homolog of NCBI NO: 30689282 NR Description: carboxyphosphonoenolpyruvate mutase -related
  misc_feature (1)..(314): Homolog of NCBI NO: 25408843 NR Description: probable carboxyphosphonoenolpyruvate mutase - Arabidopsis thaliana >gi|3763927|gb|AAC64307.1| putative
  misc_feature (73)..(313): Homolog of NCBI NO: 23043034 NR Description: hypothetical protein [Trichodesmium erythraeum
  misc_feature (73)..(309): Homolog of NCBI NO: 17229355 NR Description: carboxyphosphonoenolpyruvate phosphonomutase sp. PCC 7120] >gi|25324632|pir||AI2038
  misc_feature (71)..(305): Homolog of NCBI NO: 33599708 NR Description: carboxyvinyl-carboxyphosphonate phosphorylmutase
  misc_feature (86)..(314): Homolog of NCBI NO: 40747280 NR Description: hypothetical protein AN9369.2 [Aspergillus
  misc_feature (66)..(313): Homolog of NCBI NO: 40739091 NR Description: hypothetical protein AN6882.2 [Aspergillus
MACCSAVLHHPLGFSLTPCSASRAPPRIQRVGVATPSAASARPLSRARISPRCTYSGGASAAPGPGELPAAALRRVLEMPGAHQAPACYDALSARLVERAEFRACFTSGFSISAARLGLPDVGLISYGEMIDQGRLMTEAVSIPVIGDADNGYGNCMNVKRTVKGFINAGFAGIILEDQVSPKACGHTQGRKVVSREEAIMHIKAAVDARNESGSDIVIVARTDSRQAVSLNEALWRVRAFADAGADVLFIDALASREEMKAFCAIAPGVPKMANMLEGGGKTPILSPVELEEIGYKIIAYPLSLIGVSMRAMEFMEVGCIGQARIWKLLGVLNLLGDRKLSHVQNVYTAQLLPIADLCTSWALPLARFRNLHYVRGC

SEQ ID NO: 1763 - protein, 300 aa, Zea mays subsp. mays
  peptide (1)..(300): Ceres Seq. ID no. 12588455
  misc_feature (1)..(230): Pfam Name: Isocitrate lyase family Pfam Description: Isocitrate lyase family
  misc_feature (1)..(236): Homolog of NCBI NO: 32490267 NR Description: OSJNBb0116K07.9 [Oryza sativa (japonica
  misc_feature (1)..(236): Homolog of NCBI NO: 38347227 NR Description: OSJNBa0044M19.9 [Oryza sativa (japonica
  misc_feature (1)..(236): Homolog of NCBI NO: 30689278 NR Description: carboxyphosphonoenolpyruvate mutase -related thaliana] >gi|26450281|dbj|BAC42257.1| putative mutase [Arabidopsis thaliana] >gi|28827730|gb|AAO50709.1|
  misc_feature (1)..(236): Homolog of NCBI NO: 30689282 NR Description: carboxyphosphonoenolpyruvate mutase -related
  misc_feature (1)..(236): Homolog of NCBI NO: 25408843 NR Description: probable carboxyphosphonoenolpyruvate mutase - Arabidopsis thaliana >gi|3763927|gb|AAC64307.1| putative
  misc_feature (1)..(235): Homolog of NCBI NO: 23043034 NR Description: hypothetical protein [Trichodesmium erythraeum
  misc_feature (1)..(231): Homolog of NCBI NO: 17229355 NR Description: carboxyphosphonoenolpyruvate phosphonomutase sp. PCC 7120] >gi|25324632|pir||AI2038
  misc_feature (1)..(227): Homolog of NCBI NO: 33599708 NR Description: carboxyvinyl-carboxyphosphonate phosphorylmutase
  misc_feature (8)..(236): Homolog of NCBI NO: 40747280 NR Description: hypothetical protein AN9369.2 [Aspergillus
  misc_feature (1)..(235): Homolog of NCBI NO: 40739091 NR Description: hypothetical protein AN6882.2 [Aspergillus
MPGAHQAPACYDALSARLVERAEFRACFTSGFSISAARLGLPDVGLISYGEMIDQGRLMTEAVSIPVIGDADNGYGNCMNVKRTVKGFINAGFAGIILEDQVSPKACGHTQGRKVVSREEAIMHIKAAVDARNESGSDIVIVARTDSRQAVSLNEALWRVRAFADAGADVLFIDALASREEMKAFCAIAPGVPKMANMLEGGGKTPILSPVELEEIGYKIIAYPLSLIGVSMRAMEFMEVGCIGQARIWKLLGVLNLLGDRKLSHVQNVYTAQLLPIADLCTSWALPLARFRNLHYVRGC

SEQ ID NO: 1764 - protein, 249 aa, Zea mays subsp. mays
  peptide (1)..(249): Ceres Seq. ID no. 12588456
  misc_feature (1)..(179): Pfam Name: Isocitrate lyase family Pfam Description: Isocitrate lyase family
  misc_feature (1)..(185): Homolog of NCBI NO: 32490267 NR Description: OSJNBb0116K07.9 [Oryza sativa (japonica
  misc_feature (1)..(185): Homolog of NCBI NO: 38347227 NR Description: OSJNBa0044M19.9 [Oryza sativa (japonica
  misc_feature (1)..(185): Homolog of NCBI NO: 30689278 NR Description: carboxyphosphonoenolpyruvate mutase -related thaliana] >gi|26450281|dbj|BAC42257.1| putative mutase [Arabidopsis thaliana] >gi|28827730|gb|AAO50709.1|
  misc_feature (1)..(185): Homolog of NCBI NO: 30689282 NR Description: carboxyphosphonoenolpyruvate mutase -related
  misc_feature (1)..(185): Homolog of NCBI NO: 25408843 NR Description: probable carboxyphosphonoenolpyruvate mutase - Arabidopsis thaliana >gi|3763927|gb|AAC64307.1| putative
  misc_feature (1)..(184): Homolog of NCBI NO: 23043034 NR Description: hypothetical protein [Trichodesmium erythraeum
  misc_feature (1)..(180): Homolog of NCBI NO: 17229355 NR Description: carboxyphosphonoenolpyruvate phosphonomutase sp. PCC 7120] >gi|25324632|pir||AI2038
  misc_feature (1)..(176): Homolog of NCBI NO: 33599708 NR Description: carboxyvinyl-carboxyphosphonate phosphorylmutase
  misc_feature (1)..(185): Homolog of NCBI NO: 40747280 NR Description: hypothetical protein AN9369.2 [Aspergillus
  misc_feature (1)..(184): Homolog of NCBI NO: 40739091 NR Description: hypothetical protein AN6882.2 [Aspergillus
MIDQGRLMTEAVSIPVIGDADNGYGNCMNVKRTVKGFINAGFAGIILEDQVSPKACGHTQGRKVVSREEAIMHIKAAVDARNESGSDIVIVARTDSRQAVSLNEALWRVRAFADAGADVLFIDALASREEMKAFCAIAPGVPKMANMLEGGGKTPILSPVELEEIGYKIIAYPLSLIGVSMRAMEFMEVGCIGQARIWKLLGVLNLLGDRKLSHVQNVYTAQLLPIADLCTSWALPLARFRNLHYVRGC

SEQ ID NO: 1765 - DNA, 1139 bp, Zea mays subsp. mays
  misc_feature (1)..(1139): Ceres Seq. ID no. 12341467
  misc_feature: MA Experiment ID: 108527 Result: Down-regulated in Transcription
  misc_feature: MA Experiment 108527 PARAMETER Experiment Name: Zm_5mM_NO_P Parameter: Age (day) Value: 8
  misc_feature: MA Experiment 108527 PARAMETER Experiment Name: Zm_5mM_NO_P Parameter: Organism Value: Zea mays
  misc_feature: MA Experiment 108527 PARAMETER Experiment Name: Zm_5mM_NO_P Parameter: Plant Line Value: 35A19
  misc_feature: MA Experiment 108527 PARAMETER Experiment Name: Zm_5mM_NO_P Parameter: Timepoint (hr) Value: 6
  misc_feature: MA Experiment 108527 PARAMETER Experiment Name: Zm_5mM_NO_P Parameter: Tissue Value: Aerial
  misc_feature: MA Experiment 108527 PARAMETER Experiment Name: Zm_5mM_NO_P Parameter: Treatment Value: 5mM NO vs. No Treatment
  misc_feature: MA Experiment ID: 108528 Result: Up-regulated in Transcription
  misc_feature: MA Experiment 108528 PARAMETER Experiment Name: Zm_Imbibed_Seeds_P Parameter: Age (day) Value: 5 vs. 2
  misc_feature: MA Experiment 108528 PARAMETER Experiment Name: Zm_Imbibed_Seeds_P Parameter: Organism Value: Zea mays
  misc_feature: MA Experiment 108528 PARAMETER Experiment Name: Zm_Imbibed_Seeds_P Parameter: Plant Line Value: 35A19
  misc_feature: MA Experiment 108528 PARAMETER Experiment Name: Zm_Imbibed_Seeds_P Parameter: Tissue Value: Aerial vs. Embryo
  misc_feature: MA Experiment ID: 108530 Result: Up-regulated in Transcription
  misc_feature: MA Experiment 108530 PARAMETER Experiment Name: Zm_Imbibed_Seeds_P Parameter: Age (day) Value: 6 vs. 2
  misc_feature: MA Experiment 108530 PARAMETER Experiment Name: Zm_Imbibed_Seeds_P Parameter: Organism Value: Zea mays
  misc_feature: MA Experiment 108530 PARAMETER Experiment Name: Zm_Imbibed_Seeds_P Parameter: Plant Line Value: 35A19
  misc_feature: MA Experiment 108530 PARAMETER Experiment Name: Zm_Imbibed_Seeds_P Parameter: Tissue Value: Aerial vs. Embryo
  misc_feature: MA Experiment ID: 108535 Result: Up-regulated in Transcription
  misc_feature: MA Experiment 108535 PARAMETER Experiment Name: Zm_Meristem_P Parameter: Age (day) Value: 8
  misc_feature: MA Experiment 108535 PARAMETER Experiment Name: Zm_Meristem_P Parameter: Organism Value: Zea mays
  misc_feature: MA Experiment 108535 PARAMETER Experiment Name: Zm_Meristem_P Parameter: Plant Line Value: 35A19
  misc_feature: MA Experiment 108535 PARAMETER Experiment Name: Zm_Meristem_P Parameter: Tissue Value: Root Meristem vs. Above Root Meristem
  misc_feature: MA Experiment ID: 108547 Result: Up-regulated in Transcription
  misc_feature: MA Experiment 108547 PARAMETER Experiment Name: Zm_Imbibed_Seeds_P Parameter: Age (day) Value: 4 vs. 2
  misc_feature: MA Experiment 108547 PARAMETER Experiment Name: Zm_Imbibed_Seeds_P Parameter: Organism Value: Zea mays
  misc_feature: MA Experiment 108547 PARAMETER Experiment Name: Zm_Imbibed_Seeds_P Parameter: Plant Line Value: 35A19
  misc_feature: MA Experiment 108547 PARAMETER Experiment Name: Zm_Imbibed_Seeds_P Parameter: Tissue Value: Aerial vs. Embryo
  misc_feature: MA Experiment ID: 108556 Result: Down-regulated in Transcription
  misc_feature: MA Experiment 108556 PARAMETER Experiment Name: Zm_Drought_P Parameter: Age (day) Value: 9
  misc_feature: MA Experiment 108556 PARAMETER Experiment Name: Zm_Drought_P Parameter: Organism Value: Zea mays
  misc_feature: MA Experiment 108556 PARAMETER Experiment Name: Zm_Drought_P Parameter: Plant Line Value: 35A19
  misc_feature: MA Experiment 108556 PARAMETER Experiment Name: Zm_Drought_P Parameter: Timepoint (hr) Value: 24
  misc_feature: MA Experiment 108556 PARAMETER Experiment Name: Zm_Drought_P Parameter: Tissue Value: Aerial
  misc_feature: MA Experiment 108556 PARAMETER Experiment Name: Zm_Drought_P Parameter: Treatment Value: Drought vs. No Drought
  misc_feature: MA Experiment ID: 108559 Result: Down-regulated in Transcription
  misc_feature: MA Experiment 108559 PARAMETER Experiment Name: Zm_5mM_NO_P Parameter: Age (day) Value: 8
  misc_feature: MA Experiment 108559 PARAMETER Experiment Name: Zm_5mM_NO_P Parameter: Organism Value: Zea mays
  misc_feature: MA Experiment 108559 PARAMETER Experiment Name: Zm_5mM_NO_P Parameter: Plant Line Value: 35A19
  misc_feature: MA Experiment 108559 PARAMETER Experiment Name: Zm_5mM_NO_P Parameter: Timepoint (hr) Value: 12
  misc_feature: MA Experiment 108559 PARAMETER Experiment Name: Zm_5mM_NO_P Parameter: Tissue Value: Aerial
  misc_feature: MA Experiment 108559 PARAMETER Experiment Name: Zm_5mM_NO_P Parameter: Treatment Value: 5mM NO vs. No Treatment
  misc_feature: MA Experiment ID: 20000480 Result: Down-regulated in Transcription
  misc_feature: MA Experiment 20000480 PARAMETER Experiment Name: Zm_Drought_P Parameter: Age (day) Value: 11
  misc_feature: MA Experiment 20000480 PARAMETER Experiment Name: Zm_Drought_P Parameter: Organism Value: Zea mays
  misc_feature: MA Experiment 20000480 PARAMETER Experiment Name: Zm_Drought_P Parameter: Plant Line Value: 35A19
  misc_feature: MA Experiment 20000480 PARAMETER Experiment Name: Zm_Drought_P Parameter: Timepoint (hr) Value: 72
  misc_feature: MA Experiment 20000480 PARAMETER Experiment Name: Zm_Drought_P Parameter: Tissue Value: Aerial
  misc_feature: MA Experiment 20000480 PARAMETER Experiment Name: Zm_Drought_P Parameter: Treatment Value: Drought vs. No Drought
atatatagaatcttttaaaatgcaagggtgtcatactcgcagtcgcacagacaagtagataatcgctcgagccatcgagggccagcctgtgctgttggaagcgtggatgcggccgggctcagccgttgatcgttgcgcggtggccgtgagtcgtgtgactcgtgaccaaccaaaccgttcagctcccccatgacgtgtgcgtgacctcactctcagccagagatccacaaccggtgaaccgccgcgaatcctcggcctcgcatccgccggtggccgccgggggcgtggagcaccaacttttcacctgctgtgagacccccactcacctccacggaagcacacacccgaagaagaagagaaggcgagaaccatggcgccacctgccgtgtccatctcgcccatctgctgcgtcccataccccgcctccggcccccgtcgcgctcgcacgcccccctcctccctcagaaggttccccagattcgcagcccggaggagtagcgggggcggcgggggcacgcgcccggagcccaaaccagatgacaacgagagcaaagccgtcctcgacgccttcttcctcgggaaggccttcgcagaggcgctcacggagcgggtcgagtcggtggtgggcgaggtgttcagcgtcgtcgggcagtggcaggccgagcagcagaagcaagtgcaggatttccaggaggaagtagttcaaagagcccaaaaggctaaggagaaagctgcaactgaagtcagtgatgataagggggcgaagtctctaagggaaccttcagcaacaattgtggcgactacaactacgtcatctcccccagctactcccacacagacagaatagttgtagacttcttggtggcagtgaagagttgttgctgcaagttgatgcagttctttgtgcagccaaaaagtctgtagttggctttcacatgatatatgtcgatggatagtatatctgctagtgaaacatccagcatttctagtgacaaacccagcatctcaattataaaaaaaaactaatttacatttttttcatatgaatggaagtactttttgcatctagtgcgttctggtatatgtgtaatatatgttatatgccattcttaagaaatgcagcttcaaaaaccttgggt

SEQ ID NO: 1766 - protein, 158 aa, Zea mays subsp. mays
  peptide (1)..(158): Ceres Seq. ID no. 12341468
  misc_feature (60)..(144): Homolog of NCBI NO: 17232006 NR Description: hypothetical protein [Nostoc sp. PCC 7120]
  misc_feature (57)..(155): Homolog of NCBI NO: 21553912 NR Description: unknown [Arabidopsis thaliana]
  misc_feature (57)..(155): Homolog of NCBI NO: 15235625 NR Description: putative protein
MAPPAVSISPICCVPYPASGPRRARTPPSSLRRFPRFAARRSSGGGGGTRPEPKPDDNESKAVLDAFFLGKAFAEALTERVESVVGEVFSVVGQWQAEQQKQVQDFQEEVVQRAQKAKEKAATEVSDDKGAKSLREPSATIVATTTTSSPPATPTQTE

SEQ ID NO: 1767 - DNA, 1399 bp, Zea mays subsp. mays
  misc_feature (1)..(1399): Ceres Seq. ID no. 12411002
  misc_feature: MA Experiment ID: 108522 Result: Up-regulated in Transcription
  misc_feature: MA Experiment 108522 PARAMETER Experiment Name: Zm_42deg_Heat_P Parameter: Age (day) Value: 8
  misc_feature: MA Experiment 108522 PARAMETER Experiment Name: Zm_42deg_Heat_P Parameter: Organism Value: Zea mays
  misc_feature: MA Experiment 108522 PARAMETER Experiment Name: Zm_42deg_Heat_P Parameter: Plant Line Value: 35A19
  misc_feature: MA Experiment 108522 PARAMETER Experiment Name: Zm_42deg_Heat_P Parameter: Temperature (deg C) Value: 42 vs. 22
  misc_feature: MA Experiment 108522 PARAMETER Experiment Name: Zm_42deg_Heat_P Parameter: Timepoint (hr) Value: 1
  misc_feature: MA Experiment 108522 PARAMETER Experiment Name: Zm_42deg_Heat_P Parameter: Tissue Value: Aerial
atcactagaacgttttccttattcgtccctctcaattgggcggatagtttcatcctccgcgggacaaggcccctcacgatcccttctcatcctcgtcctcagatccgcctccttcaccccactggtcggcgagcagcaaaatccattcaccccactggccggcgagcagcaaactccattcaccccactagcaggcgagcagcaaactggagatctcgtcctcacgagcgctttggtaattggtcgtatagtccctcatcatcggaatggtggggtcacttatctttcactcacctaatgtggatccgaaggcagagaatcctaatgagatggttacagctggtgtgctttcaagccttcagaatttcctacgcaagtgcctcatagctatcctctcatatggcccaatgccgaagcacattgcatttattatggatggcaatcgtcgatatgctaaattcagaagcatgcaagaaggagctggtcacaggatgggtttctctacccttattgcaagtctgatgtactgctatgaaatgggtgtgaagtacatcactgtctacgcattcagcatcgacaattttaaaagggacccaagtgaggtggaatccttgatgcagttaatggaggaaaaaatcaacgaactcttagagaaccaaagtgtaatcaacaagattaactgtaagatcaacttttggggtaacttggacttgttatatgagccggtgcggttggcggctgagaagctgatggcgagcacagctgggaacacagggctggtcttttctatctgcatgccatacaactcgacttctgagattgtcaatgctgtcagtcaagtctgtgcggaaaggatggaaatgtttcagagcgaacatattggcgaatgcaatggtcatgctgcaaataacggtgtgcgatcagagatttcagtggcggatttggatcgccacatgtatagtgccgaatgcccagatcctgatattgtcatccggacttcgggcgagactcgattgagcaatttcctcctttggcagacaacgtttagtcacttgcagaatccagatcctctgtggcccgagttctcttttaggcaccttgtttgggctatcttgcagtatcagagagtttaccctgctctggagcataacagaaagttggctaagaagcagttgtgattccatgttatttgcaaggaggtatcatgaagggctattaacatcaaacttttccttctcaatttcccggtaatgggaaatgcaaagaacatactagcatataacattatgaatagatcaccatgtaacttaagtgtgattgctaccataaccatgtaacttatttgagctcgtacaaatgctgtgattcctaaatatatatatatagagtgcccggggtg

SEQ ID NO: 1768 - protein, 303 aa, Zea mays subsp. mays
  peptide (1)..(303): Ceres Seq. ID no. 12411003
  misc_feature (55)..(293): Pfam Name: Putative undecaprenyl diphosphate synthase Pfam Description: Putative undecaprenyl diphosphate synthase
  misc_feature (27)..(300): Homolog of NCBI NO: 20563022 NR Description: cis-prenyltransferase2 [Hevea brasiliensis]
  misc_feature (27)..(300): Homolog of NCBI NO: 22213585 NR Description: cis-prenyltransferase 1 [Hevea brasiliensis]
  misc_feature (27)..(300): Homolog of NCBI NO: 16751459 NR Description: cis-prenyltransferase [Hevea brasiliensis]
  misc_feature (27)..(300): Homolog of NCBI NO: 22213587 NR Description: cis-prenyltransferase 2 [Hevea brasiliensis]
  misc_feature (27)..(300): Homolog of NCBI NO: 16751461 NR Description: cis-prenyltransferase [Hevea brasiliensis]
  misc_feature (46)..(297): Homolog of NCBI NO: 25314045 NR Description: hypothetical protein At2g17570 [imported] -
  misc_feature (27)..(297): Homolog of NCBI NO: 20336659 NR Description: hypothetical protein [Arabidopsis thaliana]
  misc_feature (27)..(297): Homolog of NCBI NO: 18398467 NR Description: undecaprenyl pyrophosphate synthetase (UPP
  misc_feature (27)..(297): Homolog of NCBI NO: 23491567 NR Description: cis-prenyltransferase [Periploca sepium]
  misc_feature (1)..(303): Homolog of NCBI NO: 34898408 NR Description: ESTs C72761(E2193),AU056875(S20945), correspond to a region of the predicted gene.~Similar to Thermus gene for homocitrate synthase, homoaconitate hydratase, and
MVGSLIFHSPNVDPKAENPNEMVTAGVLSSLQNFLRKCLIAILSYGPMPKHIAFIMDGNRRYAKFRSMQEGAGHRMGFSTLIASLMYCYEMGVKYITVYAFSIDNFKRDPSEVESLMQLMEEKINELLENQSVINKINCKINFWGNLDLLYEPVRLAAEKLMASTAGNTGLVFSICMPYNSTSEIVNAVSQVCAERMEMFQSEHIGECNGHAANNGVRSEISVADLDRHMYSAECPDPDIVIRTSGETRLSNFLLWQTTFSHLQNPDPLWPEFSFRHLVWAILQYQRVYPALEHNRKLAKKQL

SEQ ID NO: 1769 - protein, 282 aa, Zea mays subsp. mays
  peptide (1)..(282): Ceres Seq. ID no. 12411004
  misc_feature (34)..(272): Pfam Name: Putative undecaprenyl diphosphate synthase Pfam Description: Putative undecaprenyl diphosphate synthase
  misc_feature (6)..(279): Homolog of NCBI NO: 16751459 NR Description: cis-prenyltransferase [Hevea brasiliensis]
  misc_feature (6)..(279): Homolog of NCBI NO: 22213587 NR Description: cis-prenyltransferase 2 [Hevea brasiliensis]
  misc_feature (6)..(279): Homolog of NCBI NO: 16751461 NR Description: cis-prenyltransferase [Hevea brasiliensis]
  misc_feature (25)..(276): Homolog of NCBI NO: 25314045 NR Description: hypothetical protein At2g17570 [imported] -
  misc_feature (6)..(279): Homolog of NCBI NO: 20563022 NR Description: cis-prenyltransferase2 [Hevea brasiliensis]
  misc_feature (6)..(279): Homolog of NCBI NO: 22213585 NR Description: cis-prenyltransferase 1 [Hevea brasiliensis]
  misc_feature (6)..(276): Homolog of NCBI NO: 20336659 NR Description: hypothetical protein [Arabidopsis thaliana]
  misc_feature (6)..(276): Homolog of NCBI NO: 18398467 NR Description: undecaprenyl pyrophosphate synthetase (UPP
  misc_feature (6)..(276): Homolog of NCBI NO: 23491567 NR Description: cis-prenyltransferase [Periploca sepium]
  misc_feature (1)..(282): Homolog of NCBI NO: 34898408 NR Description: ESTs C72761(E2193),AU056875(S20945), correspond to a region of the predicted gene.~Similar to Thermus gene for homocitrate synthase, homoaconitate hydratase, and
MVTAGVLSSLQNFLRKCLIAILSYGPMPKHIAFIMDGNRRYAKFRSMQEGAGHRMGFSTLIASLMYCYEMGVKYITVYAFSIDNFKRDPSEVESLMQLMEEKINELLENQSVINKINCKINFWGNLDLLYEPVRLAAEKLMASTAGNTGLVFSICMPYNSTSEIVNAVSQVCAERMEMFQSEHIGECNGHAANNGVRSEISVADLDRHMYSAECPDPDIVIRTSGETRLSNFLLWQTTFSHLQNPDPLWPEFSFRHLVWAILQYQRVYPALEHNRKLAKKQL

SEQ ID NO: 1770 - protein, 256 aa, Zea mays subsp. mays
  peptide (1)..(256): Ceres Seq. ID no. 12411005
  misc_feature (8)..(246): Pfam Name: Putative undecaprenyl diphosphate synthase Pfam Description: Putative undecaprenyl diphosphate synthase
  misc_feature (1)..(253): Homolog of NCBI NO: 20563022 NR Description: cis-prenyltransferase2 [Hevea brasiliensis]
  misc_feature (1)..(253): Homolog of NCBI NO: 22213585 NR Description: cis-prenyltransferase 1 [Hevea brasiliensis]
  misc_feature (1)..(253): Homolog of NCBI NO: 16751459 NR Description: cis-prenyltransferase [Hevea brasiliensis]
  misc_feature (1)..(253): Homolog of NCBI NO: 22213587 NR Description: cis-prenyltransferase 2 [Hevea brasiliensis]
  misc_feature (1)..(253): Homolog of NCBI NO: 16751461 NR Description: cis-prenyltransferase [Hevea brasiliensis]
  misc_feature (1)..(250): Homolog of NCBI NO: 25314045 NR Description: hypothetical protein At2g17570 [imported] -
  misc_feature (1)..(250): Homolog of NCBI NO: 20336659 NR Description: hypothetical protein [Arabidopsis thaliana]
  misc_feature (1)..(250): Homolog of NCBI NO: 18398467 NR Description: undecaprenyl pyrophosphate synthetase (UPP
  misc_feature (1)..(250): Homolog of NCBI NO: 23491567 NR Description: cis-prenyltransferase [Periploca sepium]
  misc_feature (1)..(256): Homolog of NCBI NO: 34898408 NR Description: ESTs C72761(E2193),AU056875(S20945), correspond to a region of the predicted gene.~Similar to Thermus gene for homocitrate synthase, homoaconitate hydratase, and
MPKHIAFIMDGNRRYAKFRSMQEGAGHRMGFSTLIASLMYCYEMGVKYITVYAFSIDNFKRDPSEVESLMQLMEEKINELLENQSVINKINCKINFWGNLDLLYEPVRLAAEKLMASTAGNTGLVFSICMPYNSTSEIVNAVSQVCAERMEMFQSEHIGECNGHAANNGVRSEISVADLDRHMYSAECPDPDIVIRTSGETRLSNFLLWQTTFSHLQNPDPLWPEFSFRHLVWAILQYQRVYPALEHNRKLAKKQL

SEQ ID NO: 1771 - DNA, 1269 bp, Zea mays subsp. mays
  misc_feature (1)..(1269): Ceres Seq. ID no. 12374235
  misc_feature: MA Experiment ID: 20000478 Result: Up-regulated in Transcription
  misc_feature: MA Experiment 20000478 PARAMETER Experiment Name: Zm_5mM_SA_P Parameter: Age (day) Value: 11
  misc_feature: MA Experiment 20000478 PARAMETER Experiment Name: Zm_5mM_SA_P Parameter: Organism Value: Zea mays
  misc_feature: MA Experiment 20000478 PARAMETER Experiment Name: Zm_5mM_SA_P Parameter: Plant Line Value: 35A19
  misc_feature: MA Experiment 20000478 PARAMETER Experiment Name: Zm_5mM_SA_P Parameter: Timepoint (hr) Value: 72
  misc_feature: MA Experiment 20000478 PARAMETER Experiment Name: Zm_5mM_SA_P Parameter: Tissue Value: Aerial
  misc_feature: MA Experiment 20000478 PARAMETER Experiment Name: Zm_5mM_SA_P Parameter: Treatment Value: 5mM SA vs. No Treatment
gacggccacagagagaaacgttgagacagggagagagagagagagagcgagctccacgcctccacgctccactacaccagccaggcagcagcccccaacgactggctcgccgctcgcgagaacccgagtctatttctgcacgcgcttccaggttttagctgcagcggcatcagggcagggagagagcgatagttctgttctactgcaggaagagcagggagcaagatggggtccggatctttcctcaaggtgctggccaataacttcgatgtccttgccgggccactcatatcacttgcttatcctctatatgcttctgttagagctatagagacaaaaaatcctgtagatgatcagcagtggctcacttactgggtgttgtactcatttatcactttgtttgagctaacttttgctccaattatcgagtggcttccattttggtcgtatgcaaagctgttctttaactgctggttggtcttgccttggttcaatggtgctgcctatgtttacgaccattttgtgcggccaatgtttgtgaaccgccaaatagtgaacatatggtatattccaagaaatgagaagctaggtaaatctgatgatgttctgtcagctgcagagagatatattgaacaaaacggaccagaagcatttgagaagctcatcagcaagtctacgaagtcttcgaagtcaaggaacacaaagcggttgaacttggaggatggagaggctgaaaatcgagctaaagccgagagagaatcgtggggcgaaaatcccttctacgacaaaaactacagatactaaaccagttcaaaatccactcagcagtttgaagatgaccttgctcacgagcctcatgcaagctttagttgcgtcggaccgaagacgacattcccatatttctgactctgaatattgtaccttgttacatccactgctactacataatgatgagttctagagcaattgtggactgtgtaaatggaggtagatgctagcgttaatcgtttatgtgctttttggatggtgtccttatcacccgttttactacatctttagcaaggagcgagccttgattttcagtttggctttcgtatttttgtaattgaatgctacttttagataactgaaatatgagggagttcgagcttctaggaagaaacttaacatgtgctattgcatcgagtgccaacaacgttatcatcgtcacaatttttgtacagggctcttctacaataacttgagtaacccgttcatttcggctggttt

SEQ ID NO: 1772 - protein, 192 aa, Zea mays subsp. mays
  peptide (1)..(192): Ceres Seq. ID no. 12374236
  misc_feature (7)..(104): Pfam Name: TB2/DP1, HVA22 family Pfam Description: TB2/DP1, HVA22 family
  misc_feature (24)..(104): Homolog of NCBI NO: 8777395 NR Description: gene_id:MFB16.12~pir||T05517~similar to unknown
  misc_feature (10)..(101): Homolog of NCBI NO: 33342176 NR Description: hypothetical protein [Triticum aestivum]
  misc_feature (18)..(104): Homolog of NCBI NO: 18416458 NR Description: abscisic acid-induced - like protein
  misc_feature (10)..(101): Homolog of NCBI NO: 1076715 NR Description: abscisic acid-induced protein HVA22 - barley
  misc_feature (17)..(104): Homolog of NCBI NO: 18423191 NR Description: putative protein
  misc_feature (32)..(155): Homolog of NCBI NO: 34910810 NR Description: P0042A10.34 [Oryza sativa (japonica
  misc_feature (2)..(155): Homolog of NCBI NO: 15241840 NR Description: AtHVA22b-like protein
  misc_feature (2)..(155): Homolog of NCBI NO: 4884934 NR Description: AtHVA22b [Arabidopsis thaliana]
  misc_feature (1)..(163): Homolog of NCBI NO: 15222421 NR Description: AtHVA22c
  misc_feature (2)..(155): Homolog of NCBI NO: 15221266 NR Description: AtHVA22a; protein id: At1g74520.1, supported by
MGSGSFLKVLANNFDVLAGPLISLAYPLYASVRAIETKNPVDDQQWLTYWVLYSFITLFELTFAPIIEWLPFWSYAKLFFNCWLVLPWFNGAAYVYDHFVRPMFVNRQIVNIWYIPRNEKLGKSDDVLSAAERYIEQNGPEAFEKLISKSTKSSKSRNTKRLNLEDGEAENRAKAERESWGENPFYDKNYRY

SEQ ID NO: 1773 - protein, 109 aa, Zea mays subsp. mays
  peptide (1)..(109): Ceres Seq. ID no. 12374237
TATERNVETGRERERASSTPPRSTTPARQQPPTTGSPLARTRVYFCTRFQVLAAAASGQGESDSSVLLQEEQGARWGPDLSSRCWPITSMSLPGHSYHLLILYMLLLEL

SEQ ID NO: 1774 - DNA, 1231 bp, Zea mays subsp. mays
  misc_feature (1)..(1231): Ceres Seq. ID no. 12410989
  misc_feature: MA Experiment ID: 108523 Result: Down-regulated in Transcription
  misc_feature: MA Experiment 108523 PARAMETER Experiment Name: Zm_42deg_Heat_P Parameter: Age (day) Value: 8
  misc_feature: MA Experiment 108523 PARAMETER Experiment Name: Zm_42deg_Heat_P Parameter: Organism Value: Zea mays
  misc_feature: MA Experiment 108523 PARAMETER Experiment Name: Zm_42deg_Heat_P Parameter: Plant Line Value: 35A19
  misc_feature: MA Experiment 108523 PARAMETER Experiment Name: Zm_42deg_Heat_P Parameter: Temperature (deg C) Value: 42 vs. 22
  misc_feature: MA Experiment 108523 PARAMETER Experiment Name: Zm_42deg_Heat_P Parameter: Timepoint (hr) Value: 6
  misc_feature: MA Experiment 108523 PARAMETER Experiment Name: Zm_42deg_Heat_P Parameter: Tissue Value: Aerial
  misc_feature: MA Experiment ID: 108527 Result: Down-regulated in Transcription
  misc_feature: MA Experiment 108527 PARAMETER Experiment Name: Zm_5mM_NO_P Parameter: Age (day) Value: 8
  misc_feature: MA Experiment 108527 PARAMETER Experiment Name: Zm_5mM_NO_P Parameter: Organism Value: Zea mays
  misc_feature: MA Experiment 108527 PARAMETER Experiment Name: Zm_5mM_NO_P Parameter: Plant Line Value: 35A19
  misc_feature: MA Experiment 108527 PARAMETER Experiment Name: Zm_5mM_NO_P Parameter: Timepoint (hr) Value: 6
  misc_feature: MA Experiment 108527 PARAMETER Experiment Name: Zm_5mM_NO_P Parameter: Tissue Value: Aerial
  misc_feature: MA Experiment 108527 PARAMETER Experiment Name: Zm_5mM_NO_P Parameter: Treatment Value: 5mM NO vs. No Treatment
  misc_feature: MA Experiment ID: 108528 Result: Up-regulated in Transcription
  misc_feature: MA Experiment 108528 PARAMETER Experiment Name: Zm_Imbibed_Seeds_P Parameter: Age (day) Value: 5 vs. 2
  misc_feature: MA Experiment 108528 PARAMETER Experiment Name: Zm_Imbibed_Seeds_P Parameter: Organism Value: Zea mays
  misc_feature: MA Experiment 108528 PARAMETER Experiment Name: Zm_Imbibed_Seeds_P Parameter: Plant Line Value: 35A19
  misc_feature: MA Experiment 108528 PARAMETER Experiment Name: Zm_Imbibed_Seeds_P Parameter: Tissue Value: Aerial vs. Embryo
  misc_feature: MA Experiment ID: 108529 Result: Down-regulated in Transcription
  misc_feature: MA Experiment 108529 PARAMETER Experiment Name: Zm_Imbibed_Seeds_P Parameter: Age (day) Value: 5 vs. 2
  misc_feature: MA Experiment 108529 PARAMETER Experiment Name: Zm_Imbibed_Seeds_P Parameter: Organism Value: Zea mays
  misc_feature: MA Experiment 108529 PARAMETER Experiment Name: Zm_Imbibed_Seeds_P Parameter: Plant Line Value: 35A19
  misc_feature: MA Experiment 108529 PARAMETER Experiment Name: Zm_Imbibed_Seeds_P Parameter: Tissue Value: Roots vs. Embryo
  misc_feature: MA Experiment ID: 108530 Result: Up-regulated in Transcription
  misc_feature: MA Experiment 108530 PARAMETER Experiment Name: Zm_Imbibed_Seeds_P Parameter: Age (day) Value: 6 vs. 2
  misc_feature: MA Experiment 108530 PARAMETER Experiment Name: Zm_Imbibed_Seeds_P Parameter: Organism Value: Zea mays
  misc_feature: MA Experiment 108530 PARAMETER Experiment Name: Zm_Imbibed_Seeds_P Parameter: Plant Line Value: 35A19
  misc_feature: MA Experiment 108530 PARAMETER Experiment Name: Zm_Imbibed_Seeds_P Parameter: Tissue Value: Aerial vs. Embryo
  misc_feature: MA Experiment ID: 108536 Result: Down-regulated in Transcription
  misc_feature: MA Experiment 108536 PARAMETER Experiment Name: Zm_Meristem_P Parameter: Age (day) Value: 8
  misc_feature: MA Experiment 108536 PARAMETER Experiment Name: Zm_Meristem_P Parameter: Organism Value: Zea mays
  misc_feature: MA Experiment 108536 PARAMETER Experiment Name: Zm_Meristem_P Parameter: Plant Line Value: 35A19
  misc_feature: MA Experiment 108536 PARAMETER Experiment Name: Zm_Meristem_P Parameter: Tissue Value: Shoot Meristem vs. Above Shoot Meristem
  misc_feature: MA Experiment ID: 108545 Result: Up-regulated in Transcription
  misc_feature: MA Experiment 108545 PARAMETER Experiment Name: Zm_Imbibed_Seeds_P Parameter: Age (day) Value: 3 vs. 2
  misc_feature: MA Experiment 108545 PARAMETER Experiment Name: Zm_Imbibed_Seeds_P Parameter: Organism Value: Zea mays
  misc_feature: MA Experiment 108545 PARAMETER Experiment Name: Zm_Imbibed_Seeds_P Parameter: Plant Line Value: 35A19
  misc_feature: MA Experiment 108545 PARAMETER Experiment Name: Zm_Imbibed_Seeds_P Parameter: Tissue Value: Aerial vs. Embryo
  misc_feature: MA Experiment ID: 108546 Result: Down-regulated in Transcription
  misc_feature: MA Experiment 108546 PARAMETER Experiment Name: Zm_Imbibed_Seeds_P Parameter: Age (day) Value: 3 vs. 2
  misc_feature: MA Experiment 108546 PARAMETER Experiment Name: Zm_Imbibed_Seeds_P Parameter: Organism Value: Zea mays
  misc_feature: MA Experiment 108546 PARAMETER Experiment Name: Zm_Imbibed_Seeds_P Parameter: Plant Line Value: 35A19
  misc_feature: MA Experiment 108546 PARAMETER Experiment Name: Zm_Imbibed_Seeds_P Parameter: Tissue Value: Roots vs. Embryo
  misc_feature: MA Experiment ID: 108547 Result: Up-regulated in Transcription
  misc_feature: MA Experiment 108547 PARAMETER Experiment Name: Zm_Imbibed_Seeds_P Parameter: Age (day) Value: 4 vs. 2
  misc_feature: MA Experiment 108547 PARAMETER Experiment Name: Zm_Imbibed_Seeds_P Parameter: Organism Value: Zea mays
  misc_feature: MA Experiment 108547 PARAMETER Experiment Name: Zm_Imbibed_Seeds_P Parameter: Plant Line Value: 35A19
  misc_feature: MA Experiment 108547 PARAMETER Experiment Name: Zm_Imbibed_Seeds_P Parameter: Tissue Value: Aerial vs. Embryo
  misc_feature: MA Experiment ID: 108556 Result: Down-regulated in Transcription
  misc_feature: MA Experiment 108556 PARAMETER Experiment Name: Zm_Drought_P Parameter: Age (day) Value: 9
  misc_feature: MA Experiment 108556 PARAMETER Experiment Name: Zm_Drought_P Parameter: Organism Value: Zea mays
  misc_feature: MA Experiment 108556 PARAMETER Experiment Name: Zm_Drought_P Parameter: Plant Line Value: 35A19
  misc_feature: MA Experiment 108556 PARAMETER Experiment Name: Zm_Drought_P Parameter: Timepoint (hr) Value: 24
  misc_feature: MA Experiment 108556 PARAMETER Experiment Name: Zm_Drought_P Parameter: Tissue Value: Aerial
  misc_feature: MA Experiment 108556 PARAMETER Experiment Name: Zm_Drought_P Parameter: Treatment Value: Drought vs. No Drought
  misc_feature: MA Experiment ID: 108559 Result: Down-regulated in Transcription
  misc_feature: MA Experiment 108559 PARAMETER Experiment Name: Zm_5mM_NO_P Parameter: Age (day) Value: 8
  misc_feature: MA Experiment 108559 PARAMETER Experiment Name: Zm_5mM_NO_P Parameter: Organism Value: Zea mays
  misc_feature: MA Experiment 108559 PARAMETER Experiment Name: Zm_5mM_NO_P Parameter: Plant Line Value: 35A19
  misc_feature: MA Experiment 108559 PARAMETER Experiment Name: Zm_5mM_NO_P Parameter: Timepoint (hr) Value: 12
  misc_feature: MA Experiment 108559 PARAMETER Experiment Name: Zm_5mM_NO_P Parameter: Tissue Value: Aerial
  misc_feature: MA Experiment 108559 PARAMETER Experiment Name: Zm_5mM_NO_P Parameter: Treatment Value: 5mM NO vs. No Treatment
  misc_feature: MA Experiment ID: 108687 Result: Down-regulated in Transcription
  misc_feature: MA Experiment 108687 PARAMETER Experiment Name: Zm_Embryos-Flowers__P Parameter: Tissue Value: Embryo vs. Aerial+
  misc_feature: MA Experiment ID: 108689 Result: Down-regulated in Transcription
  misc_feature: MA Experiment 108689 PARAMETER Experiment Name: Zm_Drought_Roots_P Parameter: Age (day) Value: 9
  misc_feature: MA Experiment 108689 PARAMETER Experiment Name: Zm_Drought_Roots_P Parameter: Organism Value: Zea mays
  misc_feature: MA Experiment 108689 PARAMETER Experiment Name: Zm_Drought_Roots_P Parameter: Plant Line Value: 35A19
  misc_feature: MA Experiment 108689 PARAMETER Experiment Name: Zm_Drought_Roots_P Parameter: Timepoint (hr) Value: 24
  misc_feature: MA Experiment 108689 PARAMETER Experiment Name: Zm_Drought_Roots_P Parameter: Tissue Value: Roots
  misc_feature: MA Experiment 108689 PARAMETER Experiment Name: Zm_Drought_Roots_P Parameter: Treatment Value: Drought vs. No Drought
  misc_feature: MA Experiment ID: 20000480 Result: Down-regulated in Transcription
  misc_feature: MA Experiment 20000480 PARAMETER Experiment Name: Zm_Drought_P Parameter: Age (day) Value: 11
  misc_feature: MA Experiment 20000480 PARAMETER Experiment Name: Zm_Drought_P Parameter: Organism Value: Zea mays
  misc_feature: MA Experiment 20000480 PARAMETER Experiment Name: Zm_Drought_P Parameter: Plant Line Value: 35A19
  misc_feature: MA Experiment 20000480 PARAMETER Experiment Name: Zm_Drought_P Parameter: Timepoint (hr) Value: 72
  misc_feature: MA Experiment 20000480 PARAMETER Experiment Name: Zm_Drought_P Parameter: Tissue Value: Aerial
  misc_feature: MA Experiment 20000480 PARAMETER Experiment Name: Zm_Drought_P Parameter: Treatment Value: Drought vs. No Drought
attggtttcgccaaaaacctcaccggctccattcgaccattccatcctttccttatcccctcccacttcgtctcccttcctggcttcctttcttcgccatggcaaccatgtccctccgctccctcgccatggccatggccgacaccgcgctcccgcccgcccacaagctcctccccacagtttccctcccgctcctctcctcgtccacccgcgccgcgccgctcctcctcttcgccaggcgccgcctgccgctcgcgcccctcgttacctcctccgacgccgttgaggccaagtcggcagacgaggaggaggagaaggccggagagcccgtcgacatggaagctggggagtttgaggaggtgctagcctcaggcggcgagggtgaggggcagtacgctgcggtggagccgccagaggaggccaaggtctacgttgggaaccttccctacgacgtcgacagcgagggactcgcgcagatcttcgaccaggccggcgtcgtcgaggtcgccgaggttatctacaacagagaaactggccagagccgtgggtttggctttgttaccatgagcactgttgaggaagctgacaaagccattgagatgttcaaccgctatgatattagcgggaggcttctgaatgtaaacagggcatcttctaggggcactcgcatggaaagacctcagagacaatttgcaccagctttcagagcttatgttggcaacttgccatggcaagttgatgactctaggctggtgcagttgttcagcgagcatggagaagttgttgatgctaaggttgtctacgacagagaaactgggcgctcacgaggattcggttttgtatcaatggtgtcaaaggaggaactcaatgatgctatttcggccctagatggacaggaattggacggccgccctcttcgagtgaatgttgcagcagagcggccacagaggggcttttgatgcggttgtatgagagagatgactgcttgtttgtaatgagcatggagacacagagacacaatggactgaatggaggagcaatggtacaaattagcggaagcggatgctgtcacaagttgctagatctttctcccttagcttcttgacatttggttcttgccacagctttttgatgcttctcttggcagctggacttaatgttttgctattcttgtcgacatcacgagttgaattgtcaaactagtctcttatgttctatgctgatatgcctt

SEQ ID NO: 1775 - protein, 318 aa, Zea mays subsp. mays
  peptide (1)..(318): Ceres Seq. ID no. 12410990
  misc_feature (142)..(213): Pfam Name: RNA recognition motif. (a.k.a. RRM, RBD, or RNP domain) Pfam Description: RNA recognition motif. (a.k.a. RRM, RBD, or RNP
  misc_feature (47)..(318): Homolog of NCBI NO: 629557 NR Description: RNA-binding protein RNP-D precursor - Arabidopsis
  misc_feature (60)..(318): Homolog of NCBI NO: 1076305 NR Description: RNA-binding protein cp31 precursor - Arabidopsis
  misc_feature (60)..(318): Homolog of NCBI NO: 681908 NR Description: cp31 [Arabidopsis thaliana]
  misc_feature (33)..(316): Homolog of NCBI NO: 133246 NR Description: 28 kDa ribonucleoprotein, chloroplast precursor
  misc_feature (29)..(316): Homolog of NCBI NO: 133248 NR Description: 31 kDa ribonucleoprotein, chloroplast precursor
  misc_feature (91)..(316): Homolog of NCBI NO: 19032260 NR Description: RNA-binding protein precursor [Persea americana]
  misc_feature (102)..(318): Homolog of NCBI NO: 100903 NR Description: nucleic acid-binding protein - maize
  misc_feature (32)..(318): Homolog of NCBI NO: 7446358 NR Description: cp31AHv protein - barley
  misc_feature (32)..(318): Homolog of NCBI NO: 7446356 NR Description: Ps16 protein - wheat
  misc_feature (33)..(318): Homolog of NCBI NO: 7446359 NR Description: nucleic acid-binding protein - barley
WFRQKPHRLHSTIPSFPYPLPLRLPSWLPFFAMATMSLRSLAMAMADTALPPAHKLLPTVSLPLLSSSTRAAPLLLFARRRLPLAPLVTSSDAVEAKSADEEEEKAGEPVDMEAGEFEEVLASGGEGEGQYAAVEPPEEAKVYVGNLPYDVDSEGLAQIFDQAGVVEVAEVIYNRETGQSRGFGFVTMSTVEEADKAIEMFNRYDISGRLLNVNRASSRGTRMERPQRQFAPAFRAYVGNLPWQVDDSRLVQLFSEHGEVVDAKVVYDRETGRSRGFGFVSMVSKEELNDAISALDGQELDGRPLRVNVAAERPQRGF

SEQ ID NO: 1776 - protein, 286 aa, Zea mays subsp. mays
  peptide (1)..(286): Ceres Seq. ID no. 12410991
  misc_feature (110)..(181): Pfam Name: RNA recognition motif. (a.k.a. RRM, RBD, or RNP domain) Pfam Description: RNA recognition motif. (a.k.a. RRM, RBD, or RNP
  misc_feature (15)..(286): Homolog of NCBI NO: 629557 NR Description: RNA-binding protein RNP-D precursor - Arabidopsis
  misc_feature (28)..(286): Homolog of NCBI NO: 1076305 NR Description: RNA-binding protein cp31 precursor - Arabidopsis
  misc_feature (28)..(286): Homolog of NCBI NO: 681908 NR Description: cp31 [Arabidopsis thaliana]
  misc_feature (1)..(284): Homolog of NCBI NO: 133246 NR Description: 28 kDa ribonucleoprotein, chloroplast precursor
  misc_feature (1)..(284): Homolog of NCBI NO: 133248 NR Description: 31 kDa ribonucleoprotein, chloroplast precursor
  misc_feature (59)..(284): Homolog of NCBI NO: 19032260 NR Description: RNA-binding protein precursor [Persea americana]
  misc_feature (70)..(286): Homolog of NCBI NO: 100903 NR Description: nucleic acid-binding protein - maize
  misc_feature (1)..(286): Homolog of NCBI NO: 7446358 NR Description: cp31AHv protein - barley
  misc_feature (1)..(286): Homolog of NCBI NO: 7446356 NR Description: Ps16 protein - wheat
  misc_feature (1)..(286): Homolog of NCBI NO: 7446359 NR Description: nucleic acid-binding protein - barley
MATMSLRSLAMAMADTALPPAHKLLPTVSLPLLSSSTRAAPLLLFARRRLPLAPLVTSSDAVEAKSADEEEEKAGEPVDMEAGEFEEVLASGGEGEGQYAAVEPPEEAKVYVGNLPYDVDSEGLAQIFDQAGVVEVAEVIYNRETGQSRGFGFVTMSTVEEADKAIEMFNRYDISGRLLNVNRASSRGTRMERPQRQFAPAFRAYVGNLPWQVDDSRLVQLFSEHGEVVDAKVVYDRETGRSRGFGFVSMVSKEELNDAISALDGQELDGRPLRVNVAAERPQRGF

SEQ ID NO: 1777 - protein, 283 aa, Zea mays subsp. mays
  peptide (1)..(283): Ceres Seq. ID no. 12410992
  misc_feature (107)..(178): Pfam Name: RNA recognition motif. (a.k.a. RRM, RBD, or RNP domain) Pfam Description: RNA recognition motif. (a.k.a. RRM, RBD, or RNP
  misc_feature (12)..(283): Homolog of NCBI NO: 629557 NR Description: RNA-binding protein RNP-D precursor - Arabidopsis
  misc_feature (25)..(283): Homolog of NCBI NO: 1076305 NR Description: RNA-binding protein cp31 precursor - Arabidopsis
  misc_feature (25)..(283): Homolog of NCBI NO: 681908 NR Description: cp31 [Arabidopsis thaliana]
  misc_feature (1)..(281): Homolog of NCBI NO: 133246 NR Description: 28 kDa ribonucleoprotein, chloroplast precursor
  misc_feature (1)..(281): Homolog of NCBI NO: 133248 NR Description: 31 kDa ribonucleoprotein, chloroplast precursor
  misc_feature (56)..(281): Homolog of NCBI NO: 19032260 NR Description: RNA-binding protein precursor [Persea americana]
  misc_feature (67)..(283): Homolog of NCBI NO: 100903 NR Description: nucleic acid-binding protein - maize
  misc_feature (1)..(283): Homolog of NCBI NO: 7446358 NR Description: cp31AHv protein - barley
  misc_feature (1)..(283): Homolog of NCBI NO: 7446356 NR Description: Ps16 protein - wheat
  misc_feature (1)..(283): Homolog of NCBI NO: 7446359 NR Description: nucleic acid-binding protein - barley
MSLRSLAMAMADTALPPAHKLLPTVSLPLLSSSTRAAPLLLFARRRLPLAPLVTSSDAVEAKSADEEEEKAGEPVDMEAGEFEEVLASGGEGEGQYAAVEPPEEAKVYVGNLPYDVDSEGLAQIFDQAGVVEVAEVIYNRETGQSRGFGFVTMSTVEEADKAIEMFNRYDISGRLLNVNRASSRGTRMERPQRQFAPAFRAYVGNLPWQVDDSRLVQLFSEHGEVVDAKVVYDRETGRSRGFGFVSMVSKEELNDAISALDGQELDGRPLRVNVAAERPQRGF

SEQ ID NO: 1778 - DNA, 1341 bp, Zea mays subsp. mays
  misc_feature (1)..(1341): Ceres Seq. ID no. 12405842
  misc_feature: MA Experiment ID: 108527 Result: Up-regulated in Transcription
  misc_feature: MA Experiment 108527 PARAMETER Experiment Name: Zm_5mM_NO_P Parameter: Age (day) Value: 8
  misc_feature: MA Experiment 108527 PARAMETER Experiment Name: Zm_5mM_NO_P Parameter: Organism Value: Zea mays
  misc_feature: MA Experiment 108527 PARAMETER Experiment Name: Zm_5mM_NO_P Parameter: Plant Line Value: 35A19
  misc_feature: MA Experiment 108527 PARAMETER Experiment Name: Zm_5mM_NO_P Parameter: Timepoint (hr) Value: 6
  misc_feature: MA Experiment 108527 PARAMETER Experiment Name: Zm_5mM_NO_P Parameter: Tissue Value: Aerial
  misc_feature: MA Experiment 108527 PARAMETER Experiment Name: Zm_5mM_NO_P Parameter: Treatment Value: 5mM NO vs. No Treatment
  misc_feature: MA Experiment ID: 108529 Result: Up-regulated in Transcription
  misc_feature: MA Experiment 108529 PARAMETER Experiment Name: Zm_Imbibed_Seeds_P Parameter: Age (day) Value: 5 vs. 2
  misc_feature: MA Experiment 108529 PARAMETER Experiment Name: Zm_Imbibed_Seeds_P Parameter: Organism Value: Zea mays
  misc_feature: MA Experiment 108529 PARAMETER Experiment Name: Zm_Imbibed_Seeds_P Parameter: Plant Line Value: 35A19
  misc_feature: MA Experiment 108529 PARAMETER Experiment Name: Zm_Imbibed_Seeds_P Parameter: Tissue Value: Roots vs. Embryo
  misc_feature: MA Experiment ID: 108535 Result: Down-regulated in Transcription
  misc_feature: MA Experiment 108535 PARAMETER Experiment Name: Zm_Meristem_P Parameter: Age (day) Value: 8
  misc_feature: MA Experiment 108535 PARAMETER Experiment Name: Zm_Meristem_P Parameter: Organism Value: Zea mays
  misc_feature: MA Experiment 108535 PARAMETER Experiment Name: Zm_Meristem_P Parameter: Plant Line Value: 35A19
  misc_feature: MA Experiment 108535 PARAMETER Experiment Name: Zm_Meristem_P Parameter: Tissue Value: Root Meristem vs. Above Root Meristem
acccgaaattccaaacccacttcgtcaagcaacaacaccggctaaaaattaaaggaggcagcgcgtagcagttggtcgccaccgtcacgtacacacgctcacgttggaggctggactccgcccccgtgctgctcttcgccttgcctttctccgccggagaccccgccgcctcagctgccacaggaggaggaggcaaccatggcggggaggtacgaccgcaatccgttcgaggaggatgacgtcaacccctttgcgggaggaagtgtacctcctgcttctaattctcggatgtcagcacttcctcatgaaccagctggcttctacaatgatcgtggtgcaacagtggacatacctcttgattcaacgaaggacctaagtaaaaaggagaaagaactgcaggcaaaggaagctgagctaaacaaacgggaaagggagctgaaaagaaaggaggaagctgcagccagagctggtattgtcattgaagataagaattggccaccctttatgcccattattcatcatgacatttcgaacgagataccaattcacctgcaaaggatgcagtacctggcgttttcttcactattgggattgacagcttgcctcttttggaacatcattgcaactacagcagcatggattaaatcagaaggtgtcatgatctggttgctagcaatcatctacttcatctctggtgtccctggggcctatgtgctttggtatcgcccgctttacaatgcgatgaggactgaaagtgctttgaagtttgggtggtttttcttgttttaccttctccatatcttattctgtgtctggtcagctgtggctcctccatttccattcaaaggaaaatccttggctgggattttgccggctattgatatcataggcaggagtgctattgtggggatattttacttcattggatttggaatgttctgccttgaatcactgctcagcatcgttgtcattcagcaagtatacatgtacttccgtggaagtggaaaagctgcagagatgaagcgagaggcggcccgtgggtgctatgaggaatgccttttgatagagcgacctaggcgactggaagagacacggtgtgacaatgggtaactacgttatgtacatatgctgttcgtctctgagattacttatactagcttatagccttcttgccttcatgcaatgtataccacctaccaccggagcttgatctcttacctaggttcagatgtgcttataggtaactagttttttttatacatttcctacatgatttgtactcttaactcgcgagacaattgttgttgttctttggatctcgagtgattctttgcacggccc

SEQ ID NO: 1779 - protein, 303 aa, Zea mays subsp. mays
  peptide (1)..(303): Ceres Seq. ID no. 12405843
  misc_feature (95)..(269): Pfam Name: SCAMP family Pfam Description: SCAMP family
  misc_feature (5)..(268): Homolog of NCBI NO: 38347080 NR Description: OSJNBa0006A01.21 [Oryza sativa (japonica
  misc_feature (1)..(268): Homolog of NCBI NO: 15222550 NR Description: secretory carrier membrane protein, putative
  misc_feature (1)..(281): Homolog of NCBI NO: 25402653 NR Description: hypothetical protein [imported] - Arabidopsis
  misc_feature (4)..(280): Homolog of NCBI NO: 18379111 NR Description: expressed protein
  misc_feature (1)..(281): Homolog of NCBI NO: 3941289 NR Description: similarity to SCAMP37 [Pisum sativum]
  misc_feature (4)..(280): Homolog of NCBI NO: 15226410 NR Description: putative secretory carrier-associated membrane
  misc_feature (1)..(281): Homolog of NCBI NO: 15220305 NR Description: secretory carrier membrane protein, putative
  misc_feature (22)..(281): Homolog of NCBI NO: 34899754 NR Description: putative secretory carrier membrane protein
  misc_feature (1)..(281): Homolog of NCBI NO: 15219893 NR Description: secretory carrier membrane protein
  misc_feature (1)..(281): Homolog of NCBI NO: 7109232 NR Description: secretory carrier membrane protein [Oryza sativa]
MAGRYDRNPFEEDDVNPFAGGSVPPASNSRMSALPHEPAGFYNDRGATVDIPLDSTKDLSKKEKELQAKEAELNKRERELKRKEEAAARAGIVIEDKNWPPFMPIIHHDISNEIPIHLQRMQYLAFSSLLGLTACLFWNIIATTAAWIKSEGVMIWLLAIIYFISGVPGAYVLWYRPLYNAMRTESALKFGWFFLFYLLHILFCVWSAVAPPFPFKGKSLAGILPAIDIIGRSAIVGIFYFIGFGMFCLESLLSIVVIQQVYMYFRGSGKAAEMKREAARGCYEECLLIERPRRLEETRCDNG

SEQ ID NO: 1780 - protein, 273 aa, Zea mays subsp. mays
  peptide (1)..(273): Ceres Seq. ID no. 12405844
  misc_feature (65)..(239): Pfam Name: SCAMP family Pfam Description: SCAMP family
  misc_feature (1)..(238): Homolog of NCBI NO: 38347080 NR Description: OSJNBa0006A01.21 [Oryza sativa (japonica
  misc_feature (1)..(238): Homolog of NCBI NO: 15222550 NR Description: secretory carrier membrane protein, putative
  misc_feature (1)..(251): Homolog of NCBI NO: 25402653 NR Description: hypothetical protein [imported] - Arabidopsis
  misc_feature (1)..(250): Homolog of NCBI NO: 18379111 NR Description: expressed protein
  misc_feature (1)..(251): Homolog of NCBI NO: 3941289 NR Description: similarity to SCAMP37 [Pisum sativum]
  misc_feature (1)..(250): Homolog of NCBI NO: 15226410 NR Description: putative secretory carrier-associated membrane
  misc_feature (1)..(251): Homolog of NCBI NO: 15220305 NR Description: secretory carrier membrane protein, putative
  misc_feature (1)..(251): Homolog of NCBI NO: 34899754 NR Description: putative secretory carrier membrane protein
  misc_feature (1)..(251): Homolog of NCBI NO: 15219893 NR Description: secretory carrier membrane protein
  misc_feature (1)..(251): Homolog of NCBI NO: 7109232 NR Description: secretory carrier membrane protein [Oryza sativa]
MSALPHEPAGFYNDRGATVDIPLDSTKDLSKKEKELQAKEAELNKRERELKRKEEAAARAGIVIEDKNWPPFMPIIHHDISNEIPIHLQRMQYLAFSSLLGLTACLFWNIIATTAAWIKSEGVMIWLLAIIYFISGVPGAYVLWYRPLYNAMRTESALKFGWFFLFYLLHILFCVWSAVAPPFPFKGKSLAGILPAIDIIGRSAIVGIFYFIGFGMFCLESLLSIVVIQQVYMYFRGSGKAAEMKREAARGCYEECLLIERPRRLEETRCDNG

SEQ ID NO: 1781 - protein, 201 aa, Zea mays subsp. mays
  peptide (1)..(201): Ceres Seq. ID no. 12405845
  misc_feature (1)..(167): Pfam Name: SCAMP family Pfam Description: SCAMP family
  misc_feature (1)..(179): Homolog of NCBI NO: 25402653 NR Description: hypothetical protein [imported] - Arabidopsis
  misc_feature (1)..(178): Homolog of NCBI NO: 18379111 NR Description: expressed protein
  misc_feature (1)..(179): Homolog of NCBI NO: 3941289 NR Description: similarity to SCAMP37 [Pisum sativum]
  misc_feature (1)..(178): Homolog of NCBI NO: 15226410 NR Description: putative secretory carrier-associated membrane
  misc_feature (1)..(166): Homolog of NCBI NO: 38347080 NR Description: OSJNBa0006A01.21 [Oryza sativa (japonica
  misc_feature (1)..(166): Homolog of NCBI NO: 15222550 NR Description: secretory carrier membrane protein, putative
  misc_feature (1)..(179): Homolog of NCBI NO: 15220305 NR Description: secretory carrier membrane protein, putative
  misc_feature (1)..(179): Homolog of NCBI NO: 34899754 NR Description: putative secretory carrier membrane protein
  misc_feature (1)..(179): Homolog of NCBI NO: 15219893 NR Description: secretory carrier membrane protein
  misc_feature (1)..(179): Homolog of NCBI NO: 7109232 NR Description: secretory carrier membrane protein [Oryza sativa]
MPIIHHDISNEIPIHLQRMQYLAFSSLLGLTACLFWNIIATTAAWIKSEGVMIWLLAIIYFISGVPGAYVLWYRPLYNAMRTESALKFGWFFLFYLLHILFCVWSAVAPPFPFKGKSLAGILPAIDIIGRSAIVGIFYFIGFGMFCLESLLSIVVIQQVYMYFRGSGKAAEMKREAARGCYEECLLIERPRRLEETRCDNG

SEQ ID NO: 1782 - DNA, 1380 bp, Zea mays subsp. mays
  misc_feature (1)..(1380): Ceres Seq. ID no. 12412233
  misc_feature: MA Experiment ID: 20000492 Result: Down-regulated in Transcription
  misc_feature: MA Experiment 20000492 PARAMETER Experiment Name: Zm_Hybrid_Seed_Dev_P Parameter: DAP Value: 12
  misc_feature: MA Experiment 20000492 PARAMETER Experiment Name: Zm_Hybrid_Seed_Dev_P Parameter: Organism Value: Zea mays
  misc_feature: MA Experiment 20000492 PARAMETER Experiment Name: Zm_Hybrid_Seed_Dev_P Parameter: Plant Line Value: 35A19
  misc_feature: MA Experiment 20000492 PARAMETER Experiment Name: Zm_Hybrid_Seed_Dev_P Parameter: Tissue Value: Fert Kernel vs. Unfert Floret
atcaaaggcgtaaactcggcgtagacggagactgcagacgcccggaccacaggaacaccgaagtaccgaacactaccggccacacgctcgagaataggcggcggtgcaggtcctcctccatctctgtcgtgggttcaacttcactgtgaatacgctgacgctacgagaagtcatcacggaaggggtctcgaagcaaggtgcaaagactcacctgccgtctctgatgggctttgctggctgggtatccatgctgctcttcctcctggtcgccggtgctgtagcaaatgaccagatcttcaccacttcaggtgtgccatttgggcggagttcgcgtgagccaagttaccgcgtcgaattccatcctgttgattcaccattccatccagagaatggtcaagaatcggtaccaatggctagtcatgatgggaaacgttataaatgctttctaccagttgaagaaactaaaaccatgaagtcaatgcttccgcaaaatgcaactaatgttataatagaaagtgaaaggagaattaagccaaaggagccagatgagttacttgaggttctcaaggaccagtgcttctacaggcatgaaggttggtggtcgtatgaattctgttatcatgggaaaatcagacaggtccatgtagacgacgataaggttatccaagaatttgttctaggcgaattcgatgacgacgcgactgctgcataccatgaaaatatcacttctgagttagttgacgatgaccatcatgtgaaagatatatctcagaggtatcatgttcacttgtatacaaatgggactgtatgcgatctcacagatattccgcgggagacagaggttagatttgtctgctcggagcctactgtactgattagttcagtcaaggagatctcttcctgcagatatgttgtaacgattcaaagtcccatgctttgcaaaaacccgttattccaggaagaaaaacgaaccctctccatccactgcaatgagttgcctgctagagcggaatccagcgcggaggatgactcgcttccaaaagaagctcagatttccatcatccccgatcaggatgagctacatgatttcccagcctatgctacttgatttgcctccaataattatgtttgatgtagaaaaaaaaacaccattttggaggcgcaggggcaacttagcaacactatgtattaactatctcgtagatactacagcagaggctccttgtaaagcaggttgagacgatcattctgcagttcttattatataggatgattacgaaggtaacatgtttgggacagtaacatttgcttgaaatgtatatagtctacaacaagaataatgccagcattcttgaaatgtaggtgtgcgagcacttttac

SEQ ID NO: 1783 - protein, 294 aa, Zea mays subsp. mays
  peptide (1)..(294): Ceres Seq. ID no. 12412234
  misc_feature (7)..(245): Homolog of NCBI NO: 29243990 NR Description: hypothetical protein 1300007E20 [Mus musculus]
  misc_feature (41)..(255): Homolog of NCBI NO: 24583799 NR Description: CG6766-PA [Drosophila melanogaster]
  misc_feature (63)..(147): Homolog of NCBI NO: 7487985 NR Description: hypothetical protein F7N22.4 - Arabidopsis
  misc_feature (41)..(255): Homolog of NCBI NO: 21483540 NR Description: RE67845p [Drosophila melanogaster]
  misc_feature (164)..(242): Homolog of NCBI NO: 7487985 NR Description: hypothetical protein F7N22.4 - Arabidopsis
  misc_feature (7)..(245): Homolog of NCBI NO: 5803109 NR Description: amplified in osteosarcoma [Homo sapiens]
  misc_feature (7)..(245): Homolog of NCBI NO: 12653521 NR Description: Similar to amplified in osteosarcoma [Homo
  misc_feature (47)..(258): Homolog of NCBI NO: 28850402 NR Description: similar to Arabidopsis thaliana (Mouse-ear
  misc_feature (9)..(282): Homolog of NCBI NO: 21592392 NR Description: unknown [Arabidopsis thaliana]
  misc_feature (9)..(282): Homolog of NCBI NO: 18421420 NR Description: putative protein
MGFAGWVSMLLFLLVAGAVANDQIFTTSGVPFGRSSREPSYRVEFHPVDSPFHPENGQESVPMASHDGKRYKCFLPVEETKTMKSMLPQNATNVIIESERRIKPKEPDELLEVLKDQCFYRHEGWWSYEFCYHGKIRQVHVDDDKVIQEFVLGEFDDDATAAYHENITSELVDDDHHVKDISQRYHVHLYTNGTVCDLTDIPRETEVRFVCSEPTVLISSVKEISSCRYVVTIQSPMLCKNPLFQEEKRTLSIHCNELPARAESSAEDDSLPKEAQISIIPDQDELHDFPAYAT

SEQ ID NO: 1784 - protein, 286 aa, Zea mays subsp. mays
  peptide (1)..(286): Ceres Seq. ID no. 12412235
  misc_feature (1)..(237): Homolog of NCBI NO: 29243990 NR Description: hypothetical protein 1300007E20 [Mus musculus]
  misc_feature (33)..(247): Homolog of NCBI NO: 24583799 NR Description: CG6766-PA [Drosophila melanogaster]
  misc_feature (55)..(139): Homolog of NCBI NO: 7487985 NR Description: hypothetical protein F7N22.4 - Arabidopsis
  misc_feature (33)..(247): Homolog of NCBI NO: 21483540 NR Description: RE67845p [Drosophila melanogaster]
  misc_feature (156)..(234): Homolog of NCBI NO: 7487985 NR Description: hypothetical protein F7N22.4 - Arabidopsis
  misc_feature (1)..(237): Homolog of NCBI NO: 5803109 NR Description: amplified in osteosarcoma [Homo sapiens]
  misc_feature (1)..(237): Homolog of NCBI NO: 12653521 NR Description: Similar to amplified in osteosarcoma [Homo
  misc_feature (39)..(250): Homolog of NCBI NO: 28850402 NR Description: similar to Arabidopsis thaliana (Mouse-ear
  misc_feature (1)..(274): Homolog of NCBI NO: 21592392 NR Description: unknown [Arabidopsis thaliana]
  misc_feature (1)..(274): Homolog of NCBI NO: 18421420 NR Description: putative protein
MLLFLLVAGAVANDQIFTTSGVPFGRSSREPSYRVEFHPVDSPFHPENGQESVPMASHDGKRYKCFLPVEETKTMKSMLPQNATNVIIESERRIKPKEPDELLEVLKDQCFYRHEGWWSYEFCYHGKIRQVHVDDDKVIQEFVLGEFDDDATAAYHENITSELVDDDHHVKDISQRYHVHLYTNGTVCDLTDIPRETEVRFVCSEPTVLISSVKEISSCRYVVTIQSPMLCKNPLFQEEKRTLSIHCNELPARAESSAEDDSLPKEAQISIIPDQDELHDFPAYAT

SEQ ID NO: 1785 - protein, 232 aa, Zea mays subsp. mays
  peptide (1)..(232): Ceres Seq. ID no. 12412236
  misc_feature (1)..(183): Homolog of NCBI NO: 29243990 NR Description: hypothetical protein 1300007E20 [Mus musculus]
  misc_feature (1)..(193): Homolog of NCBI NO: 24583799 NR Description: CG6766-PA [Drosophila melanogaster]
  misc_feature (1)..(85): Homolog of NCBI NO: 7487985 NR Description: hypothetical protein F7N22.4 - Arabidopsis
  misc_feature (1)..(193): Homolog of NCBI NO: 21483540 NR Description: RE67845p [Drosophila melanogaster]
  misc_feature (102)..(180): Homolog of NCBI NO: 7487985 NR Description: hypothetical protein F7N22.4 - Arabidopsis
  misc_feature (1)..(183): Homolog of NCBI NO: 5803109 NR Description: amplified in osteosarcoma [Homo sapiens]
  misc_feature (1)..(183): Homolog of NCBI NO: 12653521 NR Description: Similar to amplified in osteosarcoma [Homo
  misc_feature (1)..(196): Homolog of NCBI NO: 28850402 NR Description: similar to Arabidopsis thaliana (Mouse-ear
  misc_feature (1)..(220): Homolog of NCBI NO: 21592392 NR Description: unknown [Arabidopsis thaliana]
  misc_feature (1)..(220): Homolog of NCBI NO: 18421420 NR Description: putative protein
MASHDGKRYKCFLPVEETKTMKSMLPQNATNVIIESERRIKPKEPDELLEVLKDQCFYRHEGWWSYEFCYHGKIRQVHVDDDKVIQEFVLGEFDDDATAAYHENITSELVDDDHHVKDISQRYHVHLYTNGTVCDLTDIPRETEVRFVCSEPTVLISSVKEISSCRYVVTIQSPMLCKNPLFQEEKRTLSIHCNELPARAESSAEDDSLPKEAQISIIPDQDELHDFPAYAT

SEQ ID NO: 1786 - DNA, 1574 bp, Zea mays subsp. mays
  misc_feature (1)..(1574): Ceres Seq. ID no. 12348933
  misc_feature: MA Experiment ID: 108543 Result: Up-regulated in Transcription
aaaatagcaaatttctccacacggacacagcagcgagagaagagagtccactgtccaccccaccagaaaaacgcattccgcagacgcgcggcgagggagtaggaggggacggcgggtgccgaggcccgcaggcacggggaagctacctgcttgcgtagccgggcgggctcgcgctgtgctgtcgctccatgtcggtcgccggcgagagcggcggggatccggcggcggcacgccgccggtgggatctctccaacaagggccccgacagcactccaatgttgaaagaggctgtggaaatgtctacagatgaagaatcggatggcgttgttatatgccatccgaatggtaacactgatggatgtgacgaagccattagtggcagtcatgatgatgatagcccagaaggccaggaaactagttccatcaaggaccctgatgtagaaggtgacacacaggaagacaagtgtgtaaatcaagattcactgaagttgattgatcaagagacgtctgctccccccaagtccccagcgaagtccgcgactgcgagttctggaccagagaagcctaaacgtgttgtcacccaaccattgtctctttctactcaacgaaggtcatctggagtaaatggtggtgtgaccaatccatcacccaataaggataaatctggtgataaaagtagcatctctccagcaagcatgacaaagaagtgtacgccgttggcacctaggaagactttgcagcctgagcaagcatttcaccctctggaagaggactcttgttctgtgacttcctcgactacaacatcatcaagagctggcagaactaagacaactgttcctgttgccccatcatttgtgtgtgctaaccgtgctgacaagaggaaggagttctacacaaaattagaggagaaacataaagctttggaagcagagaaggacgaggctgaggccaggaaaaaggaagagcaagacgttgctataaagcaactaaggaagtcattggtgattagagcgaaacccatgccaagcttctatcaagaaggccccccaccaaaggctgaacttaagaaggtgcctcctactcgtgccaaatcaccaaagtttacaagctcaaggagaaagagctgcaatgacacaccacagacacccgagggaaaaaacaccaacgcaacatctaccacccggccacatcgtcacagcatcggggcttctaaagatgccagcagagtacagtgctcgccgaagagcggcgtggcgaccaaaactagatctgtcaagcctgagctgaaggccctctgaagcgcatgcgtagcattcaagtgctgcgattgtctctgtacaaacagaatcgcctgactcttagccgtttccatttgcatgcattttttttgttttgttttgttctatacccagcatctccaccaaaaagaaggctgtagggccaatgacgttgttcgcgctgctggaccttgtctccattttcgtcttgtactcgttaagaactctgttgctgctgggaccatgtgacattcattccatgtaaattacctggggatcccggtagggagctcgact

SEQ ID NO: 1787 - protein, 369 aa, Zea mays subsp. mays
  peptide (1)..(369): Ceres Seq. ID no. 12348934
  misc_feature (115)..(343): Homolog of NCBI NO: 18396961 NR Description: expressed protein
  misc_feature (115)..(343): Homolog of NCBI NO: 6175167 NR Description: unknown protein [Arabidopsis thaliana]
  misc_feature (115)..(343): Homolog of NCBI NO: 30679219 NR Description: expressed protein [Arabidopsis thaliana]
  misc_feature (122)..(369): Homolog of NCBI NO: 32395575 NR Description: seed specific protein Bn15D14A [Brassica napus]
  misc_feature (50)..(353): Homolog of NCBI NO: 18404945 NR Description: expressed protein
  misc_feature (50)..(353): Homolog of NCBI NO: 21553401 NR Description: unknown [Arabidopsis thaliana]
  misc_feature (35)..(347): Homolog of NCBI NO: 15228950 NR Description: unknown protein; protein id: At3g23090.1
  misc_feature (35)..(347): Homolog of NCBI NO: 9294199 NR Description: gb|AAF04893.1~gene_id:MXC7.13~similar to unknown
  misc_feature (103)..(367): Homolog of NCBI NO: 34393229 NR Description: putative seed specific protein
  misc_feature (1)..(364): Homolog of NCBI NO: 34897180 NR Description: unknown protein [Oryza sativa (japonica
MSVAGESGGDPAAARRRWDLSNKGPDSTPMLKEAVEMSTDEESDGVVICHPNGNTDGCDEAISGSHDDDSPEGQETSSIKDPDVEGDTQEDKCVNQDSLKLIDQETSAPPKSPAKSATASSGPEKPKRVVTQPLSLSTQRRSSGVNGGVTNPSPNKDKSGDKSSISPASMTKKCTPLAPRKTLQPEQAFHPLEEDSCSVTSSTTTSSRAGRTKTTVPVAPSFVCANRADKRKEFYTKLEEKHKALEAEKDEAEARKKEEQDVAIKQLRKSLVIRAKPMPSFYQEGPPPKAELKKVPPTRAKSPKFTSSRRKSCNDTPQTPEGKNTNATSTTRPHRHSIGASKDASRVQCSPKSGVATKTRSVKPELKAL

SEQ ID NO: 1788 - protein, 340 aa, Zea mays subsp. mays
  peptide (1)..(340): Ceres Seq. ID no. 12348935
  misc_feature (86)..(314): Homolog of NCBI NO: 18396961 NR Description: expressed protein
  misc_feature (86)..(314): Homolog of NCBI NO: 6175167 NR Description: unknown protein [Arabidopsis thaliana]
  misc_feature (86)..(314): Homolog of NCBI NO: 30679219 NR Description: expressed protein [Arabidopsis thaliana]
  misc_feature (93)..(340): Homolog of NCBI NO: 32395575 NR Description: seed specific protein Bn15D14A [Brassica napus]
  misc_feature (21)..(324): Homolog of NCBI NO: 18404945 NR Description: expressed protein
  misc_feature (21)..(324): Homolog of NCBI NO: 21553401 NR Description: unknown [Arabidopsis thaliana]
  misc_feature (6)..(318): Homolog of NCBI NO: 15228950 NR Description: unknown protein; protein id: At3g23090.1
  misc_feature (6)..(318): Homolog of NCBI NO: 9294199 NR Description: gb|AAF04893.1~gene_id:MXC7.13~similar to unknown
  misc_feature (74)..(338): Homolog of NCBI NO: 34393229 NR Description: putative seed specific protein
  misc_feature (1)..(335): Homolog of NCBI NO: 34897180 NR Description: unknown protein [Oryza sativa (japonica
MLKEAVEMSTDEESDGVVICHPNGNTDGCDEAISGSHDDDSPEGQETSSIKDPDVEGDTQEDKCVNQDSLKLIDQETSAPPKSPAKSATASSGPEKPKRVVTQPLSLSTQRRSSGVNGGVTNPSPNKDKSGDKSSISPASMTKKCTPLAPRKTLQPEQAFHPLEEDSCSVTSSTTTSSRAGRTKTTVPVAPSFVCANRADKRKEFYTKLEEKHKALEAEKDEAEARKKEEQDVAIKQLRKSLVIRAKPMPSFYQEGPPPKAELKKVPPTRAKSPKFTSSRRKSCNDTPQTPEGKNTNATSTTRPHRHSIGASKDASRVQCSPKSGVATKTRSVKPELKAL

SEQ ID NO: 1789 - protein, 333 aa, Zea mays subsp. mays
  peptide (1)..(333): Ceres Seq. ID no. 12348936
  misc_feature (79)..(307): Homolog of NCBI NO: 18396961 NR Description: expressed protein
  misc_feature (79)..(307): Homolog of NCBI NO: 6175167 NR Description: unknown protein [Arabidopsis thaliana]
  misc_feature (79)..(307): Homolog of NCBI NO: 30679219 NR Description: expressed protein [Arabidopsis thaliana]
  misc_feature (86)..(333): Homolog of NCBI NO: 32395575 NR Description: seed specific protein Bn15D14A [Brassica napus]
  misc_feature (14)..(317): Homolog of NCBI NO: 18404945 NR Description: expressed protein
  misc_feature (14)..(317): Homolog of NCBI NO: 21553401 NR Description: unknown [Arabidopsis thaliana]
  misc_feature (1)..(311): Homolog of NCBI NO: 15228950 NR Description: unknown protein; protein id: At3g23090.1
  misc_feature (1)..(311): Homolog of NCBI NO: 9294199 NR Description: gb|AAF04893.1~gene_id:MXC7.13~similar to unknown
  misc_feature (67)..(331): Homolog of NCBI NO: 34393229 NR Description: putative seed specific protein
  misc_feature (1)..(328): Homolog of NCBI NO: 34897180 NR Description: unknown protein [Oryza sativa (japonica
MSTDEESDGVVICHPNGNTDGCDEAISGSHDDDSPEGQETSSIKDPDVEGDTQEDKCVNQDSLKLIDQETSAPPKSPAKSATASSGPEKPKRVVTQPLSLSTQRRSSGVNGGVTNPSPNKDKSGDKSSISPASMTKKCTPLAPRKTLQPEQAFHPLEEDSCSVTSSTTTSSRAGRTKTTVPVAPSFVCANRADKRKEFYTKLEEKHKALEAEKDEAEARKKEEQDVAIKQLRKSLVIRAKPMPSFYQEGPPPKAELKKVPPTRAKSPKFTSSRRKSCNDTPQTPEGKNTNATSTTRPHRHSIGASKDASRVQCSPKSGVATKTRSVKPELKAL

SEQ ID NO: 1790 - DNA, 1625 bp, Zea mays subsp. mays
  misc_feature (1)..(1625): Ceres Seq. ID no. 13494770
  misc_feature: MA Experiment ID: 108504 Result: Down-regulated in Transcription
  misc_feature: MA Experiment 108504 PARAMETER Experiment Name: Zm_Drought_P Parameter: Age (day) Value: 8
  misc_feature: MA Experiment 108504 PARAMETER Experiment Name: Zm_Drought_P Parameter: Organism Value: Zea mays
  misc_feature: MA Experiment 108504 PARAMETER Experiment Name: Zm_Drought_P Parameter: Plant Line Value: 35A19
  misc_feature: MA Experiment 108504 PARAMETER Experiment Name: Zm_Drought_P Parameter: Timepoint (hr) Value: 12
  misc_feature: MA Experiment 108504 PARAMETER Experiment Name: Zm_Drought_P Parameter: Tissue Value: Aerial
  misc_feature: MA Experiment 108504 PARAMETER Experiment Name: Zm_Drought_P Parameter: Treatment Value: Drought vs. No Drought
  misc_feature: MA Experiment ID: 108527 Result: Down-regulated in Transcription
  misc_feature: MA Experiment 108527 PARAMETER Experiment Name: Zm_5mM_NO_P Parameter: Age (day) Value: 8
  misc_feature: MA Experiment 108527 PARAMETER Experiment Name: Zm_5mM_NO_P Parameter: Organism Value: Zea mays
  misc_feature: MA Experiment 108527 PARAMETER Experiment Name: Zm_5mM_NO_P Parameter: Plant Line Value: 35A19
  misc_feature: MA Experiment 108527 PARAMETER Experiment Name: Zm_5mM_NO_P Parameter: Timepoint (hr) Value: 6
  misc_feature: MA Experiment 108527 PARAMETER Experiment Name: Zm_5mM_NO_P Parameter: Tissue Value: Aerial
  misc_feature: MA Experiment 108527 PARAMETER Experiment Name: Zm_5mM_NO_P Parameter: Treatment Value: 5mM NO vs. No Treatment
  misc_feature: MA Experiment ID: 108535 Result: Down-regulated in Transcription
  misc_feature: MA Experiment 108535 PARAMETER Experiment Name: Zm_Meristem_P Parameter: Age (day) Value: 8
  misc_feature: MA Experiment 108535 PARAMETER Experiment Name: Zm_Meristem_P Parameter: Organism Value: Zea mays
  misc_feature: MA Experiment 108535 PARAMETER Experiment Name: Zm_Meristem_P Parameter: Plant Line Value: 35A19
  misc_feature: MA Experiment 108535 PARAMETER Experiment Name: Zm_Meristem_P Parameter: Tissue Value: Root Meristem vs. Above Root Meristem
  misc_feature: MA Experiment ID: 108556 Result: Down-regulated in Transcription
  misc_feature: MA Experiment 108556 PARAMETER Experiment Name: Zm_Drought_P Parameter: Age (day) Value: 9
  misc_feature: MA Experiment 108556 PARAMETER Experiment Name: Zm_Drought_P Parameter: Organism Value: Zea mays
  misc_feature: MA Experiment 108556 PARAMETER Experiment Name: Zm_Drought_P Parameter: Plant Line Value: 35A19
  misc_feature: MA Experiment 108556 PARAMETER Experiment Name: Zm_Drought_P Parameter: Timepoint (hr) Value: 24
  misc_feature: MA Experiment 108556 PARAMETER Experiment Name: Zm_Drought_P Parameter: Tissue Value: Aerial
  misc_feature: MA Experiment 108556 PARAMETER Experiment Name: Zm_Drought_P Parameter: Treatment Value: Drought vs. No Drought
  misc_feature: MA Experiment ID: 108597 Result: Down-regulated in Transcription
  misc_feature: MA Experiment 108597 PARAMETER Experiment Name: Zm_100uM_ABA_P Parameter: Age (day) Value: 9
  misc_feature: MA Experiment 108597 PARAMETER Experiment Name: Zm_100uM_ABA_P Parameter: Organism Value: Zea mays
  misc_feature: MA Experiment 108597 PARAMETER Experiment Name: Zm_100uM_ABA_P Parameter: Plant Line Value: 35A19
  misc_feature: MA Experiment 108597 PARAMETER Experiment Name: Zm_100uM_ABA_P Parameter: Timepoint (hr) Value: 24
  misc_feature: MA Experiment 108597 PARAMETER Experiment Name: Zm_100uM_ABA_P Parameter: Tissue Value: Aerial
  misc_feature: MA Experiment 108597 PARAMETER Experiment Name: Zm_100uM_ABA_P Parameter: Treatment Value: 100uM ABA vs. No Treatment
  misc_feature: MA Experiment ID: 20000108 Result: Down-regulated in Transcription
  misc_feature: MA Experiment 20000108 PARAMETER Experiment Name: Zm_Root-Tips_P Parameter: Age (day) Value: 12
  misc_feature: MA Experiment 20000108 PARAMETER Experiment Name: Zm_Root-Tips_P Parameter: Organism Value: Zea mays
  misc_feature: MA Experiment 20000108 PARAMETER Experiment Name: Zm_Root-Tips_P Parameter: Tissue Value: Root tips vs. Root mid region    35
  misc_feature: MA Experiment 20000108 PARAMETER Experiment Name: Zm_Root-Tips_P Parameter: Tissue Value: Root tips vs. Root mid region   Sequence Listing-Misc Features (4)
  misc_feature: MA Experiment ID: 20000477 Result: Down-regulated in Transcription
  misc_feature: MA Experiment 20000477 PARAMETER Experiment Name: Zm_5mM_SA_P Parameter: Age (day) Value: 10
  misc_feature: MA Experiment 20000477 PARAMETER Experiment Name: Zm_5mM_SA_P Parameter: Organism Value: Zea mays
  misc_feature: MA Experiment 20000477 PARAMETER Experiment Name: Zm_5mM_SA_P Parameter: Plant Line Value: 35A19
  misc_feature: MA Experiment 20000477 PARAMETER Experiment Name: Zm_5mM_SA_P Parameter: Timepoint (hr) Value: 48
  misc_feature: MA Experiment 20000477 PARAMETER Experiment Name: Zm_5mM_SA_P Parameter: Tissue Value: Aerial
  misc_feature: MA Experiment 20000477 PARAMETER Experiment Name: Zm_5mM_SA_P Parameter: Treatment Value: 5mM SA vs. No Treatment
  misc_feature: MA Experiment ID: 20000478 Result: Down-regulated in Transcription
  misc_feature: MA Experiment 20000478 PARAMETER Experiment Name: Zm_5mM_SA_P Parameter: Age (day) Value: 11
  misc_feature: MA Experiment 20000478 PARAMETER Experiment Name: Zm_5mM_SA_P Parameter: Organism Value: Zea mays
  misc_feature: MA Experiment 20000478 PARAMETER Experiment Name: Zm_5mM_SA_P Parameter: Plant Line Value: 35A19
  misc_feature: MA Experiment 20000478 PARAMETER Experiment Name: Zm_5mM_SA_P Parameter: Timepoint (hr) Value: 72
  misc_feature: MA Experiment 20000478 PARAMETER Experiment Name: Zm_5mM_SA_P Parameter: Tissue Value: Aerial
  misc_feature: MA Experiment 20000478 PARAMETER Experiment Name: Zm_5mM_SA_P Parameter: Treatment Value: 5mM SA vs. No Treatment
  misc_feature: MA Experiment ID: 20000479 Result: Down-regulated in Transcription
  misc_feature: MA Experiment 20000479 PARAMETER Experiment Name: Zm_Drought_P Parameter: Age (day) Value: 10
  misc_feature: MA Experiment 20000479 PARAMETER Experiment Name: Zm_Drought_P Parameter: Organism Value: Zea mays
  misc_feature: MA Experiment 20000479 PARAMETER Experiment Name: Zm_Drought_P Parameter: Plant Line Value: 35A19
  misc_feature: MA Experiment 20000479 PARAMETER Experiment Name: Zm_Drought_P Parameter: Timepoint (hr) Value: 48
  misc_feature: MA Experiment 20000479 PARAMETER Experiment Name: Zm_Drought_P Parameter: Tissue Value: Aerial
  misc_feature: MA Experiment 20000479 PARAMETER Experiment Name: Zm_Drought_P Parameter: Treatment Value: Drought vs. No Drought
  misc_feature: MA Experiment ID: 20000480 Result: Down-regulated in Transcription
  misc_feature: MA Experiment 20000480 PARAMETER Experiment Name: Zm_Drought_P Parameter: Age (day) Value: 11
  misc_feature: MA Experiment 20000480 PARAMETER Experiment Name: Zm_Drought_P Parameter: Organism Value: Zea mays
  misc_feature: MA Experiment 20000480 PARAMETER Experiment Name: Zm_Drought_P Parameter: Plant Line Value: 35A19
  misc_feature: MA Experiment 20000480 PARAMETER Experiment Name: Zm_Drought_P Parameter: Timepoint (hr) Value: 72
  misc_feature: MA Experiment 20000480 PARAMETER Experiment Name: Zm_Drought_P Parameter: Tissue Value: Aerial
  misc_feature: MA Experiment 20000480 PARAMETER Experiment Name: Zm_Drought_P Parameter: Treatment Value: Drought vs. No Drought
  misc_feature: MA Experiment ID: 20000534 Result: Down-regulated in Transcription
  misc_feature: MA Experiment 20000534 PARAMETER Experiment Name: Zm_Hybrid_Pollen_P Parameter: Age (day) Value: 8
  misc_feature: MA Experiment 20000534 PARAMETER Experiment Name: Zm_Hybrid_Pollen_P Parameter: Organism Value: Zea mays
  misc_feature: MA Experiment 20000534 PARAMETER Experiment Name: Zm_Hybrid_Pollen_P Parameter: Plant Line Value: 35A19
  misc_feature: MA Experiment 20000534 PARAMETER Experiment Name: Zm_Hybrid_Pollen_P Parameter: Tissue Value: Pollen vs. Aerial
  misc_feature: MA Experiment ID: 20000535 Result: Down-regulated in Transcription
  misc_feature: MA Experiment 20000535 PARAMETER Experiment Name: Zm_Hybrid_Seed_Dev_P Parameter: DAP Value: 30 vs. 12
  misc_feature: MA Experiment 20000535 PARAMETER Experiment Name: Zm_Hybrid_Seed_Dev_P Parameter: Organism Value: Zea mays
  misc_feature: MA Experiment 20000535 PARAMETER Experiment Name: Zm_Hybrid_Seed_Dev_P Parameter: Plant Line Value: 35A19
  misc_feature: MA Experiment 20000535 PARAMETER Experiment Name: Zm_Hybrid_Seed_Dev_P Parameter: Tissue Value: Embryo vs. Unfert Floret
  misc_feature: MA Experiment ID: 20000626 Result: Down-regulated in Transcription
  misc_feature: MA Experiment 20000626 PARAMETER Experiment Name: Zm_Herbicide-Treatments_P Parameter: Timepoint (hr) Value: 12
  misc_feature: MA Experiment 20000626 PARAMETER Experiment Name: Zm_Herbicide-Treatments_P Parameter: Tissue Value: Aerial
  misc_feature: MA Experiment 20000626 PARAMETER Experiment Name: Zm_Herbicide-Treatments_P Parameter: Treatment Value: Roundup vs. No Treatment
atccccagctccgtttccgtctccggcaccaggaccagtgccacgccaaccaccgctacctgctccacgccaaacgccagttgctttgcagctactcgtgcagccgtgctcgccgcacacgattggcgccagtctttagttcaccggcaaagcttccgcgagcgcgcgggtgtaccacgtgacggactacggcgcggacccgaccggcgccgccgacgccacggcggcgatcagcaaggccatagctgacgcgttccgcccgcccaccaacgccaccatgaccggcggcatccccgacctcggcggcgccgaggtgcacctcgacggcggcacgtacctcatcaaggggcccctcacgctgccggcatccggcggcggcaacttcaagatccacagcgggtcgctgcgcgcgtccgacgacttcccgacggaccggtacctgatcgagctgtcggcggccaagagcagccggagctacgactacgagtacgccacgctgcgggacctgatgctggactgcagctaccgcggcggcggcgtggcggtggtggactcgctccgcgtcgccgtcgacaactgctacgtggcgcacttcgcgtccgacggcgtcgcggtgcgcggcggccacgagacgctcatccgcaacacctacctcggccagcacatgacggccgggggcgacccgggggagcgcggcttcacgggcacggccatccgcctcgacggcaacgacaactccgtgtccggacgtcgtcatcttctccgcggccacggggatcatggtcaccgcgccggccaactccatctccggcgtgcactgctacaacaaggccacgggcttcggcggcaccggcatccacctcaagatcccgggcctcacgcaggcgtggatcagcaactgctacatggactacaccagcatcgtcgccgaggaccccgtgctgctccacgtctccggatccttcttcctcggcgacgccaacgtcgtcctcaaggccgtcagcggcgtcgccaggggcgtccaggtcgtcggcaacatcttcagcggcagggacaagggcgtcgacatcgtgcagctggacggcgccttcgccaccgtggaccaggtgtacgtgcagcagaactccgccacggggatgaccgtcaggtccacctccgcgcgcgcatcgctccagggcaacgggacctcctggacgctcgacttctcgccggtgctgctgttcccggaccgcatcggccacgtgcagtactcgctcgtcgccggcgacgagttcccgggccacacgctccggaacgtgtccgggaaccaggtcgtggtcgccaccgacaaggccgtctcggccacggtccacgtcttggtggaccagaacagcgactgagataagataagagacactcgagagtgcctgcgtgcacgcagtatgcgtgctgctgcctgctcgcgcggctgctgcggagcaaggcgttattccttcgtttctttcttcttctcggaaatttcagccattcatgtcgtcgggaagatgacaattgtttgatgcgacaaaatgctccagaatgtatcattcttttgctgtatgaaatgaaatgattcagaagctccatcaatntgcgtaccaaggcat

SEQ ID NO: 1791 - protein, 368 aa, Zea mays subsp. mays
  peptide (1)..(368): Ceres Seq. ID no. 13494771
  misc_feature (1)..(159): Homolog of NCBI NO: 18415427 NR Description: expressed protein [Arabidopsis thaliana]
  misc_feature (1)..(159): Homolog of NCBI NO: 7485728 NR Description: hypothetical protein F18F4.140 - Arabidopsis
  misc_feature (6)..(156): Homolog of NCBI NO: 18415427 NR Description: expressed protein [Arabidopsis thaliana]
  misc_feature (6)..(156): Homolog of NCBI NO: 7485728 NR Description: hypothetical protein F18F4.140 - Arabidopsis
  misc_feature (1)..(156): Homolog of NCBI NO: 15235269 NR Description: expressed protein [Arabidopsis thaliana]
  misc_feature (1)..(156): Homolog of NCBI NO: 38347355 NR Description: OSJNBa0070C17.16 [Oryza sativa (japonica
  misc_feature (1)..(159): Homolog of NCBI NO: 18415427 NR Description: expressed protein [Arabidopsis thaliana]
  misc_feature (1)..(159): Homolog of NCBI NO: 7485728 NR Description: hypothetical protein F18F4.140 - Arabidopsis
  misc_feature (6)..(156): Homolog of NCBI NO: 18415427 NR Description: expressed protein [Arabidopsis thaliana]
  misc_feature (6)..(156): Homolog of NCBI NO: 7485728 NR Description: hypothetical protein F18F4.140 - Arabidopsis
  misc_feature (1)..(156): Homolog of NCBI NO: 15235269 NR Description: expressed protein [Arabidopsis thaliana]
  misc_feature (1)..(156): Homolog of NCBI NO: 38347355 NR Description: OSJNBa0070C17.16 [Oryza sativa (japonica
MTGGIPDLGGAEVHLDGGTYLIKGPLTLPASGGGNFKIHSGSLRASDDFPTDRYLIELSAAKSSRSYDYEYATLRDLMLDCSYRGGGVAVVDSLRVAVDNCYVAHFASDGVAVRGGHETLIRNTYLGQHMTAGGDPGERGFTGTAIRLDGNDNSVSGRRHLLRGHGDHGHRAGQLHLRRALLQQGHGLRRHRHPPQDPGPHAGVDQQLLHGLHQHRRRGPRAAPRLRILLPRRRQRRPQGRQRRRQGRPGRRQHLQRQGQGRRHRAAGRRLRHRGPGVRAAELRHGDDRQVHLRARIAPGQRDLLDARLLAGAAVPGPHRPRAVLARRRRRVPGPHAPERVREPGRGRHRQGRLGHGPRLGGPEQRLR

SEQ ID NO: 1792 - protein, 291 aa, Zea mays subsp. mays
  peptide (1)..(291): Ceres Seq. ID no. 13494772
  misc_feature (1)..(82): Homolog of NCBI NO: 18415427 NR Description: expressed protein [Arabidopsis thaliana]
  misc_feature (1)..(82): Homolog of NCBI NO: 7485728 NR Description: hypothetical protein F18F4.140 - Arabidopsis
  misc_feature (1)..(79): Homolog of NCBI NO: 18415427 NR Description: expressed protein [Arabidopsis thaliana]
  misc_feature (1)..(79): Homolog of NCBI NO: 7485728 NR Description: hypothetical protein F18F4.140 - Arabidopsis
  misc_feature (1)..(79): Homolog of NCBI NO: 15235269 NR Description: expressed protein [Arabidopsis thaliana]
  misc_feature (1)..(79): Homolog of NCBI NO: 38347355 NR Description: OSJNBa0070C17.16 [Oryza sativa (japonica
  misc_feature (1)..(82): Homolog of NCBI NO: 18415427 NR Description: expressed protein [Arabidopsis thaliana]
  misc_feature (1)..(82): Homolog of NCBI NO: 7485728 NR Description: hypothetical protein F18F4.140 - Arabidopsis
  misc_feature (1)..(79): Homolog of NCBI NO: 18415427 NR Description: expressed protein [Arabidopsis thaliana]
  misc_feature (1)..(79): Homolog of NCBI NO: 7485728 NR Description: hypothetical protein F18F4.140 - Arabidopsis
  misc_feature (1)..(79): Homolog of NCBI NO: 15235269 NR Description: expressed protein [Arabidopsis thaliana]
  misc_feature (1)..(79): Homolog of NCBI NO: 38347355 NR Description: OSJNBa0070C17.16 [Oryza sativa (japonica
MLDCSYRGGGVAVVDSLRVAVDNCYVAHFASDGVAVRGGHETLIRNTYLGQHMTAGGDPGERGFTGTAIRLDGNDNSVSGRRHLLRGHGDHGHRAGQLHLRRALLQQGHGLRRHRHPPQDPGPHAGVDQQLLHGLHQHRRRGPRAAPRLRILLPRRRQRRPQGRQRRRQGRPGRRQHLQRQGQGRRHRAAGRRLRHRGPGVRAAELRHGDDRQVHLRARIAPGQRDLLDARLLAGAAVPGPHRPRAVLARRRRRVPGPHAPERVREPGRGRHRQGRLGHGPRLGGPEQRLR

SEQ ID NO: 1793 - protein, 239 aa, Zea mays subsp. mays
  peptide (1)..(239): Ceres Seq. ID no. 13494773
  misc_feature (1)..(30): Homolog of NCBI NO: 18415427 NR Description: expressed protein [Arabidopsis thaliana]
  misc_feature (1)..(30): Homolog of NCBI NO: 7485728 NR Description: hypothetical protein F18F4.140 - Arabidopsis
  misc_feature (1)..(27): Homolog of NCBI NO: 18415427 NR Description: expressed protein [Arabidopsis thaliana]
  misc_feature (1)..(27): Homolog of NCBI NO: 7485728 NR Description: hypothetical protein F18F4.140 - Arabidopsis
  misc_feature (1)..(27): Homolog of NCBI NO: 15235269 NR Description: expressed protein [Arabidopsis thaliana]
  misc_feature (1)..(27): Homolog of NCBI NO: 38347355 NR Description: OSJNBa0070C17.16 [Oryza sativa (japonica
  misc_feature (1)..(30): Homolog of NCBI NO: 18415427 NR Description: expressed protein [Arabidopsis thaliana]
  misc_feature (1)..(30): Homolog of NCBI NO: 7485728 NR Description: hypothetical protein F18F4.140 - Arabidopsis
  misc_feature (1)..(27): Homolog of NCBI NO: 18415427 NR Description: expressed protein [Arabidopsis thaliana]
  misc_feature (1)..(27): Homolog of NCBI NO: 7485728 NR Description: hypothetical protein F18F4.140 - Arabidopsis
  misc_feature (1)..(27): Homolog of NCBI NO: 15235269 NR Description: expressed protein [Arabidopsis thaliana]
  misc_feature (1)..(27): Homolog of NCBI NO: 38347355 NR Description: OSJNBa0070C17.16 [Oryza sativa (japonica
MTAGGDPGERGFTGTAIRLDGNDNSVSGRRHLLRGHGDHGHRAGQLHLRRALLQQGHGLRRHRHPPQDPGPHAGVDQQLLHGLHQHRRRGPRAAPRLRILLPRRRQRRPQGRQRRRQGRPGRRQHLQRQGQGRRHRAAGRRLRHRGPGVRAAELRHGDDRQVHLRARIAPGQRDLLDARLLAGAAVPGPHRPRAVLARRRRRVPGPHAPERVREPGRGRHRQGRLGHGPRLGGPEQRLR

SEQ ID NO: 1794 - DNA, 1329 bp, Zea mays subsp. mays
  misc_feature (1)..(1329): Ceres Seq. ID no. 12342558
  misc_feature: MA Experiment ID: 108687 Result: Down-regulated in Transcription
  misc_feature: MA Experiment 108687 PARAMETER Experiment Name: Zm_Embryos-Flowers__P Parameter: Tissue Value: Embryo vs. Aerial+
aaaatgtgcagcccacctccaatcccgtagaagatagtgctgccctgccgaatgccgcccacctccaatcccgtagaagacaaagagagagggagagaactggacggcggcggcggcggagacgacgatgcagtggtacttggtggccgcgctcctcaccatcctcaccagctcccagggaatattgaccaccctttcccagagcaatggcaaatacaattatgattatgccacaattccttttttagctgagctcttcaagttatctgtctcaggcttcttcctctggaaggaatgccattcttcatctccaccaaggatgacaaaggaatggaggagcgtgcgactatatgttgttccttcagttatatacctcatccacaacaatgtccagtttgcgacattgacctatgttgacccatctacctatcagataatgggaaacttgaaaattgtcacgactgggattttgtttaggcttgtcctaaaaaggaagttgtccaatatacaatggatggcaattgttttattggctgttggtacaactacaagccaggttaaaggatgtggagattcaccatgtgattctcttttctcagcaccattggagggttacttgcttggaatactttctgcttgtctttcagctctagctggtgtgtacacagaatatttgatgaagaagaataatgatagtttgtactggcaaaatgtacaattatatacgtaggtttggagttatctttaacatgggctggctaatttatggcgattttaaagctggatttgagctaggtccatggtggcagcgcctttttaatggttattcgatcacaacatggatggtagtgttcaatttaggatctactggtcttctagtatcatggttgatgaaatattctgacaatatagtcaaggtgtactcaacttcaatggcaatgcttttaacgatggttttatctatatatcttttcagtgtgaaagctacaattcagctcttcttgggcattatcatttgtataatttccctgcagatgtattttatgcctgtgcacatgcttattgagttgccacaaactttgcctgtaacatcaaagtaggttcatggcattgttagctaacccattgatcagctgagggtagggcactgttgattgagtggttaattgactatctgcagcccagctctatttgagtcatatatttggagatttatggttgtaatctcaacagctatggatatagacagctaggttagtttcatgttgcaggaaaggtgaatcaactgtcaagtgagcatgtaatgccaatacaaatggattgaaagtt

SEQ ID NO: 1795 - protein, 200 aa, Zea mays subsp. mays
  peptide (1)..(200): Ceres Seq. ID no. 12342559
  misc_feature (59)..(200): Pfam Name: Nucleotide-sugar transporter Pfam Description: Nucleotide-sugar transporter
  misc_feature (69)..(198): Homolog of NCBI NO: 22204205 NR Description: SI:bZ30I22.3 (novel protein similar to vertebrate
  misc_feature (2)..(200): Homolog of NCBI NO: 18087849 NR Description: hypothetical protein MGC2541
  misc_feature (12)..(199): Homolog of NCBI NO: 18411150 NR Description: transporter-like protein
  misc_feature (12)..(199): Homolog of NCBI NO: 26450627 NR Description: unknown protein [Arabidopsis thaliana]
  misc_feature (12)..(199): Homolog of NCBI NO: 38345234 NR Description: OSJNBa0084K20.12 [Oryza sativa (japonica
  misc_feature (1)..(200): Homolog of NCBI NO: 17556923 NR Description: Solute carrier family 35 member (39.9 kD)
  misc_feature (4)..(144): Homolog of NCBI NO: 24581845 NR Description: CG14040-PA [Drosophila melanogaster]
  misc_feature (1)..(199): Homolog of NCBI NO: 34393556 NR Description: putative CMP-sialic acid transporter
  misc_feature (17)..(200): Homolog of NCBI NO: 10177360 NR Description: CMP-sialic acid transporter-like protein
  misc_feature (3)..(200): Homolog of NCBI NO: 18422134 NR Description: CMP-sialic acid transporter-like protein
MQWYLVAALLTILTSSQGILTTLSQSNGKYNYDYATIPFLAELFKLSVSGFFLWKECHSSSPPRMTKEWRSVRLYVVPSVIYLIHNNVQFATLTYVDPSTYQIMGNLKIVTTGILFRLVLKRKLSNIQWMAIVLLAVGTTTSQVKGCGDSPCDSLFSAPLEGYLLGILSACLSALAGVYTEYLMKKNNDSLYWQNVQLYT

SEQ ID NO: 1796 - protein, 136 aa, Zea mays subsp. mays
  peptide (1)..(136): Ceres Seq. ID no. 12342560
  misc_feature (15)..(108): Pfam Name: Nucleotide-sugar transporter Pfam Description: Nucleotide-sugar transporter
  misc_feature (52)..(135): Homolog of NCBI NO: 24581845 NR Description: CG14040-PA [Drosophila melanogaster]
  misc_feature (43)..(117): Homolog of NCBI NO: 17556923 NR Description: Solute carrier family 35 member (39.9 kD)
  misc_feature (11)..(121): Homolog of NCBI NO: 38345234 NR Description: OSJNBa0084K20.12 [Oryza sativa (japonica
  misc_feature (35)..(120): Homolog of NCBI NO: 22204205 NR Description: SI:bZ30I22.3 (novel protein similar to vertebrate
  misc_feature (11)..(118): Homolog of NCBI NO: 18087849 NR Description: hypothetical protein MGC2541
  misc_feature (11)..(121): Homolog of NCBI NO: 18411150 NR Description: transporter-like protein
  misc_feature (11)..(121): Homolog of NCBI NO: 26450627 NR Description: unknown protein [Arabidopsis thaliana]
  misc_feature (15)..(117): Homolog of NCBI NO: 34393556 NR Description: putative CMP-sialic acid transporter
  misc_feature (15)..(136): Homolog of NCBI NO: 10177360 NR Description: CMP-sialic acid transporter-like protein
  misc_feature (15)..(136): Homolog of NCBI NO: 18422134 NR Description: CMP-sialic acid transporter-like protein
MIVCTGKMYNYIRRFGVIFNMGWLIYGDFKAGFELGPWWQRLFNGYSITTWMVVFNLGSTGLLVSWLMKYSDNIVKVYSTSMAMLLTMVLSIYLFSVKATIQLFLGIIICIISLQMYFMPVHMLIELPQTLPVTSK

SEQ ID NO: 1797 - protein, 136 aa, Zea mays subsp. mays
  peptide (1)..(136): Ceres Seq. ID no. 12342561
  misc_feature (1)..(136): Pfam Name: Nucleotide-sugar transporter Pfam Description: Nucleotide-sugar transporter
  misc_feature (1)..(80): Homolog of NCBI NO: 24581845 NR Description: CG14040-PA [Drosophila melanogaster]
  misc_feature (1)..(135): Homolog of NCBI NO: 38345234 NR Description: OSJNBa0084K20.12 [Oryza sativa (japonica
  misc_feature (1)..(136): Homolog of NCBI NO: 17556923 NR Description: Solute carrier family 35 member (39.9 kD)
  misc_feature (5)..(134): Homolog of NCBI NO: 22204205 NR Description: SI:bZ30I22.3 (novel protein similar to vertebrate
  misc_feature (1)..(136): Homolog of NCBI NO: 18087849 NR Description: hypothetical protein MGC2541
  misc_feature (1)..(135): Homolog of NCBI NO: 18411150 NR Description: transporter-like protein
  misc_feature (1)..(135): Homolog of NCBI NO: 26450627 NR Description: unknown protein [Arabidopsis thaliana]
  misc_feature (1)..(135): Homolog of NCBI NO: 34393556 NR Description: putative CMP-sialic acid transporter
  misc_feature (1)..(136): Homolog of NCBI NO: 10177360 NR Description: CMP-sialic acid transporter-like protein
  misc_feature (1)..(136): Homolog of NCBI NO: 18422134 NR Description: CMP-sialic acid transporter-like protein
MTKEWRSVRLYVVPSVIYLIHNNVQFATLTYVDPSTYQIMGNLKIVTTGILFRLVLKRKLSNIQWMAIVLLAVGTTTSQVKGCGDSPCDSLFSAPLEGYLLGILSACLSALAGVYTEYLMKKNNDSLYWQNVQLYT

SEQ ID NO: 1798 - DNA, 1614 bp, Zea mays subsp. mays
  misc_feature (1)..(1614): Ceres Seq. ID no. 12410981
  misc_feature: MA Experiment ID: 108527 Result: Down-regulated in Transcription
  misc_feature: MA Experiment 108527 PARAMETER Experiment Name: Zm_5mM_NO_P Parameter: Age (day) Value: 8
  misc_feature: MA Experiment 108527 PARAMETER Experiment Name: Zm_5mM_NO_P Parameter: Organism Value: Zea mays
  misc_feature: MA Experiment 108527 PARAMETER Experiment Name: Zm_5mM_NO_P Parameter: Plant Line Value: 35A19
  misc_feature: MA Experiment 108527 PARAMETER Experiment Name: Zm_5mM_NO_P Parameter: Timepoint (hr) Value: 6
  misc_feature: MA Experiment 108527 PARAMETER Experiment Name: Zm_5mM_NO_P Parameter: Tissue Value: Aerial
  misc_feature: MA Experiment 108527 PARAMETER Experiment Name: Zm_5mM_NO_P Parameter: Treatment Value: 5mM NO vs. No Treatment
  misc_feature: MA Experiment ID: 108528 Result: Up-regulated in Transcription
  misc_feature: MA Experiment 108528 PARAMETER Experiment Name: Zm_Imbibed_Seeds_P Parameter: Age (day) Value: 5 vs. 2
  misc_feature: MA Experiment 108528 PARAMETER Experiment Name: Zm_Imbibed_Seeds_P Parameter: Organism Value: Zea mays
  misc_feature: MA Experiment 108528 PARAMETER Experiment Name: Zm_Imbibed_Seeds_P Parameter: Plant Line Value: 35A19
  misc_feature: MA Experiment 108528 PARAMETER Experiment Name: Zm_Imbibed_Seeds_P Parameter: Tissue Value: Aerial vs. Embryo
  misc_feature: MA Experiment ID: 108530 Result: Up-regulated in Transcription
  misc_feature: MA Experiment 108530 PARAMETER Experiment Name: Zm_Imbibed_Seeds_P Parameter: Age (day) Value: 6 vs. 2
  misc_feature: MA Experiment 108530 PARAMETER Experiment Name: Zm_Imbibed_Seeds_P Parameter: Organism Value: Zea mays
  misc_feature: MA Experiment 108530 PARAMETER Experiment Name: Zm_Imbibed_Seeds_P Parameter: Plant Line Value: 35A19
  misc_feature: MA Experiment 108530 PARAMETER Experiment Name: Zm_Imbibed_Seeds_P Parameter: Tissue Value: Aerial vs. Embryo
  misc_feature: MA Experiment ID: 108543 Result: Down-regulated in Transcription
  misc_feature: MA Experiment ID: 108545 Result: Up-regulated in Transcription
  misc_feature: MA Experiment 108545 PARAMETER Experiment Name: Zm_Imbibed_Seeds_P Parameter: Age (day) Value: 3 vs. 2
  misc_feature: MA Experiment 108545 PARAMETER Experiment Name: Zm_Imbibed_Seeds_P Parameter: Organism Value: Zea mays
  misc_feature: MA Experiment 108545 PARAMETER Experiment Name: Zm_Imbibed_Seeds_P Parameter: Plant Line Value: 35A19
  misc_feature: MA Experiment 108545 PARAMETER Experiment Name: Zm_Imbibed_Seeds_P Parameter: Tissue Value: Aerial vs. Embryo
  misc_feature: MA Experiment ID: 108547 Result: Up-regulated in Transcription
  misc_feature: MA Experiment 108547 PARAMETER Experiment Name: Zm_Imbibed_Seeds_P Parameter: Age (day) Value: 4 vs. 2
  misc_feature: MA Experiment 108547 PARAMETER Experiment Name: Zm_Imbibed_Seeds_P Parameter: Organism Value: Zea mays
  misc_feature: MA Experiment 108547 PARAMETER Experiment Name: Zm_Imbibed_Seeds_P Parameter: Plant Line Value: 35A19
  misc_feature: MA Experiment 108547 PARAMETER Experiment Name: Zm_Imbibed_Seeds_P Parameter: Tissue Value: Aerial vs. Embryo
  misc_feature: MA Experiment ID: 20000626 Result: Down-regulated in Transcription
  misc_feature: MA Experiment 20000626 PARAMETER Experiment Name: Zm_Herbicide-Treatments_P Parameter: Timepoint (hr) Value: 12
  misc_feature: MA Experiment 20000626 PARAMETER Experiment Name: Zm_Herbicide-Treatments_P Parameter: Tissue Value: Aerial
  misc_feature: MA Experiment 20000626 PARAMETER Experiment Name: Zm_Herbicide-Treatments_P Parameter: Treatment Value: Roundup vs. No Treatment
  misc_feature: MA Experiment ID: 20000630 Result: Down-regulated in Transcription
  misc_feature: MA Experiment 20000630 PARAMETER Experiment Name: Zm_Herbicide-Treatments_P Parameter: Timepoint (hr) Value: 4
  misc_feature: MA Experiment 20000630 PARAMETER Experiment Name: Zm_Herbicide-Treatments_P Parameter: Tissue Value: Aerial
  misc_feature: MA Experiment 20000630 PARAMETER Experiment Name: Zm_Herbicide-Treatments_P Parameter: Treatment Value: Roundup vs. No Treatment
aaactgcctcattcattcgagctgtggcgaatcggaggcaatggcgtggccgcgtgggggtcagcaaggcagccgcggcggcagcagcgtccacctcgcgcacggcggcgcttctctgttcccaggcgctgcgaggtgacacaacaggagtctggcgacagccctctggcaagaaggaacggctcgctctcgactccgatgcgtgggagacaagcgctgcgacggtggatccggcgacccacgggcgtgggagacgaagacgagcggttataaacgtccctcaatgacaaggactcgtcatctgctccactgccactgcccttatcatcattcatcagcggcctgcctgcacgagattccgagggacagggagatccatggccgcgtcagaccaaccgccgcagccagagaagcccccgctgccgtggcgcgcgaggctgcttgtgggcgccgcctccgcgctgcacgccgcctcgctccgccgcgacggcaccgtcaaccgcttcctgctctccctcttcgaccgcgccgcgccgcccaccccgacggcccccctcggcggcgtggcatccacggaccacgccgtctccgaccacctgcgcgcccnnntcttcgtcccggagatccccggcggcggcaacgagctcccggtggtcgtgtacttccacggcggcggcttcgtcttccactccgcggcgtcggcgcagtacgacgcgctgtgccgccgcctggcgtcggccatcccggccgtcatcgcctccgtcgactaccgcctcgcgcccgagcaccgcttcccggctccctacgacgacggcgaggcagccctccggtgggccctagccggcgcggcaggcgcgctgccgtatccccccgccgccgtcttcgtggccggggacagcgccggcggcaacgtcgcccaccacgtcgccgcgcgcctccccgacgccgtcgcgggcctcctcgccgtgcagcctttcttcagcggcgaggcgccgacggggtcggagatgcggctccgcgacgccccgttcgggagccccgagcggctggcgtggctgtggcgcgcgttcctgccgcccggcgccacgcgggaccacgaggccgccaacgtgcccgccgcgatcaggcgcgacgcgggcgcgggcgcggaccggtggcgggcgttcccgcccacgctggtgtgcgtcggcgggtgggacgtgcatcaggacaggcagagggcgtacgcggacgcgctccgcgccgtgtgctccgaggaggtcaccgtggcggagtacccggacgccatccacgccttctacgtgttggacgacctcgcggacagcaagaagtttctgggtgacgtcgcggagttcgtgaaccggcatgcacaacagcggaggaaacccgcactaggccatgccaaggactagtgttatccgcttgcaaggatggcaagaaatcataggactggataagcttccttttgtggaaaatggaggcagcgactgatagattaagctggcagtgtttgtcactccctctatcatattgttagttaccagctggtttagattgattgttagatcactctgccatgtattcctttcgtttctatgtattaaatctactttt

SEQ ID NO: 1799 - protein, 352 aa, Zea mays subsp. mays
  peptide (1)..(352): Ceres Seq. ID no. 12410982
  misc_feature (1)..(119): Pfam Name: Cupin Pfam Description: Cupin
  misc_feature (16)..(352): Homolog of NCBI NO: 29247944 NR Description: GLP_26_54603_52153 [Giardia lamblia ATCC 50803]
  misc_feature (34)..(352): Homolog of NCBI NO: 29247944 NR Description: GLP_26_54603_52153 [Giardia lamblia ATCC 50803]
  misc_feature (55)..(352): Homolog of NCBI NO: 23104258 NR Description: hypothetical protein [Azotobacter vinelandii]
  misc_feature (108)..(108): Xaa is any aa, unknown or other
  misc_feature (109)..(109): Xaa is any aa, unknown or other
MTRTRHLLHCHCPYHHSSAACLHEIPRDREIHGRVRPTAAAREAPAAVAREAACGRRLRAARRLAPPRRHRQPLPALPLRPRRAAHPDGPPRRRGIHGPRRLRPPARXXLRPGDPRRRQRAPGGRVLPRRRLRLPLRGVGAVRRAVPPPGVGHPGRHRLRRLPPRARAPLPGSLRRRRGSPPVGPSRRGRRAAVSPRRRLRGRGQRRRQRRPPRRRAPPRRRRGPPRRAAFLQRRGADGVGDAAPRRPVREPRAAGVAVARVPAARRHAGPRGRQRARRDQARRGRGRGPVAGVPAHAGVRRRVGRASGQAEGVRGRAPRRVLRGGHRGGVPGRHPRLLRVGRPRGQQEVSG

SEQ ID NO: 1800 - protein, 344 aa, Zea mays subsp. mays
  peptide (1)..(344): Ceres Seq. ID no. 12410983
  misc_feature (79)..(135): Pfam Name: Carboxylesterase Pfam Description: Carboxylesterase
  misc_feature (3)..(331): Homolog of NCBI NO: 34904770 NR Description: similar to carboxylesterase [Oryza sativa
  misc_feature (1)..(334): Homolog of NCBI NO: 34904760 NR Description: similar to carboxylesterase [Oryza sativa
  misc_feature (1)..(332): Homolog of NCBI NO: 34393714 NR Description: putative esterase [Oryza sativa (japonica
  misc_feature (1)..(332): Homolog of NCBI NO: 34904774 NR Description: similar to carboxylesterase [Oryza sativa
  misc_feature (15)..(327): Homolog of NCBI NO: 34904772 NR Description: similar to carboxylesterase [Oryza sativa
  misc_feature (1)..(328): Homolog of NCBI NO: 15237783 NR Description: putative protein; protein id: At5g23530.1, by cDNA: 9482. [Arabidopsis thaliana] >gi|8809707|dbj|BAA97248.1| similarity to unknown protein~gb|AAF27018.1~gene_id:MQM1.21
  misc_feature (1)..(328): Homolog of NCBI NO: 21618039 NR Description: unknown [Arabidopsis thaliana]
  misc_feature (1)..(332): Homolog of NCBI NO: 15240483 NR Description: putative protein; protein id: At5g27320.1, by cDNA: gi_15451145 [Arabidopsis thaliana] Unknown protein [Arabidopsis thaliana]
  misc_feature (2)..(334): Homolog of NCBI NO: 34904758 NR Description: hypothetical protein~predicted by GeneMark.hmm
  misc_feature (34)..(339): Homolog of NCBI NO: 15229371 NR Description: putative protein; protein id: At3g63010.1
  misc_feature (77)..(77): Xaa is any aa, unknown or other
  misc_feature (78)..(78): Xaa is any aa, unknown or other
MAASDQPPQPEKPPLPWRARLLVGAASALHAASLRRDGTVNRFLLSLFDRAAPPTPTAPLGGVASTDHAVSDHLRAXXFVPEIPGGGNELPVVVYFHGGGFVFHSAASAQYDALCRRLASAIPAVIASVDYRLAPEHRFPAPYDDGEAALRWALAGAAGALPYPPAAVFVAGDSAGGNVAHHVAARLPDAVAGLLAVQPFFSGEAPTGSEMRLRDAPFGSPERLAWLWRAFLPPGATRDHEAANVPAAIRRDAGAGADRWRAFPPTLVCVGGWDVHQDRQRAYADALRAVCSEEVTVAEYPDAIHAFYVLDDLADSKKFLGDVAEFVNRHAQQRRKPALGHAKD

SEQ ID NO: 1801 - DNA, 1315 bp, Zea mays subsp. mays
  misc_feature (1)..(1315): Ceres Seq. ID no. 12351926
  misc_feature: MA Experiment ID: 108535 Result: Up-regulated in Transcription
  misc_feature: MA Experiment 108535 PARAMETER Experiment Name: Zm_Meristem_P Parameter: Age (day) Value: 8
  misc_feature: MA Experiment 108535 PARAMETER Experiment Name: Zm_Meristem_P Parameter: Organism Value: Zea mays
  misc_feature: MA Experiment 108535 PARAMETER Experiment Name: Zm_Meristem_P Parameter: Plant Line Value: 35A19
  misc_feature: MA Experiment 108535 PARAMETER Experiment Name: Zm_Meristem_P Parameter: Tissue Value: Root Meristem vs. Above Root Meristem
  misc_feature: MA Experiment ID: 108544 Result: Down-regulated in Transcription
  misc_feature: MA Experiment ID: 108556 Result: Down-regulated in Transcription
  misc_feature: MA Experiment 108556 PARAMETER Experiment Name: Zm_Drought_P Parameter: Age (day) Value: 9
  misc_feature: MA Experiment 108556 PARAMETER Experiment Name: Zm_Drought_P Parameter: Organism Value: Zea mays
  misc_feature: MA Experiment 108556 PARAMETER Experiment Name: Zm_Drought_P Parameter: Plant Line Value: 35A19
  misc_feature: MA Experiment 108556 PARAMETER Experiment Name: Zm_Drought_P Parameter: Timepoint (hr) Value: 24
  misc_feature: MA Experiment 108556 PARAMETER Experiment Name: Zm_Drought_P Parameter: Tissue Value: Aerial
  misc_feature: MA Experiment 108556 PARAMETER Experiment Name: Zm_Drought_P Parameter: Treatment Value: Drought vs. No Drought
  misc_feature: MA Experiment ID: 20000108 Result: Up-regulated in Transcription
  misc_feature: MA Experiment 20000108 PARAMETER Experiment Name: Zm_Root-Tips_P Parameter: Age (day) Value: 12
  misc_feature: MA Experiment 20000108 PARAMETER Experiment Name: Zm_Root-Tips_P Parameter: Organism Value: Zea mays
  misc_feature: MA Experiment 20000108 PARAMETER Experiment Name: Zm_Root-Tips_P Parameter: Tissue Value: Root tips vs. Root mid region    35
  misc_feature: MA Experiment 20000108 PARAMETER Experiment Name: Zm_Root-Tips_P Parameter: Tissue Value: Root tips vs. Root mid region   Sequence Listing-Misc Features (4)
  misc_feature: MA Experiment ID: 20000477 Result: Down-regulated in Transcription
  misc_feature: MA Experiment 20000477 PARAMETER Experiment Name: Zm_5mM_SA_P Parameter: Age (day) Value: 10
  misc_feature: MA Experiment 20000477 PARAMETER Experiment Name: Zm_5mM_SA_P Parameter: Organism Value: Zea mays
  misc_feature: MA Experiment 20000477 PARAMETER Experiment Name: Zm_5mM_SA_P Parameter: Plant Line Value: 35A19
  misc_feature: MA Experiment 20000477 PARAMETER Experiment Name: Zm_5mM_SA_P Parameter: Timepoint (hr) Value: 48
  misc_feature: MA Experiment 20000477 PARAMETER Experiment Name: Zm_5mM_SA_P Parameter: Tissue Value: Aerial
  misc_feature: MA Experiment 20000477 PARAMETER Experiment Name: Zm_5mM_SA_P Parameter: Treatment Value: 5mM SA vs. No Treatment
  misc_feature: MA Experiment ID: 20000478 Result: Down-regulated in Transcription
  misc_feature: MA Experiment 20000478 PARAMETER Experiment Name: Zm_5mM_SA_P Parameter: Age (day) Value: 11
  misc_feature: MA Experiment 20000478 PARAMETER Experiment Name: Zm_5mM_SA_P Parameter: Organism Value: Zea mays
  misc_feature: MA Experiment 20000478 PARAMETER Experiment Name: Zm_5mM_SA_P Parameter: Plant Line Value: 35A19
  misc_feature: MA Experiment 20000478 PARAMETER Experiment Name: Zm_5mM_SA_P Parameter: Timepoint (hr) Value: 72
  misc_feature: MA Experiment 20000478 PARAMETER Experiment Name: Zm_5mM_SA_P Parameter: Tissue Value: Aerial
  misc_feature: MA Experiment 20000478 PARAMETER Experiment Name: Zm_5mM_SA_P Parameter: Treatment Value: 5mM SA vs. No Treatment
  misc_feature: MA Experiment ID: 20000479 Result: Down-regulated in Transcription
  misc_feature: MA Experiment 20000479 PARAMETER Experiment Name: Zm_Drought_P Parameter: Age (day) Value: 10
  misc_feature: MA Experiment 20000479 PARAMETER Experiment Name: Zm_Drought_P Parameter: Organism Value: Zea mays
  misc_feature: MA Experiment 20000479 PARAMETER Experiment Name: Zm_Drought_P Parameter: Plant Line Value: 35A19
  misc_feature: MA Experiment 20000479 PARAMETER Experiment Name: Zm_Drought_P Parameter: Timepoint (hr) Value: 48
  misc_feature: MA Experiment 20000479 PARAMETER Experiment Name: Zm_Drought_P Parameter: Tissue Value: Aerial
  misc_feature: MA Experiment 20000479 PARAMETER Experiment Name: Zm_Drought_P Parameter: Treatment Value: Drought vs. No Drought
  misc_feature: MA Experiment ID: 20000488 Result: Up-regulated in Transcription
  misc_feature: MA Experiment 20000488 PARAMETER Experiment Name: Zm_50mM_NH4NO3_L_to_H_P Parameter: Organism Value: Zea mays
  misc_feature: MA Experiment 20000488 PARAMETER Experiment Name: Zm_50mM_NH4NO3_L_to_H_P Parameter: Timepoint (hr) Value: 8
  misc_feature: MA Experiment 20000488 PARAMETER Experiment Name: Zm_50mM_NH4NO3_L_to_H_P Parameter: Tissue Value: Leaves
  misc_feature: MA Experiment 20000488 PARAMETER Experiment Name: Zm_50mM_NH4NO3_L_to_H_P Parameter: Treatment Value: 50mM NH4NO3 vs. 100mM Mannitol
  misc_feature: MA Experiment ID: 20000492 Result: Up-regulated in Transcription
  misc_feature: MA Experiment 20000492 PARAMETER Experiment Name: Zm_Hybrid_Seed_Dev_P Parameter: DAP Value: 12
  misc_feature: MA Experiment 20000492 PARAMETER Experiment Name: Zm_Hybrid_Seed_Dev_P Parameter: Organism Value: Zea mays
  misc_feature: MA Experiment 20000492 PARAMETER Experiment Name: Zm_Hybrid_Seed_Dev_P Parameter: Plant Line Value: 35A19
  misc_feature: MA Experiment 20000492 PARAMETER Experiment Name: Zm_Hybrid_Seed_Dev_P Parameter: Tissue Value: Fert Kernel vs. Unfert Floret
  misc_feature: MA Experiment ID: 20000534 Result: Down-regulated in Transcription
  misc_feature: MA Experiment 20000534 PARAMETER Experiment Name: Zm_Hybrid_Pollen_P Parameter: Age (day) Value: 8
  misc_feature: MA Experiment 20000534 PARAMETER Experiment Name: Zm_Hybrid_Pollen_P Parameter: Organism Value: Zea mays
  misc_feature: MA Experiment 20000534 PARAMETER Experiment Name: Zm_Hybrid_Pollen_P Parameter: Plant Line Value: 35A19
  misc_feature: MA Experiment 20000534 PARAMETER Experiment Name: Zm_Hybrid_Pollen_P Parameter: Tissue Value: Pollen vs. Aerial
  misc_feature: MA Experiment ID: 20000632 Result: Down-regulated in Transcription
  misc_feature: MA Experiment 20000632 PARAMETER Experiment Name: Zm_Herbicide-Treatments_P Parameter: Timepoint (hr) Value: 4
  misc_feature: MA Experiment 20000632 PARAMETER Experiment Name: Zm_Herbicide-Treatments_P Parameter: Tissue Value: Aerial
  misc_feature: MA Experiment 20000632 PARAMETER Experiment Name: Zm_Herbicide-Treatments_P Parameter: Treatment Value: Glean vs. No Treatment
  misc_feature: MA Experiment ID: 20001606 Result: Up-regulated in Transcription
  misc_feature: MA Experiment 20001606 PARAMETER Experiment Name: Zm_50ppm_KNO3_L-to-H_P Parameter: Age (day) Value: 19
  misc_feature: MA Experiment 20001606 PARAMETER Experiment Name: Zm_50ppm_KNO3_L-to-H_P Parameter: Organism Value: Zea mays
  misc_feature: MA Experiment 20001606 PARAMETER Experiment Name: Zm_50ppm_KNO3_L-to-H_P Parameter: Plant Line Value: 35A19
  misc_feature: MA Experiment 20001606 PARAMETER Experiment Name: Zm_50ppm_KNO3_L-to-H_P Parameter: Timepoint (hr) Value: 8
  misc_feature: MA Experiment 20001606 PARAMETER Experiment Name: Zm_50ppm_KNO3_L-to-H_P Parameter: Tissue Value: Shoots
  misc_feature: MA Experiment 20001606 PARAMETER Experiment Name: Zm_50ppm_KNO3_L-to-H_P Parameter: Treatment Value: 50ppm KNO3 vs. 50ppm KCl
aggacagaaccctgagccggaacaaaatggcggcgctcataaaccctatataccgccgactcgccgccttcgcctgccgccggatctctgcaccggcggtagagaagcccgtgctgcccctcgtgtatcaccggaacttgcagcaaagacacaattccagtttggtggatgcgagtggaggattcagcgagatgcttgcctctacacggaggtgctatgtatttggaggcaaaggtggtgtggggaaaacaagcatggcgggcgtcgcttgctgtgaagtttgccaaccatggtgaaccaacagctattgtttcgacggaaccatctccgtcactcggtgatttatttgaacaagacatgggtgttggcggcaaaactgtacgcatcactggatttgactctctttttgcagttgaggctggtcagttcaagataaagggagaacctgaagatcttggatcttttatcaacaatttacttggaaagatggggcttggaacacattctgatattatgtctatgattagagagatgctggatggaatgccccctggacttgaagaagcgcttgtactatcaaaggtgataaaatctattgacgtgcaagaggccgatatacttcggcgtttagtgctggatgctccatccactggacatacacttaagcttctgtcagcttctgattggattgaaatgttccttactttgagcattaagggcataaaagtggcttcgtccatgccatcgtttaatatgtatcttgaggacgtgcaattcatctctgccaggctagaggaactaaggcagcaggttcgcagagtgcgtgagattttgtttgatccacaatcaacagaattcatcgtcgtgacaattccaacgatgatggcagttactgagtcatcaaggtttcacgagtcattaaagaaggatggtgcacacacaagaaggctcgtcataaatcaggtgttgccaccgtctgcgtcggactgcagattctgtgctgcaaaacggagggaagaagcacgtgccttccgtgcgatactggaggaccgagaactcggcggcctgaagctgatccaggctccgctccttgatatggaggtgaaaggcgtccctgcactccgattcctcagcgattcagtgtggaagtagcgagaaacactaggtcaaataaaagattaatctctgtcggtctgttcggattctttcatttggttggagctagaatctagttcatgaatttggcctagaatctggcattcgaccacgttctatcactcttctcaagtatagatctgtgtcaaattcagagggc

SEQ ID NO: 1802 - protein, 327 aa, Zea mays subsp. mays
  peptide (1)..(327): Ceres Seq. ID no. 12351927
  misc_feature (26)..(327): Pfam Name: Anion-transporting ATPase Pfam Description: Anion-transporting ATPase
  misc_feature (26)..(326): Homolog of NCBI NO: 20095116 NR Description: Arsenite transporting ATPase [Methanopyrus
  misc_feature (26)..(318): Homolog of NCBI NO: 15614358 NR Description: arsenical pump-driving ATPase [Bacillus
  misc_feature (26)..(322): Homolog of NCBI NO: 31214034 NR Description: ENSANGP00000018739 [Anopheles gambiae]
  misc_feature (26)..(326): Homolog of NCBI NO: 15679508 NR Description: arsenical pump-driving ATPase
  misc_feature (26)..(319): Homolog of NCBI NO: 15669329 NR Description: arsenical pump-driving ATPase (arsA)
  misc_feature (26)..(300): Homolog of NCBI NO: 5824321 NR Description: ATPase [Solanum tuberosum]
  misc_feature (26)..(327): Homolog of NCBI NO: 6056208 NR Description: putative ATPase [Arabidopsis thaliana]
  misc_feature (26)..(327): Homolog of NCBI NO: 30697424 NR Description: ATPase - like protein [Arabidopsis thaliana]
  misc_feature (26)..(327): Homolog of NCBI NO: 9759337 NR Description: arsenite translocating ATPase-like protein
  misc_feature (26)..(327): Homolog of NCBI NO: 30681260 NR Description: ATPase -related [Arabidopsis thaliana]
MRVEDSARCLPLHGGAMYLEAKVVWGKQAWRASLAVKFANHGEPTAIVSTEPSPSLGDLFEQDMGVGGKTVRITGFDSLFAVEAGQFKIKGEPEDLGSFINNLLGKMGLGTHSDIMSMIREMLDGMPPGLEEALVLSKVIKSIDVQEADILRRLVLDAPSTGHTLKLLSASDWIEMFLTLSIKGIKVASSMPSFNMYLEDVQFISARLEELRQQVRRVREILFDPQSTEFIVVTIPTMMAVTESSRFHESLKKDGAHTRRLVINQVLPPSASDCRFCAAKRREEARAFRAILEDRELGGLKLIQAPLLDMEVKGVPALRFLSDSVWK

SEQ ID NO: 1803 - protein, 311 aa, Zea mays subsp. mays
  peptide (1)..(311): Ceres Seq. ID no. 12351928
  misc_feature (10)..(311): Pfam Name: Anion-transporting ATPase Pfam Description: Anion-transporting ATPase
  misc_feature (10)..(310): Homolog of NCBI NO: 20095116 NR Description: Arsenite transporting ATPase [Methanopyrus
  misc_feature (10)..(302): Homolog of NCBI NO: 15614358 NR Description: arsenical pump-driving ATPase [Bacillus
  misc_feature (10)..(306): Homolog of NCBI NO: 31214034 NR Description: ENSANGP00000018739 [Anopheles gambiae]
  misc_feature (10)..(310): Homolog of NCBI NO: 15679508 NR Description: arsenical pump-driving ATPase
  misc_feature (10)..(303): Homolog of NCBI NO: 15669329 NR Description: arsenical pump-driving ATPase (arsA)
  misc_feature (10)..(284): Homolog of NCBI NO: 5824321 NR Description: ATPase [Solanum tuberosum]
  misc_feature (10)..(311): Homolog of NCBI NO: 6056208 NR Description: putative ATPase [Arabidopsis thaliana]
  misc_feature (10)..(311): Homolog of NCBI NO: 30697424 NR Description: ATPase - like protein [Arabidopsis thaliana]
  misc_feature (10)..(311): Homolog of NCBI NO: 9759337 NR Description: arsenite translocating ATPase-like protein
  misc_feature (10)..(311): Homolog of NCBI NO: 30681260 NR Description: ATPase -related [Arabidopsis thaliana]
MYLEAKVVWGKQAWRASLAVKFANHGEPTAIVSTEPSPSLGDLFEQDMGVGGKTVRITGFDSLFAVEAGQFKIKGEPEDLGSFINNLLGKMGLGTHSDIMSMIREMLDGMPPGLEEALVLSKVIKSIDVQEADILRRLVLDAPSTGHTLKLLSASDWIEMFLTLSIKGIKVASSMPSFNMYLEDVQFISARLEELRQQVRRVREILFDPQSTEFIVVTIPTMMAVTESSRFHESLKKDGAHTRRLVINQVLPPSASDCRFCAAKRREEARAFRAILEDRELGGLKLIQAPLLDMEVKGVPALRFLSDSVWK

SEQ ID NO: 1804 - protein, 264 aa, Zea mays subsp. mays
  peptide (1)..(264): Ceres Seq. ID no. 12351929
  misc_feature (1)..(264): Pfam Name: Anion-transporting ATPase Pfam Description: Anion-transporting ATPase
  misc_feature (1)..(263): Homolog of NCBI NO: 20095116 NR Description: Arsenite transporting ATPase [Methanopyrus
  misc_feature (1)..(255): Homolog of NCBI NO: 15614358 NR Description: arsenical pump-driving ATPase [Bacillus
  misc_feature (1)..(259): Homolog of NCBI NO: 31214034 NR Description: ENSANGP00000018739 [Anopheles gambiae]
  misc_feature (1)..(263): Homolog of NCBI NO: 15679508 NR Description: arsenical pump-driving ATPase
  misc_feature (1)..(256): Homolog of NCBI NO: 15669329 NR Description: arsenical pump-driving ATPase (arsA)
  misc_feature (1)..(237): Homolog of NCBI NO: 5824321 NR Description: ATPase [Solanum tuberosum]
  misc_feature (1)..(264): Homolog of NCBI NO: 6056208 NR Description: putative ATPase [Arabidopsis thaliana]
  misc_feature (1)..(264): Homolog of NCBI NO: 30697424 NR Description: ATPase - like protein [Arabidopsis thaliana]
  misc_feature (1)..(264): Homolog of NCBI NO: 9759337 NR Description: arsenite translocating ATPase-like protein
  misc_feature (1)..(264): Homolog of NCBI NO: 30681260 NR Description: ATPase -related [Arabidopsis thaliana]
MGVGGKTVRITGFDSLFAVEAGQFKIKGEPEDLGSFINNLLGKMGLGTHSDIMSMIREMLDGMPPGLEEALVLSKVIKSIDVQEADILRRLVLDAPSTGHTLKLLSASDWIEMFLTLSIKGIKVASSMPSFNMYLEDVQFISARLEELRQQVRRVREILFDPQSTEFIVVTIPTMMAVTESSRFHESLKKDGAHTRRLVINQVLPPSASDCRFCAAKRREEARAFRAILEDRELGGLKLIQAPLLDMEVKGVPALRFLSDSVWK

SEQ ID NO: 1805 - DNA, 1522 bp, Zea mays subsp. mays
  misc_feature (1)..(1522): Ceres Seq. ID no. 12358133
  misc_feature: MA Experiment ID: 108528 Result: Up-regulated in Transcription
  misc_feature: MA Experiment 108528 PARAMETER Experiment Name: Zm_Imbibed_Seeds_P Parameter: Age (day) Value: 5 vs. 2
  misc_feature: MA Experiment 108528 PARAMETER Experiment Name: Zm_Imbibed_Seeds_P Parameter: Organism Value: Zea mays
  misc_feature: MA Experiment 108528 PARAMETER Experiment Name: Zm_Imbibed_Seeds_P Parameter: Plant Line Value: 35A19
  misc_feature: MA Experiment 108528 PARAMETER Experiment Name: Zm_Imbibed_Seeds_P Parameter: Tissue Value: Aerial vs. Embryo
  misc_feature: MA Experiment ID: 108530 Result: Up-regulated in Transcription
  misc_feature: MA Experiment 108530 PARAMETER Experiment Name: Zm_Imbibed_Seeds_P Parameter: Age (day) Value: 6 vs. 2
  misc_feature: MA Experiment 108530 PARAMETER Experiment Name: Zm_Imbibed_Seeds_P Parameter: Organism Value: Zea mays
  misc_feature: MA Experiment 108530 PARAMETER Experiment Name: Zm_Imbibed_Seeds_P Parameter: Plant Line Value: 35A19
  misc_feature: MA Experiment 108530 PARAMETER Experiment Name: Zm_Imbibed_Seeds_P Parameter: Tissue Value: Aerial vs. Embryo
  misc_feature: MA Experiment ID: 108536 Result: Down-regulated in Transcription
  misc_feature: MA Experiment 108536 PARAMETER Experiment Name: Zm_Meristem_P Parameter: Age (day) Value: 8
  misc_feature: MA Experiment 108536 PARAMETER Experiment Name: Zm_Meristem_P Parameter: Organism Value: Zea mays
  misc_feature: MA Experiment 108536 PARAMETER Experiment Name: Zm_Meristem_P Parameter: Plant Line Value: 35A19
  misc_feature: MA Experiment 108536 PARAMETER Experiment Name: Zm_Meristem_P Parameter: Tissue Value: Shoot Meristem vs. Above Shoot Meristem
  misc_feature: MA Experiment ID: 108545 Result: Up-regulated in Transcription
  misc_feature: MA Experiment 108545 PARAMETER Experiment Name: Zm_Imbibed_Seeds_P Parameter: Age (day) Value: 3 vs. 2
  misc_feature: MA Experiment 108545 PARAMETER Experiment Name: Zm_Imbibed_Seeds_P Parameter: Organism Value: Zea mays
  misc_feature: MA Experiment 108545 PARAMETER Experiment Name: Zm_Imbibed_Seeds_P Parameter: Plant Line Value: 35A19
  misc_feature: MA Experiment 108545 PARAMETER Experiment Name: Zm_Imbibed_Seeds_P Parameter: Tissue Value: Aerial vs. Embryo
  misc_feature: MA Experiment ID: 108547 Result: Up-regulated in Transcription
  misc_feature: MA Experiment 108547 PARAMETER Experiment Name: Zm_Imbibed_Seeds_P Parameter: Age (day) Value: 4 vs. 2
  misc_feature: MA Experiment 108547 PARAMETER Experiment Name: Zm_Imbibed_Seeds_P Parameter: Organism Value: Zea mays
  misc_feature: MA Experiment 108547 PARAMETER Experiment Name: Zm_Imbibed_Seeds_P Parameter: Plant Line Value: 35A19
  misc_feature: MA Experiment 108547 PARAMETER Experiment Name: Zm_Imbibed_Seeds_P Parameter: Tissue Value: Aerial vs. Embryo
aatcccgccgtgcttcccgtcttcaccaaatccttcgccacgatggcgcgcctgctcatccccctccccttcgccgccgcctctgcctcatcgctccacctcgccgtctcccgccttcctctcgccgcggtctccgccgcgcgtcgcgagtgtctctttgggggaagggtggtaggaggagtggtgagggcgcccgcgaggctttctaagcgcgggttgtgcgccggcgcagaggctggcgactcggccgtcacggtggaggccatggaatgggtcaagaaggacaggaggcgcctgctccacgtcgtctaccgcgtcggggacctcgacaagacgatcaagttctacacggagtgccctgggcatgaaactgttgaggaagagggacattcccgaggagaggtacaccaatgcctttctggggtacgggcctgaggattcacattttgttgtggagctcacttacaattatggtgtggagagctataacatcgggactggttttggccactttggaattgctgttgaggatgttgcaaaaacagtggaacttattaaagcaaaaggaggaacagtcacaagggagccaggtcctgtcaaaggtgggaaatcagtaattgcctttattgaggatcctgatggttacaagtttgagcttagagaaagagggcctactcccgagcctttgtgccaggtaatgcttcgagtgggagatcttgatcgtgctataaatttctatgagaaggcatttggcatggaacttcttcgcaagcgagacaattctgagtacaaggcggtatttgatggtgtcaacccttcattgagcaccattcagaggcttttcttggatgaggtggagtgctggtgtatggctggtgcgaagcagctcgagagtctcggacttctggctgcatttgctaggtatacgattgcgatgatgggatatggtccagaagacaaaaatgctgtattggagttgacctacaactatggggtgaaggaatatgataagggaaatgcttatgcacagattgctattagtactgatgatgtctacaaaactgcggaagcaattagagtaaatggtggacaaattactcgtgaacctggcccattacctggcatcaccaccaagataactgcatgcacagatccagatggctggaaaacagtgtttgtcgataacatagattttctgaaggagttggaagaatgagctttgctagagatctcaacttggtacatcaagctccatacggttgcaccccgtgagttccatgcatgacctgcaaaatctttgtaaagccacagcctcaaactgaggattgtagataggtcgtccaatctacggcatcatcgcaattgatagttgatagagcattagattttccttgcagatctatatagatgcgcaaccgtttttgtattatgcattttaatgcataagttcaatggaaatgattcatgggtaagaaaatcgtcttctttcaagcggcaatataagggctggtttggtgacttg

SEQ ID NO: 1806 - protein, 283 aa, Zea mays subsp. mays
  peptide (1)..(283): Ceres Seq. ID no. 12358134
  misc_feature (1)..(98): Pfam Name: Glyoxalase/Bleomycin resistance Pfam Description: Glyoxalase/Bleomycin resistance
  misc_feature (1)..(143): Homolog of NCBI NO: 15220397 NR Description: glyoxalase I, putative (lactoylglutathione protein id: At1g67280.1, supported by cDNA: 13346., supported by gi_16930395, supported by cDNA: gi_19310504 [Arabidopsis
  misc_feature (186)..(282): Homolog of NCBI NO: 15220397 NR Description: glyoxalase I, putative (lactoylglutathione protein id: At1g67280.1, supported by cDNA: 13346., supported by gi_16930395, supported by cDNA: gi_19310504 [Arabidopsis
  misc_feature (1)..(143): Homolog of NCBI NO: 21537360 NR Description: glyoxalase I, putative [Arabidopsis thaliana]
  misc_feature (186)..(282): Homolog of NCBI NO: 21537360 NR Description: glyoxalase I, putative [Arabidopsis thaliana]
  misc_feature (1)..(143): Homolog of NCBI NO: 25350143 NR Description: protein F1N21.10 [imported] - Arabidopsis >gi|9828630|gb|AAG00253.1|AC002130_18 F1N21.10 [Arabidopsis
  misc_feature (186)..(282): Homolog of NCBI NO: 25350143 NR Description: protein F1N21.10 [imported] - Arabidopsis >gi|9828630|gb|AAG00253.1|AC002130_18 F1N21.10 [Arabidopsis
  misc_feature (1)..(143): Homolog of NCBI NO: 7619802 NR Description: putative glyoxalase I [Triticum aestivum]
  misc_feature (186)..(282): Homolog of NCBI NO: 7619802 NR Description: putative glyoxalase I [Triticum aestivum]
  misc_feature (1)..(143): Homolog of NCBI NO: 11281993 NR Description: lactoylglutathione lyase (EC 4.4.1.5) [imported]
  misc_feature (186)..(282): Homolog of NCBI NO: 11281993 NR Description: lactoylglutathione lyase (EC 4.4.1.5) [imported]
MKLLRKRDIPEERYTNAFLGYGPEDSHFVVELTYNYGVESYNIGTGFGHFGIAVEDVAKTVELIKAKGGTVTREPGPVKGGKSVIAFIEDPDGYKFELRERGPTPEPLCQVMLRVGDLDRAINFYEKAFGMELLRKRDNSEYKAVFDGVNPSLSTIQRLFLDEVECWCMAGAKQLESLGLLAAFARYTIAMMGYGPEDKNAVLELTYNYGVKEYDKGNAYAQIAISTDDVYKTAEAIRVNGGQITREPGPLPGITTKITACTDPDGWKTVFVDNIDFLKELEE

SEQ ID NO: 1807 - protein, 172 aa, Zea mays subsp. mays
  peptide (1)..(172): Ceres Seq. ID no. 12358135
  misc_feature (75)..(157): Pfam Name: Glyoxalase/Bleomycin resistance Pfam Description: Glyoxalase/Bleomycin resistance
  misc_feature (1)..(32): Homolog of NCBI NO: 15220397 NR Description: glyoxalase I, putative (lactoylglutathione protein id: At1g67280.1, supported by cDNA: 13346., supported by gi_16930395, supported by cDNA: gi_19310504 [Arabidopsis
  misc_feature (75)..(171): Homolog of NCBI NO: 15220397 NR Description: glyoxalase I, putative (lactoylglutathione protein id: At1g67280.1, supported by cDNA: 13346., supported by gi_16930395, supported by cDNA: gi_19310504 [Arabidopsis
  misc_feature (1)..(32): Homolog of NCBI NO: 21537360 NR Description: glyoxalase I, putative [Arabidopsis thaliana]
  misc_feature (75)..(171): Homolog of NCBI NO: 21537360 NR Description: glyoxalase I, putative [Arabidopsis thaliana]
  misc_feature (1)..(32): Homolog of NCBI NO: 25350143 NR Description: protein F1N21.10 [imported] - Arabidopsis >gi|9828630|gb|AAG00253.1|AC002130_18 F1N21.10 [Arabidopsis
  misc_feature (75)..(171): Homolog of NCBI NO: 25350143 NR Description: protein F1N21.10 [imported] - Arabidopsis >gi|9828630|gb|AAG00253.1|AC002130_18 F1N21.10 [Arabidopsis
  misc_feature (1)..(32): Homolog of NCBI NO: 7619802 NR Description: putative glyoxalase I [Triticum aestivum]
  misc_feature (75)..(171): Homolog of NCBI NO: 7619802 NR Description: putative glyoxalase I [Triticum aestivum]
  misc_feature (1)..(32): Homolog of NCBI NO: 11281993 NR Description: lactoylglutathione lyase (EC 4.4.1.5) [imported]
  misc_feature (75)..(171): Homolog of NCBI NO: 11281993 NR Description: lactoylglutathione lyase (EC 4.4.1.5) [imported]
MLRVGDLDRAINFYEKAFGMELLRKRDNSEYKAVFDGVNPSLSTIQRLFLDEVECWCMAGAKQLESLGLLAAFARYTIAMMGYGPEDKNAVLELTYNYGVKEYDKGNAYAQIAISTDDVYKTAEAIRVNGGQITREPGPLPGITTKITACTDPDGWKTVFVDNIDFLKELEE

SEQ ID NO: 1808 - protein, 153 aa, Zea mays subsp. mays
  peptide (1)..(153): Ceres Seq. ID no. 12358136
  misc_feature (56)..(138): Pfam Name: Glyoxalase/Bleomycin resistance Pfam Description: Glyoxalase/Bleomycin resistance
  misc_feature (1)..(13): Homolog of NCBI NO: 15220397 NR Description: glyoxalase I, putative (lactoylglutathione protein id: At1g67280.1, supported by cDNA: 13346., supported by gi_16930395, supported by cDNA: gi_19310504 [Arabidopsis
  misc_feature (56)..(152): Homolog of NCBI NO: 15220397 NR Description: glyoxalase I, putative (lactoylglutathione protein id: At1g67280.1, supported by cDNA: 13346., supported by gi_16930395, supported by cDNA: gi_19310504 [Arabidopsis
  misc_feature (1)..(13): Homolog of NCBI NO: 21537360 NR Description: glyoxalase I, putative [Arabidopsis thaliana]
  misc_feature (56)..(152): Homolog of NCBI NO: 21537360 NR Description: glyoxalase I, putative [Arabidopsis thaliana]
  misc_feature (1)..(13): Homolog of NCBI NO: 25350143 NR Description: protein F1N21.10 [imported] - Arabidopsis >gi|9828630|gb|AAG00253.1|AC002130_18 F1N21.10 [Arabidopsis
  misc_feature (56)..(152): Homolog of NCBI NO: 25350143 NR Description: protein F1N21.10 [imported] - Arabidopsis >gi|9828630|gb|AAG00253.1|AC002130_18 F1N21.10 [Arabidopsis
  misc_feature (1)..(13): Homolog of NCBI NO: 7619802 NR Description: putative glyoxalase I [Triticum aestivum]
  misc_feature (56)..(152): Homolog of NCBI NO: 7619802 NR Description: putative glyoxalase I [Triticum aestivum]
  misc_feature (1)..(13): Homolog of NCBI NO: 11281993 NR Description: lactoylglutathione lyase (EC 4.4.1.5) [imported]
  misc_feature (56)..(152): Homolog of NCBI NO: 11281993 NR Description: lactoylglutathione lyase (EC 4.4.1.5) [imported]
MELLRKRDNSEYKAVFDGVNPSLSTIQRLFLDEVECWCMAGAKQLESLGLLAAFARYTIAMMGYGPEDKNAVLELTYNYGVKEYDKGNAYAQIAISTDDVYKTAEAIRVNGGQITREPGPLPGITTKITACTDPDGWKTVFVDNIDFLKELEE

SEQ ID NO: 1809 - DNA, 688 bp, Zea mays subsp. mays
  misc_feature (1)..(688): Ceres Seq. ID no. 12342668
  misc_feature: MA Experiment ID: 108535 Result: Down-regulated in Transcription
  misc_feature: MA Experiment 108535 PARAMETER Experiment Name: Zm_Meristem_P Parameter: Age (day) Value: 8
  misc_feature: MA Experiment 108535 PARAMETER Experiment Name: Zm_Meristem_P Parameter: Organism Value: Zea mays
  misc_feature: MA Experiment 108535 PARAMETER Experiment Name: Zm_Meristem_P Parameter: Plant Line Value: 35A19
  misc_feature: MA Experiment 108535 PARAMETER Experiment Name: Zm_Meristem_P Parameter: Tissue Value: Root Meristem vs. Above Root Meristem
atgtcggtacagccgagaaccgggaccggtgattttcccctcccccttgtcttgctgcttccaattgacccgtcaattgctcaggcgatagtggctgcagtgcatttctgggatggggctgctcttccttgagcggctcgagggggagggcgtgttcaggtgccggcgctgccgcgtggacgccgcctccaaggacgccatcatctccagggacttctacggccgcagcggccgcgcctacctcttcgaccacgttgtgaacatatgcctaggccctaatgaggatcggtatcttgtaaccgggctccatactgtgaatgacatctactgtagctgctgccaacagattcttggctggagatatgagaaagcctacgagcaaagccagaaatacaaggaagggaagtacatcctcgagagagctagaatggtgaaggatgggtgacgatcatttggatgctcttacttctaacaccccagaagcgcaatcttcttgaactctggaaagattcagaactatccctcaatttgcatgcctcagaacatttgacacctaattggcatcccagttagctaggaagatcactggttgcagattctttgatttgtagaatattactgactctgaatacccttagcttgttagtaatggtaacatttggtgaaatattgatgattaggtgaattg

SEQ ID NO: 1810 - protein, 110 aa, Zea mays subsp. mays
  peptide (1)..(110): Ceres Seq. ID no. 12342669
  misc_feature (1)..(109): Pfam Name: Yippee putative zinc-binding protein Pfam Description: Yippee putative zinc-binding protein
  misc_feature (15)..(109): Homolog of NCBI NO: 40255199 NR Description: hypothetical protein MGC10500 [Homo sapiens]
  misc_feature (15)..(109): Homolog of NCBI NO: 20840809 NR Description: similar to hypothetical protein FLJ30213
  misc_feature (15)..(109): Homolog of NCBI NO: 17865319 NR Description: yippee-like 1
  misc_feature (15)..(109): Homolog of NCBI NO: 9558721 NR Description: yippee-like 1 [Homo sapiens]
  misc_feature (15)..(109): Homolog of NCBI NO: 18858031 NR Description: CG15309-PA [Drosophila melanogaster]
  misc_feature (11)..(109): Homolog of NCBI NO: 15234265 NR Description: putative protein; protein id: At4g27740.1
  misc_feature (15)..(109): Homolog of NCBI NO: 31201993 NR Description: ENSANGP00000019801 [Anopheles gambiae]
  misc_feature (1)..(109): Homolog of NCBI NO: 15238881 NR Description: zinc-binding protein-like
  misc_feature (1)..(110): Homolog of NCBI NO: 34393694 NR Description: Yippee-like protein [Oryza sativa (japonica
  misc_feature (1)..(109): Homolog of NCBI NO: 37533560 NR Description: hypothetical protein [Oryza sativa (japonica
MGLLFLERLEGEGVFRCRRCRVDAASKDAIISRDFYGRSGRAYLFDHVVNICLGPNEDRYLVTGLHTVNDIYCSCCQQILGWRYEKAYEQSQKYKEGKYILERARMVKDG

SEQ ID NO: 1811 - DNA, 1183 bp, Zea mays subsp. mays
  misc_feature (1)..(1183): Ceres Seq. ID no. 13499096
  misc_feature: MA Experiment ID: 20000480 Result: Up-regulated in Transcription
  misc_feature: MA Experiment 20000480 PARAMETER Experiment Name: Zm_Drought_P Parameter: Age (day) Value: 11
  misc_feature: MA Experiment 20000480 PARAMETER Experiment Name: Zm_Drought_P Parameter: Organism Value: Zea mays
  misc_feature: MA Experiment 20000480 PARAMETER Experiment Name: Zm_Drought_P Parameter: Plant Line Value: 35A19
  misc_feature: MA Experiment 20000480 PARAMETER Experiment Name: Zm_Drought_P Parameter: Timepoint (hr) Value: 72
  misc_feature: MA Experiment 20000480 PARAMETER Experiment Name: Zm_Drought_P Parameter: Tissue Value: Aerial
  misc_feature: MA Experiment 20000480 PARAMETER Experiment Name: Zm_Drought_P Parameter: Treatment Value: Drought vs. No Drought
  misc_feature: MA Experiment ID: 20000534 Result: Down-regulated in Transcription
  misc_feature: MA Experiment 20000534 PARAMETER Experiment Name: Zm_Hybrid_Pollen_P Parameter: Age (day) Value: 8
  misc_feature: MA Experiment 20000534 PARAMETER Experiment Name: Zm_Hybrid_Pollen_P Parameter: Organism Value: Zea mays
  misc_feature: MA Experiment 20000534 PARAMETER Experiment Name: Zm_Hybrid_Pollen_P Parameter: Plant Line Value: 35A19
  misc_feature: MA Experiment 20000534 PARAMETER Experiment Name: Zm_Hybrid_Pollen_P Parameter: Tissue Value: Pollen vs. Aerial
atcctccaacgactcacctcccacccactcacccaccccatggcgaccaacccctccaacggcgccggcgccgacgtccctgcagccccggcggcggtgcggctctcggttgcggcgcaggcggccgcgatccagccctcgtccccgcgcttcttcttctcctcgcttgccgggaccaacccggcctccccgcaccgtcgcatcgccatcgccgttgatctctccgacgagtccgccttcgcagtcaagtgggccgtgcagaactacgtccgccccggggacgccgtcgtgctgctccacgtgcgccccacctccgtcctctacggcgccgactggggttccatcccggtctccgtcgctgacgaggacgacgctgccgaggacgccgccgccgccgccgagggcgatccctcggaggaggagctgcagaagaaacgggaggaggactacgacgccttcacctccaccaaggcgcaggacctcgcgcaaccgctggtcgacgcccagatccccttcaagatccacgtcgtcaaggaccacgacatgaaggagcgcctctgcctcgaggctgagcgccttggcctctccgccatgatcatggggagccgcggtttcggggcctcccggaaaggcagcaaggggcggcttgggagtgttagtgattactgcgtacaccactgtgtatgccctgttgtggttgttcgctaccctgatgatgctgcagatgccggtggagatgcatcaggggtgacagatgagttgcacactgtaccagaggacgaacctgtttatcacgatgcacctgaggtgcagaaagaaaactgaggcaacggccacatgcagctgaagaacgaaggaaaacacgaggcttatagtgaggcaatcctgtgtatctggaagatgggaccggatgtttatctttgcttctatatatcaactgcgtatcatgatcagctgtctgcttcccgttgagtttcatatcggcgtcgtagatcatctgagttttttgttggtttgcttgtgagatgtagagtactcttcccgtgggtcgaaggtgtcttgcagatgcttgagctttatgttgtcgaacggtagttatctacacggtatcatctgctctgttaagcctgtttagtgtttactgtattggatactcgttaatagagaaccgctacttttcagt

SEQ ID NO: 1812 - protein, 274 aa, Zea mays subsp. mays
  peptide (1)..(274): Ceres Seq. ID no. 13499097
  misc_feature (64)..(235): Pfam Name: Universal stress protein family Pfam Description: Universal stress protein family
  misc_feature (156)..(261): Homolog of NCBI NO: 15232490 NR Description: CHP-rich zinc finger protein, putative
  misc_feature (54)..(239): Homolog of NCBI NO: 18423628 NR Description: expressed protein [Arabidopsis thaliana]
  misc_feature (54)..(239): Homolog of NCBI NO: 8885586 NR Description: gene_id:F24B18.5~pir||T05756~similar to unknown
  misc_feature (46)..(239): Homolog of NCBI NO: 18416966 NR Description: expressed protein [Arabidopsis thaliana]
  misc_feature (46)..(239): Homolog of NCBI NO: 7486798 NR Description: hypothetical protein M4I22.130 - Arabidopsis
  misc_feature (59)..(271): Homolog of NCBI NO: 30682187 NR Description: expressed protein [Arabidopsis thaliana]
  misc_feature (59)..(271): Homolog of NCBI NO: 25402657 NR Description: protein T23J18.3 [imported] - Arabidopsis
  misc_feature (2)..(273): Homolog of NCBI NO: 33146953 NR Description: CHP-rich zinc finger protein-like
  misc_feature (2)..(274): Homolog of NCBI NO: 28971968 NR Description: OSJNBb0041B22.10 [Oryza sativa (japonica
  misc_feature (14)..(272): Homolog of NCBI NO: 34910112 NR Description: B1100D10.31 [Oryza sativa (japonica
ILQRLTSHPLTHPMATNPSNGAGADVPAAPAAVRLSVAAQAAAIQPSSPRFFFSSLAGTNPASPHRRIAIAVDLSDESAFAVKWAVQNYVRPGDAVVLLHVRPTSVLYGADWGSIPVSVADEDDAAEDAAAAAEGDPSEEELQKKREEDYDAFTSTKAQDLAQPLVDAQIPFKIHVVKDHDMKERLCLEAERLGLSAMIMGSRGFGASRKGSKGRLGSVSDYCVHHCVCPVVVVRYPDDAADAGGDASGVTDELHTVPEDEPVYHDAPEVQKEN

SEQ ID NO: 1813 - protein, 261 aa, Zea mays subsp. mays
  peptide (1)..(261): Ceres Seq. ID no. 13499098
  misc_feature (51)..(222): Pfam Name: Universal stress protein family Pfam Description: Universal stress protein family
  misc_feature (143)..(248): Homolog of NCBI NO: 15232490 NR Description: CHP-rich zinc finger protein, putative
  misc_feature (41)..(226): Homolog of NCBI NO: 18423628 NR Description: expressed protein [Arabidopsis thaliana]
  misc_feature (41)..(226): Homolog of NCBI NO: 8885586 NR Description: gene_id:F24B18.5~pir||T05756~similar to unknown
  misc_feature (33)..(226): Homolog of NCBI NO: 18416966 NR Description: expressed protein [Arabidopsis thaliana]
  misc_feature (33)..(226): Homolog of NCBI NO: 7486798 NR Description: hypothetical protein M4I22.130 - Arabidopsis
  misc_feature (46)..(258): Homolog of NCBI NO: 30682187 NR Description: expressed protein [Arabidopsis thaliana]
  misc_feature (46)..(258): Homolog of NCBI NO: 25402657 NR Description: protein T23J18.3 [imported] - Arabidopsis
  misc_feature (1)..(260): Homolog of NCBI NO: 33146953 NR Description: CHP-rich zinc finger protein-like
  misc_feature (1)..(261): Homolog of NCBI NO: 28971968 NR Description: OSJNBb0041B22.10 [Oryza sativa (japonica
  misc_feature (1)..(259): Homolog of NCBI NO: 34910112 NR Description: B1100D10.31 [Oryza sativa (japonica
MATNPSNGAGADVPAAPAAVRLSVAAQAAAIQPSSPRFFFSSLAGTNPASPHRRIAIAVDLSDESAFAVKWAVQNYVRPGDAVVLLHVRPTSVLYGADWGSIPVSVADEDDAAEDAAAAAEGDPSEEELQKKREEDYDAFTSTKAQDLAQPLVDAQIPFKIHVVKDHDMKERLCLEAERLGLSAMIMGSRGFGASRKGSKGRLGSVSDYCVHHCVCPVVVVRYPDDAADAGGDASGVTDELHTVPEDEPVYHDAPEVQKEN

SEQ ID NO: 1814 - protein, 181 aa, Zea mays subsp. mays
  peptide (1)..(181): Ceres Seq. ID no. 13499099
  misc_feature (2)..(181): Pfam Name: Formin Homology 2 Domain Pfam Description: Formin Homology 2 Domain
  misc_feature (6)..(181): Homolog of NCBI NO: 186396 NR Description: mucin
  misc_feature (1)..(176): Homolog of NCBI NO: 81286 NR Description: extensin - Volvox carteri (fragment)
  misc_feature (6)..(181): Homolog of NCBI NO: 23017082 NR Description: hypothetical protein [Thermobifida fusca]
  misc_feature (6)..(181): Homolog of NCBI NO: 186396 NR Description: mucin
  misc_feature (6)..(181): Homolog of NCBI NO: 188864 NR Description: mucin
  misc_feature (5)..(181): Homolog of NCBI NO: 228937 NR Description: Hyp-rich glycoprotein
  misc_feature (6)..(181): Homolog of NCBI NO: 15230108 NR Description: protein kinase -related [Arabidopsis thaliana]
  misc_feature (1)..(181): Homolog of NCBI NO: 188864 NR Description: mucin
  misc_feature (6)..(172): Homolog of NCBI NO: 9630030 NR Description: unknown [Orgyia pseudotsugata multicapsid
  misc_feature (6)..(181): Homolog of NCBI NO: 188864 NR Description: mucin
SSNDSPPTHSPTPWRPTPPTAPAPTSLQPRRRCGSRLRRRRPRSSPRPRASSSPRLPGPTRPPRTVASPSPLISPTSPPSQSSGPCRTTSAPGTPSCCSTCAPPPSSTAPTGVPSRSPSLTRTTLPRTPPPPPRAIPRRRSCRRNGRRTTTPSPPPRRRTSRNRWSTPRSPSRSTSSRTTT

SEQ ID NO: 1815 - DNA, 659 bp, Zea mays subsp. mays
  misc_feature (1)..(659): Ceres Seq. ID no. 12345880
  misc_feature: MA Experiment ID: 108543 Result: Down-regulated in Transcription
gtcaaagaggggagaggagcagatgaaggcggggaggaagaacctgcggcgggcgtgcgacgaaggcgccgccgtcacgctcgccgagggcgagagcatcatgcaggtcctcacgctgcgtggctccaacgtcatcgaggtgattgacggcgagggcatcaagtccctggccttgttccctgccaagttccagaagagcttctggatcaagaacgcggaagggatcaagctctggaatcagggagcaagattgcgtgtgttgtctcgcaagtcctctaccacgaacaagttcgggctctggagaagtccggtaattggccagctattttcaactcaactccgaatgaagcttcagaagcgggaacacaagcgcaaattgctgccaagattgacgagttgccagattctgatgaagacgacaatcttccaccagttgaagcaaacaccaacaggaatagaccatatgaactgtattatgactcagacagtggcggttctgattcttaaactagtttagttgccattcatgttgtaatgcgcgcctgctgtgctttcttgttcattcacgttgatggtttttttttctttgaagataaagattgtctgcgctgccaaagatatatttgtgatatgaatggaatggctggacctggagctat

SEQ ID NO: 1816 - protein, 171 aa, Zea mays subsp. mays
  peptide (1)..(171): Ceres Seq. ID no. 12345881
  misc_feature (22)..(73): Homolog of NCBI NO: 34861445 NR Description: similar to 2010003J03Rik protein [Rattus
  misc_feature (22)..(73): Homolog of NCBI NO: 12842024 NR Description: unnamed protein product [Mus musculus]
  misc_feature (22)..(73): Homolog of NCBI NO: 20884771 NR Description: RIKEN cDNA 2010003J03 [Mus musculus]
  misc_feature (22)..(73): Homolog of NCBI NO: 13477313 NR Description: MGC11102 protein [Homo sapiens]
  misc_feature (22)..(73): Homolog of NCBI NO: 31377656 NR Description: hypothetical protein MGC11102 [Homo sapiens]
  misc_feature (25)..(73): Homolog of NCBI NO: 32766657 NR Description: Unknown (protein for MGC:63631) [Danio rerio]
  misc_feature (8)..(81): Homolog of NCBI NO: 15226743 NR Description: putative translation initiation factor; protein
  misc_feature (8)..(71): Homolog of NCBI NO: 34902168 NR Description: Hypothetical protein [Oryza sativa (japonica
SKRGEEQMKAGRKNLRRACDEGAAVTLAEGESIMQVLTLRGSNVIEVIDGEGIKSLALFPAKFQKSFWIKNAEGIKLWNQGARLRVLSRKSSTTNKFGLWRSPVIGQLFSTQLRMKLQKREHKRKLLPRLTSCQILMKTTIFHQLKQTPTGIDHMNCIMTQTVAVLILKLV

SEQ ID NO: 1817 - protein, 164 aa, Zea mays subsp. mays
  peptide (1)..(164): Ceres Seq. ID no. 12345882
  misc_feature (15)..(66): Homolog of NCBI NO: 34861445 NR Description: similar to 2010003J03Rik protein [Rattus
  misc_feature (15)..(66): Homolog of NCBI NO: 12842024 NR Description: unnamed protein product [Mus musculus]
  misc_feature (15)..(66): Homolog of NCBI NO: 20884771 NR Description: RIKEN cDNA 2010003J03 [Mus musculus]
  misc_feature (15)..(66): Homolog of NCBI NO: 13477313 NR Description: MGC11102 protein [Homo sapiens]
  misc_feature (15)..(66): Homolog of NCBI NO: 31377656 NR Description: hypothetical protein MGC11102 [Homo sapiens]
  misc_feature (18)..(66): Homolog of NCBI NO: 32766657 NR Description: Unknown (protein for MGC:63631) [Danio rerio]
  misc_feature (1)..(74): Homolog of NCBI NO: 15226743 NR Description: putative translation initiation factor; protein
  misc_feature (1)..(64): Homolog of NCBI NO: 34902168 NR Description: Hypothetical protein [Oryza sativa (japonica
MKAGRKNLRRACDEGAAVTLAEGESIMQVLTLRGSNVIEVIDGEGIKSLALFPAKFQKSFWIKNAEGIKLWNQGARLRVLSRKSSTTNKFGLWRSPVIGQLFSTQLRMKLQKREHKRKLLPRLTSCQILMKTTIFHQLKQTPTGIDHMNCIMTQTVAVLILKLV

SEQ ID NO: 1818 - protein, 138 aa, Zea mays subsp. mays
  peptide (1)..(138): Ceres Seq. ID no. 12345883
  misc_feature (1)..(40): Homolog of NCBI NO: 34861445 NR Description: similar to 2010003J03Rik protein [Rattus
  misc_feature (1)..(40): Homolog of NCBI NO: 12842024 NR Description: unnamed protein product [Mus musculus]
  misc_feature (1)..(40): Homolog of NCBI NO: 20884771 NR Description: RIKEN cDNA 2010003J03 [Mus musculus]
  misc_feature (1)..(40): Homolog of NCBI NO: 13477313 NR Description: MGC11102 protein [Homo sapiens]
  misc_feature (1)..(40): Homolog of NCBI NO: 31377656 NR Description: hypothetical protein MGC11102 [Homo sapiens]
  misc_feature (1)..(40): Homolog of NCBI NO: 32766657 NR Description: Unknown (protein for MGC:63631) [Danio rerio]
  misc_feature (1)..(48): Homolog of NCBI NO: 15226743 NR Description: putative translation initiation factor; protein
  misc_feature (1)..(38): Homolog of NCBI NO: 34902168 NR Description: Hypothetical protein [Oryza sativa (japonica
MQVLTLRGSNVIEVIDGEGIKSLALFPAKFQKSFWIKNAEGIKLWNQGARLRVLSRKSSTTNKFGLWRSPVIGQLFSTQLRMKLQKREHKRKLLPRLTSCQILMKTTIFHQLKQTPTGIDHMNCIMTQTVAVLILKLV

SEQ ID NO: 1819 - DNA, 1374 bp, Zea mays subsp. mays
  misc_feature (1)..(1374): Ceres Seq. ID no. 12351930
  misc_feature: MA Experiment ID: 108522 Result: Up-regulated in Transcription
  misc_feature: MA Experiment 108522 PARAMETER Experiment Name: Zm_42deg_Heat_P Parameter: Age (day) Value: 8
  misc_feature: MA Experiment 108522 PARAMETER Experiment Name: Zm_42deg_Heat_P Parameter: Organism Value: Zea mays
  misc_feature: MA Experiment 108522 PARAMETER Experiment Name: Zm_42deg_Heat_P Parameter: Plant Line Value: 35A19
  misc_feature: MA Experiment 108522 PARAMETER Experiment Name: Zm_42deg_Heat_P Parameter: Temperature (deg C) Value: 42 vs. 22
  misc_feature: MA Experiment 108522 PARAMETER Experiment Name: Zm_42deg_Heat_P Parameter: Timepoint (hr) Value: 1
  misc_feature: MA Experiment 108522 PARAMETER Experiment Name: Zm_42deg_Heat_P Parameter: Tissue Value: Aerial
  misc_feature: MA Experiment ID: 108523 Result: Up-regulated in Transcription
  misc_feature: MA Experiment 108523 PARAMETER Experiment Name: Zm_42deg_Heat_P Parameter: Age (day) Value: 8
  misc_feature: MA Experiment 108523 PARAMETER Experiment Name: Zm_42deg_Heat_P Parameter: Organism Value: Zea mays
  misc_feature: MA Experiment 108523 PARAMETER Experiment Name: Zm_42deg_Heat_P Parameter: Plant Line Value: 35A19
  misc_feature: MA Experiment 108523 PARAMETER Experiment Name: Zm_42deg_Heat_P Parameter: Temperature (deg C) Value: 42 vs. 22
  misc_feature: MA Experiment 108523 PARAMETER Experiment Name: Zm_42deg_Heat_P Parameter: Timepoint (hr) Value: 6
  misc_feature: MA Experiment 108523 PARAMETER Experiment Name: Zm_42deg_Heat_P Parameter: Tissue Value: Aerial
  misc_feature: MA Experiment ID: 108543 Result: Down-regulated in Transcription
  misc_feature: MA Experiment ID: 108544 Result: Down-regulated in Transcription
  misc_feature: MA Experiment ID: 20000492 Result: Up-regulated in Transcription
  misc_feature: MA Experiment 20000492 PARAMETER Experiment Name: Zm_Hybrid_Seed_Dev_P Parameter: DAP Value: 12
  misc_feature: MA Experiment 20000492 PARAMETER Experiment Name: Zm_Hybrid_Seed_Dev_P Parameter: Organism Value: Zea mays
  misc_feature: MA Experiment 20000492 PARAMETER Experiment Name: Zm_Hybrid_Seed_Dev_P Parameter: Plant Line Value: 35A19
  misc_feature: MA Experiment 20000492 PARAMETER Experiment Name: Zm_Hybrid_Seed_Dev_P Parameter: Tissue Value: Fert Kernel vs. Unfert Floret
  misc_feature: MA Experiment ID: 20000535 Result: Up-regulated in Transcription
  misc_feature: MA Experiment 20000535 PARAMETER Experiment Name: Zm_Hybrid_Seed_Dev_P Parameter: DAP Value: 30 vs. 12
  misc_feature: MA Experiment 20000535 PARAMETER Experiment Name: Zm_Hybrid_Seed_Dev_P Parameter: Organism Value: Zea mays
  misc_feature: MA Experiment 20000535 PARAMETER Experiment Name: Zm_Hybrid_Seed_Dev_P Parameter: Plant Line Value: 35A19
  misc_feature: MA Experiment 20000535 PARAMETER Experiment Name: Zm_Hybrid_Seed_Dev_P Parameter: Tissue Value: Embryo vs. Unfert Floret
agcatctccaacaaacaccagacgtcgtatagcggcagtccagtccacctcctccgaagccgacggtcgccgccggccatcgccgcggaggatatggcgtccctccgtgtggtgtcggtgctagtgttggtggcaatggcggcgagcgcgggcggcgtcgcggcgcggcctctggtaggggtaggcggggcgtgggagaacagggcgccgctgcagacgtcgcgccccttcaacatcgcgcaccggggctccaacggggagctccccgaggagacggcggcggcctacgcggcgcgccatcgacgagggcgcggacttcatcgaggcggacatcgaggccaccaaggacggccacctcgtctgcttccacgacaccacgctcgacggtaccaccgacgtcgcccaccacccggagttcgccggccgccggcgcaccctcgaggtgcagtgggccaacgtcaccggatacttcgtcactgatttcacgctggcggagctcaagacgctgcgggcgaagcagcgatgggacttccgtgacaagtcccacaacggcgtctcgccgatcatcacgttcgacgagttcatcgacgtcgcgctgaacgccaagaggggtcgggatctacccggagatgaagaaccctgtgttcatgaacaagcacgtgcagtgggctgacgggaagaagtacgaggacaagttcatcgcgacgctgaagaagtacggctacggcggcaagtacatgtcgccggcgtggcgcgccaggccggtcttcgtccagtctttcgcgccgacgtcgctggtccgcgcggccggcctcacggactcgccgctcgtcttcctcgtcgacgacgtgaccgtgcggaccgaggacaccaaccagccgtacgacgatatcacctccggcgagcacctggactacatgaacaggtacgtggtgggcatcgggccctggaaggacacggtggtgccgccgaccaaggacaaccggctggccacgccgtcggacctcgtcgcaatggcgcacgcgaggggactgcaggtgcacccctacacgtaccgcaacgagaacaagttcctgcacttcgacttccggcaggacccctacgccgagtacgactactggatcaacgacgtcggcatcgatggcctcttcaccgacttcccggcgagcctccgccggttccaggagtggaccgccaagaacaaagactgattgtgattggcaactcggtcttggtagctagcttctttgattcagtcattcagatcgtagctctggagatgttttcagggtagagacaattctttggtgttccttgttttaaatagccatatattttcttgattggatcagtaacagttaacagttcttacct

SEQ ID NO: 1820 - protein, 193 aa, Zea mays subsp. mays
  peptide (1)..(193): Ceres Seq. ID no. 12351931
  misc_feature (1)..(186): Homolog of NCBI NO: 15595544 NR Description: glycerophosphoryl diester phosphodiesterase,
  misc_feature (16)..(176): Homolog of NCBI NO: 23019457 NR Description: hypothetical protein [Thermobifida fusca]
  misc_feature (1)..(176): Homolog of NCBI NO: 29833326 NR Description: putative glycerophosphoryl diester
  misc_feature (1)..(178): Homolog of NCBI NO: 23126501 NR Description: hypothetical protein [Nostoc punctiforme]
  misc_feature (1)..(178): Homolog of NCBI NO: 32141147 NR Description: putative glycerophosphoryl diester
  misc_feature (1)..(179): Homolog of NCBI NO: 16127502 NR Description: glycerophosphoryl diester phosphodiesterase
  misc_feature (1)..(193): Homolog of NCBI NO: 15221164 NR Description: putative glycerophosphodiester phosphodiesterase
  misc_feature (1)..(193): Homolog of NCBI NO: 34909788 NR Description: putative glycerophosphoryl diester
  misc_feature (1)..(186): Homolog of NCBI NO: 15241502 NR Description: glycerophosphodiester phosphodiesterase - like
  misc_feature (1)..(192): Homolog of NCBI NO: 34394918 NR Description: putative glycerophosphoryl diester
MKNPVFMNKHVQWADGKKYEDKFIATLKKYGYGGKYMSPAWRARPVFVQSFAPTSLVRAAGLTDSPLVFLVDDVTVRTEDTNQPYDDITSGEHLDYMNRYVVGIGPWKDTVVPPTKDNRLATPSDLVAMAHARGLQVHPYTYRNENKFLHFDFRQDPYAEYDYWINDVGIDGLFTDFPASLRRFQEWTAKNKD

SEQ ID NO: 1821 - protein, 187 aa, Zea mays subsp. mays
  peptide (1)..(187): Ceres Seq. ID no. 12351932
  misc_feature (1)..(187): Homolog of NCBI NO: 15221164 NR Description: putative glycerophosphodiester phosphodiesterase
  misc_feature (1)..(187): Homolog of NCBI NO: 34909788 NR Description: putative glycerophosphoryl diester
  misc_feature (1)..(180): Homolog of NCBI NO: 15241502 NR Description: glycerophosphodiester phosphodiesterase - like
  misc_feature (1)..(186): Homolog of NCBI NO: 34394918 NR Description: putative glycerophosphoryl diester
  misc_feature (1)..(180): Homolog of NCBI NO: 15595544 NR Description: glycerophosphoryl diester phosphodiesterase,
  misc_feature (10)..(170): Homolog of NCBI NO: 23019457 NR Description: hypothetical protein [Thermobifida fusca]
  misc_feature (1)..(170): Homolog of NCBI NO: 29833326 NR Description: putative glycerophosphoryl diester
  misc_feature (1)..(172): Homolog of NCBI NO: 23126501 NR Description: hypothetical protein [Nostoc punctiforme]
  misc_feature (1)..(172): Homolog of NCBI NO: 32141147 NR Description: putative glycerophosphoryl diester
  misc_feature (1)..(173): Homolog of NCBI NO: 16127502 NR Description: glycerophosphoryl diester phosphodiesterase
MNKHVQWADGKKYEDKFIATLKKYGYGGKYMSPAWRARPVFVQSFAPTSLVRAAGLTDSPLVFLVDDVTVRTEDTNQPYDDITSGEHLDYMNRYVVGIGPWKDTVVPPTKDNRLATPSDLVAMAHARGLQVHPYTYRNENKFLHFDFRQDPYAEYDYWINDVGIDGLFTDFPASLRRFQEWTAKNKD

SEQ ID NO: 1822 - protein, 159 aa, Zea mays subsp. mays
  peptide (1)..(159): Ceres Seq. ID no. 12351933
  misc_feature (69)..(103): Homolog of NCBI NO: 16127502 NR Description: glycerophosphoryl diester phosphodiesterase
  misc_feature (32)..(96): Homolog of NCBI NO: 15221164 NR Description: putative glycerophosphodiester phosphodiesterase
  misc_feature (57)..(96): Homolog of NCBI NO: 34909788 NR Description: putative glycerophosphoryl diester
  misc_feature (40)..(96): Homolog of NCBI NO: 15241502 NR Description: glycerophosphodiester phosphodiesterase - like
SISNKHQTSYSGSPVHLLRSRRSPPAIAAEDMASLRVVSVLVLVAMAASAGGVAARPLVGVGGAWENRAPLQTSRPFNIAHRGSNGELPEETAAAYAARHRRGRGLHRGGHRGHQGRPPRLLPRHHARRYHRRRPPPGVRRPPAHPRGAVGQRHRILRH

SEQ ID NO: 1823 - DNA, 1330 bp, Zea mays subsp. mays
  misc_feature (1)..(1330): Ceres Seq. ID no. 12368522
  misc_feature: MA Experiment ID: 108526 Result: Down-regulated in Transcription
  misc_feature: MA Experiment 108526 PARAMETER Experiment Name: Zm_5mM_NO_P Parameter: Age (day) Value: 8
  misc_feature: MA Experiment 108526 PARAMETER Experiment Name: Zm_5mM_NO_P Parameter: Organism Value: Zea mays
  misc_feature: MA Experiment 108526 PARAMETER Experiment Name: Zm_5mM_NO_P Parameter: Plant Line Value: 35A19
  misc_feature: MA Experiment 108526 PARAMETER Experiment Name: Zm_5mM_NO_P Parameter: Timepoint (hr) Value: 1
  misc_feature: MA Experiment 108526 PARAMETER Experiment Name: Zm_5mM_NO_P Parameter: Tissue Value: Aerial
  misc_feature: MA Experiment 108526 PARAMETER Experiment Name: Zm_5mM_NO_P Parameter: Treatment Value: 5mM NO vs. No Treatment
  misc_feature: MA Experiment ID: 108527 Result: Down-regulated in Transcription
  misc_feature: MA Experiment 108527 PARAMETER Experiment Name: Zm_5mM_NO_P Parameter: Age (day) Value: 8
  misc_feature: MA Experiment 108527 PARAMETER Experiment Name: Zm_5mM_NO_P Parameter: Organism Value: Zea mays
  misc_feature: MA Experiment 108527 PARAMETER Experiment Name: Zm_5mM_NO_P Parameter: Plant Line Value: 35A19
  misc_feature: MA Experiment 108527 PARAMETER Experiment Name: Zm_5mM_NO_P Parameter: Timepoint (hr) Value: 6
  misc_feature: MA Experiment 108527 PARAMETER Experiment Name: Zm_5mM_NO_P Parameter: Tissue Value: Aerial
  misc_feature: MA Experiment 108527 PARAMETER Experiment Name: Zm_5mM_NO_P Parameter: Treatment Value: 5mM NO vs. No Treatment
  misc_feature: MA Experiment ID: 108529 Result: Up-regulated in Transcription
  misc_feature: MA Experiment 108529 PARAMETER Experiment Name: Zm_Imbibed_Seeds_P Parameter: Age (day) Value: 5 vs. 2
  misc_feature: MA Experiment 108529 PARAMETER Experiment Name: Zm_Imbibed_Seeds_P Parameter: Organism Value: Zea mays
  misc_feature: MA Experiment 108529 PARAMETER Experiment Name: Zm_Imbibed_Seeds_P Parameter: Plant Line Value: 35A19
  misc_feature: MA Experiment 108529 PARAMETER Experiment Name: Zm_Imbibed_Seeds_P Parameter: Tissue Value: Roots vs. Embryo
  misc_feature: MA Experiment ID: 108534 Result: Up-regulated in Transcription
  misc_feature: MA Experiment 108534 PARAMETER Experiment Name: Zm_4deg_Cold_P Parameter: Age (hr) Value: 8
  misc_feature: MA Experiment 108534 PARAMETER Experiment Name: Zm_4deg_Cold_P Parameter: Organism Value: Zea mays
  misc_feature: MA Experiment 108534 PARAMETER Experiment Name: Zm_4deg_Cold_P Parameter: Plant Line Value: 35A19
  misc_feature: MA Experiment 108534 PARAMETER Experiment Name: Zm_4deg_Cold_P Parameter: Temperature (deg C) Value: 4 vs. 22
  misc_feature: MA Experiment 108534 PARAMETER Experiment Name: Zm_4deg_Cold_P Parameter: Timepoint (hr) Value: 6
  misc_feature: MA Experiment 108534 PARAMETER Experiment Name: Zm_4deg_Cold_P Parameter: Tissue Value: Aerial
  misc_feature: MA Experiment ID: 108535 Result: Down-regulated in Transcription
  misc_feature: MA Experiment 108535 PARAMETER Experiment Name: Zm_Meristem_P Parameter: Age (day) Value: 8
  misc_feature: MA Experiment 108535 PARAMETER Experiment Name: Zm_Meristem_P Parameter: Organism Value: Zea mays
  misc_feature: MA Experiment 108535 PARAMETER Experiment Name: Zm_Meristem_P Parameter: Plant Line Value: 35A19
  misc_feature: MA Experiment 108535 PARAMETER Experiment Name: Zm_Meristem_P Parameter: Tissue Value: Root Meristem vs. Above Root Meristem
  misc_feature: MA Experiment ID: 108543 Result: Up-regulated in Transcription
  misc_feature: MA Experiment ID: 20000535 Result: Down-regulated in Transcription
  misc_feature: MA Experiment 20000535 PARAMETER Experiment Name: Zm_Hybrid_Seed_Dev_P Parameter: DAP Value: 30 vs. 12
  misc_feature: MA Experiment 20000535 PARAMETER Experiment Name: Zm_Hybrid_Seed_Dev_P Parameter: Organism Value: Zea mays
  misc_feature: MA Experiment 20000535 PARAMETER Experiment Name: Zm_Hybrid_Seed_Dev_P Parameter: Plant Line Value: 35A19
  misc_feature: MA Experiment 20000535 PARAMETER Experiment Name: Zm_Hybrid_Seed_Dev_P Parameter: Tissue Value: Embryo vs. Unfert Floret
ctccccctccgcctcttgctctctctcgcctctggttggcagagctctcttgaagcctcgagactcgtctcgccgctgctccctcagctctgccgctgcgtgcctgcgttagctgttgcattgcagcgcagccccgcgagccttgagctgctagctcgcccttcaccacagtccccagacatggagttcgaagaccgctgccacaaggtccaggagcccaagttcgactgcctgctcttcgacctcgacgacaccctgtacccgctgagcgccgggatcgcaggccatgtcaagaagaacattgaagattacatggttgagaagctgggtattgacgagaccaagatcgagaacctgggcaatctgctgtacaagaactacggcaccacgatggctggcctcagggccatcggctacagcttcgattacgatgagtaccacgccttcgtccatggaaggctgccgtacgacaacatcaagcctgaccccattctcaagcacattctcaagaacctgcgcatccgcaaactcatattcaccaacggtgacatggtccacgccgtgagagccctcaagaggctgggcctggaggactgcttcgaggggatcatctgcttcgagaccctgaacccgccctgcccgccgcagggagaccaggagcccgagatcttcgacatcgccgaccacttcgcccgctccggcaccgccgacgagctgcccaagacccccgtgctgtgcaagcccaacgtggacgccatggaggaggcgctcaggatcgccaacgtcaacccgcacaaggcgatcttcttcgacgacagcgtacgcaacatccaggccgggaagcagattggcctccacacggtgctggtgggcaaatcgcagcgggtgaaaggcgcggaccacgcgctggagagcatccacaacatcagggaagcgctgccggagctgtgggaggaggccgagaaggcggaggacgtgctctaccccgaacgcgttgcgatggagacctcggtcaccgcgtaaaacccctgaatgcctccggtgcaccgtcagccgaactttctcgacatctccaggaccgcatcaacgatcacatgtcactcgctccccgagccagggccggtgatgatctcgcgctggaactgaatccaccagcaatgggcgggccgaggatcgatttccgacagcaggaggggtgcagcatgtaaagggggaacagatgagatcatgtttgggttggtcccccgttgtatatgtagttatgtatcagccagtcctttgtttgtaaattaccagtatttagaagtaataagaaaatgggggtttacgt

SEQ ID NO: 1824 - protein, 340 aa, Zea mays subsp. mays
  peptide (1)..(340): Ceres Seq. ID no. 12368523
  misc_feature (75)..(293): Pfam Name: haloacid dehalogenase-like hydrolase Pfam Description: haloacid dehalogenase-like hydrolase
  misc_feature (70)..(340): Homolog of NCBI NO: 40714684 NR Description: expressed protein [Oryza sativa (japonica
  misc_feature (73)..(340): Homolog of NCBI NO: 15238429 NR Description: putative ripening-related protein - like; protein
  misc_feature (58)..(340): Homolog of NCBI NO: 8885554 NR Description: ripening-related protein-like; hydrolase-like
  misc_feature (61)..(336): Homolog of NCBI NO: 21618155 NR Description: putative ripening-related protein-like
  misc_feature (61)..(336): Homolog of NCBI NO: 30697236 NR Description: haloacid dehalogenase-like hydrolase family
  misc_feature (61)..(336): Homolog of NCBI NO: 30697234 NR Description: haloacid dehalogenase-like hydrolase family
  misc_feature (61)..(340): Homolog of NCBI NO: 21593165 NR Description: unknown [Arabidopsis thaliana]
  misc_feature (61)..(340): Homolog of NCBI NO: 15241720 NR Description: putative protein
  misc_feature (222)..(340): Homolog of NCBI NO: 7406669 NR Description: putative ripening-related protein [Vitis vinifera]
  misc_feature (61)..(211): Homolog of NCBI NO: 7406669 NR Description: putative ripening-related protein [Vitis vinifera]
LPLRLLLSLASGWQSSLEASRLVSPLLPQLCRCVPALAVALQRSPASLELLARPSPQSPDMEFEDRCHKVQEPKFDCLLFDLDDTLYPLSAGIAGHVKKNIEDYMVEKLGIDETKIENLGNLLYKNYGTTMAGLRAIGYSFDYDEYHAFVHGRLPYDNIKPDPILKHILKNLRIRKLIFTNGDMVHAVRALKRLGLEDCFEGIICFETLNPPCPPQGDQEPEIFDIADHFARSGTADELPKTPVLCKPNVDAMEEALRIANVNPHKAIFFDDSVRNIQAGKQIGLHTVLVGKSQRVKGADHALESIHNIREALPELWEEAEKAEDVLYPERVAMETSVTA

SEQ ID NO: 1825 - protein, 280 aa, Zea mays subsp. mays
  peptide (1)..(280): Ceres Seq. ID no. 12368524
  misc_feature (15)..(233): Pfam Name: haloacid dehalogenase-like hydrolase Pfam Description: haloacid dehalogenase-like hydrolase
  misc_feature (10)..(280): Homolog of NCBI NO: 40714684 NR Description: expressed protein [Oryza sativa (japonica
  misc_feature (13)..(280): Homolog of NCBI NO: 15238429 NR Description: putative ripening-related protein - like; protein
  misc_feature (1)..(280): Homolog of NCBI NO: 8885554 NR Description: ripening-related protein-like; hydrolase-like
  misc_feature (1)..(276): Homolog of NCBI NO: 21618155 NR Description: putative ripening-related protein-like
  misc_feature (1)..(276): Homolog of NCBI NO: 30697236 NR Description: haloacid dehalogenase-like hydrolase family
  misc_feature (1)..(276): Homolog of NCBI NO: 30697234 NR Description: haloacid dehalogenase-like hydrolase family
  misc_feature (1)..(280): Homolog of NCBI NO: 21593165 NR Description: unknown [Arabidopsis thaliana]
  misc_feature (1)..(280): Homolog of NCBI NO: 15241720 NR Description: putative protein
  misc_feature (162)..(280): Homolog of NCBI NO: 7406669 NR Description: putative ripening-related protein [Vitis vinifera]
  misc_feature (1)..(151): Homolog of NCBI NO: 7406669 NR Description: putative ripening-related protein [Vitis vinifera]
MEFEDRCHKVQEPKFDCLLFDLDDTLYPLSAGIAGHVKKNIEDYMVEKLGIDETKIENLGNLLYKNYGTTMAGLRAIGYSFDYDEYHAFVHGRLPYDNIKPDPILKHILKNLRIRKLIFTNGDMVHAVRALKRLGLEDCFEGIICFETLNPPCPPQGDQEPEIFDIADHFARSGTADELPKTPVLCKPNVDAMEEALRIANVNPHKAIFFDDSVRNIQAGKQIGLHTVLVGKSQRVKGADHALESIHNIREALPELWEEAEKAEDVLYPERVAMETSVTA

SEQ ID NO: 1826 - protein, 236 aa, Zea mays subsp. mays
  peptide (1)..(236): Ceres Seq. ID no. 12368525
  misc_feature (1)..(189): Pfam Name: haloacid dehalogenase-like hydrolase Pfam Description: haloacid dehalogenase-like hydrolase
  misc_feature (1)..(236): Homolog of NCBI NO: 40714684 NR Description: expressed protein [Oryza sativa (japonica
  misc_feature (1)..(236): Homolog of NCBI NO: 15238429 NR Description: putative ripening-related protein - like; protein
  misc_feature (1)..(236): Homolog of NCBI NO: 8885554 NR Description: ripening-related protein-like; hydrolase-like
  misc_feature (1)..(232): Homolog of NCBI NO: 21618155 NR Description: putative ripening-related protein-like
  misc_feature (1)..(232): Homolog of NCBI NO: 30697236 NR Description: haloacid dehalogenase-like hydrolase family
  misc_feature (1)..(232): Homolog of NCBI NO: 30697234 NR Description: haloacid dehalogenase-like hydrolase family
  misc_feature (1)..(236): Homolog of NCBI NO: 21593165 NR Description: unknown [Arabidopsis thaliana]
  misc_feature (1)..(236): Homolog of NCBI NO: 15241720 NR Description: putative protein
  misc_feature (118)..(236): Homolog of NCBI NO: 7406669 NR Description: putative ripening-related protein [Vitis vinifera]
  misc_feature (1)..(107): Homolog of NCBI NO: 7406669 NR Description: putative ripening-related protein [Vitis vinifera]
MVEKLGIDETKIENLGNLLYKNYGTTMAGLRAIGYSFDYDEYHAFVHGRLPYDNIKPDPILKHILKNLRIRKLIFTNGDMVHAVRALKRLGLEDCFEGIICFETLNPPCPPQGDQEPEIFDIADHFARSGTADELPKTPVLCKPNVDAMEEALRIANVNPHKAIFFDDSVRNIQAGKQIGLHTVLVGKSQRVKGADHALESIHNIREALPELWEEAEKAEDVLYPERVAMETSVTA

SEQ ID NO: 1827 - DNA, 1440 bp, Zea mays subsp. mays
  misc_feature (1)..(1440): Ceres Seq. ID no. 12391399
  misc_feature: MA Experiment ID: 108543 Result: Down-regulated in Transcription
gcacgagaccattacctagaacatcntaatcgaaaagcgccgctgttcgcaacccaagcagtagccgagccaacgaaggcgtgcgagcggaggcaatcatacatggacggcagccgcaagagggtggacgcggaagacgtcaaaggggattccaccggcgggaagcgattgcgagcatcggagtcatttcaaagtggcgtaggaagcaaagtgaagctatgcaccaattttttcagtacttatggttgtccctttggtgagggctgccattttgtccattacttccctggtgactaccgggccgtttcagaaatgaccaacctgggtggcgcaacaatcgcacctcctggaggaatgatgatggatgggccacctacacccatcgtgaagactcgcttgtgcaacaagtacaacactgcagagggatgcaaatggggggacagatgccactttgcacatggtgaaagtgagcttggcaagtctatgatggacaactatatgccaccccccatcggaccaccaccaaccggttattttgcacctccacctatggcacctccacctatggcgcctccacccatggcacctccacctatggcacctctacctatggcgcctccacccatggcacctccacctatggcgcctccacccatggcacctccacctatggcgcctctacctatggcgcctccacctatggcacctccacctatggcacctccacccatggcgcctccacccatggcacctctacctatggcgcctccacccatggcacctccacctatggccaaccctggtttggccactccagctagcttcggcgcttatgccacggccaagatcagtgtcgatgcgtcccttgcaggtggcatcattgggaagggtggagctaacataaagcaaatatcttccgtcacaggggccaaggtggtcattcaggaggaccgccatgaatcagacaccagctttgaaaaacattgagttttgagggcacctttgatcagatcaggaacgctagtgctatggtcatcgagctgattgttagcatcagtggcataggaagcaacttcaagaccaagatgtgtgagaacttcgcaaaagggtcatgctcttatggcggcaaatgcccactttgcccatggtgagagtgagctgcgcaagcctgccgctgcttgagatccatgccctgtttcttacctcatagtcattagtcaatgtaactcaaaacttggcctctgatgatggatttgttggcttctttaggtctacgctaatgaattgctggcttcaggcctactactaaatttgctgacttctttagtccttcgctgttggccaactaaatctgttttctgcgtttgttcttgaatgttctcctatgatctaatcctctatttaggttcaaccagagaagtgttgatgctgatgatttgc

SEQ ID NO: 1828 - protein, 328 aa, Zea mays subsp. mays
  peptide (1)..(328): Ceres Seq. ID no. 12391400
  misc_feature (168)..(271): Pfam Name: Formin Homology 2 Domain Pfam Description: Formin Homology 2 Domain
  misc_feature (110)..(161): Homolog of NCBI NO: 18399496 NR Description: KH domain/zinc finger protein; protein id:
  misc_feature (55)..(109): Homolog of NCBI NO: 9294110 NR Description: contains similarity to unknown
  misc_feature (273)..(328): Homolog of NCBI NO: 9294110 NR Description: contains similarity to unknown
  misc_feature (266)..(326): Homolog of NCBI NO: 21555233 NR Description: unknown [Arabidopsis thaliana]
  misc_feature (35)..(108): Homolog of NCBI NO: 21555233 NR Description: unknown [Arabidopsis thaliana]
  misc_feature (273)..(328): Homolog of NCBI NO: 18399496 NR Description: KH domain/zinc finger protein; protein id:
  misc_feature (35)..(109): Homolog of NCBI NO: 18399496 NR Description: KH domain/zinc finger protein; protein id:
  misc_feature (266)..(326): Homolog of NCBI NO: 15240145 NR Description: KH domain/zinc finger protein
  misc_feature (35)..(108): Homolog of NCBI NO: 15240145 NR Description: KH domain/zinc finger protein
  misc_feature (37)..(192): Homolog of NCBI NO: 5441893 NR Description: ESTs C99174(E10437),D22295(C10709) correspond to region of the predicted gene.~Similar to Arabidopsis thaliana BAC
  misc_feature (9)..(9): Xaa is any aa, unknown or other
ARDHYLEHXNRKAPLFATQAVAEPTKACERRQSYMDGSRKRVDAEDVKGDSTGGKRLRASESFQSGVGSKVKLCTNFFSTYGCPFGEGCHFVHYFPGDYRAVSEMTNLGGATIAPPGGMMMDGPPTPIVKTRLCNKYNTAEGCKWGDRCHFAHGESELGKSMMDNYMPPPIGPPPTGYFAPPPMAPPPMAPPPMAPPPMAPLPMAPPPMAPPPMAPPPMAPPPMAPLPMAPPPMAPPPMAPPPMAPPPMAPLPMAPPPMAPPPMANPGLATPASFGAYATAKISVDASLAGGIIGKGGANIKQISSVTGAKVVIQEDRHESDTSFEKH

SEQ ID NO: 1829 - protein, 294 aa, Zea mays subsp. mays
  peptide (1)..(294): Ceres Seq. ID no. 12391401
  misc_feature (134)..(237): Pfam Name: Formin Homology 2 Domain Pfam Description: Formin Homology 2 Domain
  misc_feature (76)..(127): Homolog of NCBI NO: 18399496 NR Description: KH domain/zinc finger protein; protein id:
  misc_feature (21)..(75): Homolog of NCBI NO: 9294110 NR Description: contains similarity to unknown
  misc_feature (239)..(294): Homolog of NCBI NO: 9294110 NR Description: contains similarity to unknown
  misc_feature (232)..(292): Homolog of NCBI NO: 21555233 NR Description: unknown [Arabidopsis thaliana]
  misc_feature (1)..(74): Homolog of NCBI NO: 21555233 NR Description: unknown [Arabidopsis thaliana]
  misc_feature (239)..(294): Homolog of NCBI NO: 18399496 NR Description: KH domain/zinc finger protein; protein id:
  misc_feature (1)..(75): Homolog of NCBI NO: 18399496 NR Description: KH domain/zinc finger protein; protein id:
  misc_feature (232)..(292): Homolog of NCBI NO: 15240145 NR Description: KH domain/zinc finger protein
  misc_feature (1)..(74): Homolog of NCBI NO: 15240145 NR Description: KH domain/zinc finger protein
  misc_feature (3)..(158): Homolog of NCBI NO: 5441893 NR Description: ESTs C99174(E10437),D22295(C10709) correspond to region of the predicted gene.~Similar to Arabidopsis thaliana BAC
MDGSRKRVDAEDVKGDSTGGKRLRASESFQSGVGSKVKLCTNFFSTYGCPFGEGCHFVHYFPGDYRAVSEMTNLGGATIAPPGGMMMDGPPTPIVKTRLCNKYNTAEGCKWGDRCHFAHGESELGKSMMDNYMPPPIGPPPTGYFAPPPMAPPPMAPPPMAPPPMAPLPMAPPPMAPPPMAPPPMAPPPMAPLPMAPPPMAPPPMAPPPMAPPPMAPLPMAPPPMAPPPMANPGLATPASFGAYATAKISVDASLAGGIIGKGGANIKQISSVTGAKVVIQEDRHESDTSFEKH

SEQ ID NO: 1830 - protein, 224 aa, Zea mays subsp. mays
  peptide (1)..(224): Ceres Seq. ID no. 12391402
  misc_feature (64)..(167): Pfam Name: Formin Homology 2 Domain Pfam Description: Formin Homology 2 Domain
  misc_feature (6)..(57): Homolog of NCBI NO: 9294110 NR Description: contains similarity to unknown
  misc_feature (64)..(170): Homolog of NCBI NO: 6523547 NR Description: hydroxyproline-rich glycoprotein DZ-HRGP
  misc_feature (64)..(169): Homolog of NCBI NO: 7441829 NR Description: proline-rich cell wall protein - upland cotton
  misc_feature (64)..(169): Homolog of NCBI NO: 7441828 NR Description: extensin-like cell wall protein - sea-island
  misc_feature (6)..(57): Homolog of NCBI NO: 18399496 NR Description: KH domain/zinc finger protein; protein id:
  misc_feature (169)..(224): Homolog of NCBI NO: 9294110 NR Description: contains similarity to unknown
  misc_feature (162)..(222): Homolog of NCBI NO: 21555233 NR Description: unknown [Arabidopsis thaliana]
  misc_feature (169)..(224): Homolog of NCBI NO: 18399496 NR Description: KH domain/zinc finger protein; protein id:
  misc_feature (162)..(222): Homolog of NCBI NO: 15240145 NR Description: KH domain/zinc finger protein
  misc_feature (1)..(88): Homolog of NCBI NO: 5441893 NR Description: ESTs C99174(E10437),D22295(C10709) correspond to region of the predicted gene.~Similar to Arabidopsis thaliana BAC
MTNLGGATIAPPGGMMMDGPPTPIVKTRLCNKYNTAEGCKWGDRCHFAHGESELGKSMMDNYMPPPIGPPPTGYFAPPPMAPPPMAPPPMAPPPMAPLPMAPPPMAPPPMAPPPMAPPPMAPLPMAPPPMAPPPMAPPPMAPPPMAPLPMAPPPMAPPPMANPGLATPASFGAYATAKISVDASLAGGIIGKGGANIKQISSVTGAKVVIQEDRHESDTSFEKH

SEQ ID NO: 1831 - DNA, 1306 bp, Zea mays subsp. mays
  misc_feature (1)..(1306): Ceres Seq. ID no. 12351938
  misc_feature: MA Experiment ID: 108528 Result: Up-regulated in Transcription
  misc_feature: MA Experiment 108528 PARAMETER Experiment Name: Zm_Imbibed_Seeds_P Parameter: Age (day) Value: 5 vs. 2
  misc_feature: MA Experiment 108528 PARAMETER Experiment Name: Zm_Imbibed_Seeds_P Parameter: Organism Value: Zea mays
  misc_feature: MA Experiment 108528 PARAMETER Experiment Name: Zm_Imbibed_Seeds_P Parameter: Plant Line Value: 35A19
  misc_feature: MA Experiment 108528 PARAMETER Experiment Name: Zm_Imbibed_Seeds_P Parameter: Tissue Value: Aerial vs. Embryo
  misc_feature: MA Experiment ID: 108530 Result: Up-regulated in Transcription
  misc_feature: MA Experiment 108530 PARAMETER Experiment Name: Zm_Imbibed_Seeds_P Parameter: Age (day) Value: 6 vs. 2
  misc_feature: MA Experiment 108530 PARAMETER Experiment Name: Zm_Imbibed_Seeds_P Parameter: Organism Value: Zea mays
  misc_feature: MA Experiment 108530 PARAMETER Experiment Name: Zm_Imbibed_Seeds_P Parameter: Plant Line Value: 35A19
  misc_feature: MA Experiment 108530 PARAMETER Experiment Name: Zm_Imbibed_Seeds_P Parameter: Tissue Value: Aerial vs. Embryo
  misc_feature: MA Experiment ID: 108535 Result: Down-regulated in Transcription
  misc_feature: MA Experiment 108535 PARAMETER Experiment Name: Zm_Meristem_P Parameter: Age (day) Value: 8
  misc_feature: MA Experiment 108535 PARAMETER Experiment Name: Zm_Meristem_P Parameter: Organism Value: Zea mays
  misc_feature: MA Experiment 108535 PARAMETER Experiment Name: Zm_Meristem_P Parameter: Plant Line Value: 35A19
  misc_feature: MA Experiment 108535 PARAMETER Experiment Name: Zm_Meristem_P Parameter: Tissue Value: Root Meristem vs. Above Root Meristem
caagcattcgcatagcccgcgccgcaagtattcgcggtcgcacaggctggtccagtccaacaccggcctccctgtttcgatgctggccacaagctcgcccggccgcccggggtgaggatgactgccactcccaccgggctcctccggctccacatctgccgtcgaccaaacccgccctgctaaatactcgctccatacagttctcctcgcaattaacacctccgttagcacgagctgcagggagggagttgggaggagaaacagagctaccggggcgatgggcaccgtgctcgattcgcacttcctggcgctcaccgccatcgttactgtggggtaccagctgctgttcttcatcatcacagctctcctccggttcgataaggtcaccgatttcgcaggcagtacaaattttatcataatcgccatcctaacattagctttgaagggagcatggcatttccgtcagattgtgctgacagtgcttgtcaccatttggggtcttcgtctaggattatttttattgatgaggattttgcaatggggtgaagaccgaaggtttgacaaaatgcgtgataatttggggaaattggcagttttttggattttccaggctgtgtgggtttggtctgtcagcttgcccgtcactgttgtgaatgcaagtgacagaaacccctcgattgaagccagggatataatcggctggataatatggttggtcgggatatgtgtagaagcaacagctgatcagcagaagcttgtgttaaaaaattctccaagtaacaggggaaagtggtgcgacgccggtctttggaagtactctcgccacccgaactactttggggagatattcctttggtggggagtatttgtagcatcgaccccagttatctcagatgccgaatggcttgtgattcttggacctatattcctgactcttctgcttcttttcgttagtggaatcccactcctcgagtcatctgctgataagcgctatggacgattggaggaataccgtgcatacaagaacactacaaggttgccttcctccttgagctcccgctctacaatcctgggccgggaggtgatccaatcagttgagtggtgcttgcaaactgttctgctgcccttcagtgatgaacttgtatagaatatccctgcagtatgtttacgttttttgtttttgttttggtttgacagaactagaatgagcccattgatgggtcagcctgatgtttatgttgctattgtgtgcgtggcagttattccaccttcgattccaaggggttacagtggagtttggcccctg

SEQ ID NO: 1832 - protein, 289 aa, Zea mays subsp. mays
  peptide (1)..(289): Ceres Seq. ID no. 12351939
  misc_feature (4)..(252): Homolog of NCBI NO: 21355723 NR Description: CG6282-PA [Drosophila melanogaster]
  misc_feature (1)..(232): Homolog of NCBI NO: 25406281 NR Description: unknown protein F25P22.7 [imported] - Arabidopsis
  misc_feature (1)..(64): Homolog of NCBI NO: 9719732 NR Description: T10F20.18 [Arabidopsis thaliana]
  misc_feature (82)..(289): Homolog of NCBI NO: 9719732 NR Description: T10F20.18 [Arabidopsis thaliana]
  misc_feature (1)..(252): Homolog of NCBI NO: 21537359 NR Description: unknown [Arabidopsis thaliana]
  misc_feature (1)..(252): Homolog of NCBI NO: 30698953 NR Description: expressed protein [Arabidopsis thaliana]
  misc_feature (1)..(252): Homolog of NCBI NO: 18410409 NR Description: expressed protein
  misc_feature (1)..(289): Homolog of NCBI NO: 25402844 NR Description: protein T10O22.15 [imported] - Arabidopsis
  misc_feature (1)..(284): Homolog of NCBI NO: 15221003 NR Description: hypothetical protein; protein id: At1g18180.1
  misc_feature (1)..(252): Homolog of NCBI NO: 13937298 NR Description: unknown protein [Oryza sativa]
MGTVLDSHFLALTAIVTVGYQLLFFIITALLRFDKVTDFAGSTNFIIIAILTLALKGAWHFRQIVLTVLVTIWGLRLGLFLLMRILQWGEDRRFDKMRDNLGKLAVFWIFQAVWVWSVSLPVTVVNASDRNPSIEARDIIGWIIWLVGICVEATADQQKLVLKNSPSNRGKWCDAGLWKYSRHPNYFGEIFLWWGVFVASTPVISDAEWLVILGPIFLTLLLLFVSGIPLLESSADKRYGRLEEYRAYKNTTRLPSSLSSRSTILGREVIQSVEWCLQTVLLPFSDELV

SEQ ID NO: 1833 - protein, 207 aa, Zea mays subsp. mays
  peptide (1)..(207): Ceres Seq. ID no. 12351940
  misc_feature (1)..(207): Homolog of NCBI NO: 9719732 NR Description: T10F20.18 [Arabidopsis thaliana]
  misc_feature (1)..(170): Homolog of NCBI NO: 21537359 NR Description: unknown [Arabidopsis thaliana]
  misc_feature (1)..(170): Homolog of NCBI NO: 30698953 NR Description: expressed protein [Arabidopsis thaliana]
  misc_feature (1)..(170): Homolog of NCBI NO: 18410409 NR Description: expressed protein
  misc_feature (1)..(207): Homolog of NCBI NO: 25402844 NR Description: protein T10O22.15 [imported] - Arabidopsis
  misc_feature (1)..(202): Homolog of NCBI NO: 15221003 NR Description: hypothetical protein; protein id: At1g18180.1
  misc_feature (1)..(170): Homolog of NCBI NO: 13937298 NR Description: unknown protein [Oryza sativa]
  misc_feature (1)..(170): Homolog of NCBI NO: 39997421 NR Description: membrane protein, putative [Geobacter
  misc_feature (1)..(170): Homolog of NCBI NO: 21355723 NR Description: CG6282-PA [Drosophila melanogaster]
  misc_feature (1)..(150): Homolog of NCBI NO: 25406281 NR Description: unknown protein F25P22.7 [imported] - Arabidopsis
MRILQWGEDRRFDKMRDNLGKLAVFWIFQAVWVWSVSLPVTVVNASDRNPSIEARDIIGWIIWLVGICVEATADQQKLVLKNSPSNRGKWCDAGLWKYSRHPNYFGEIFLWWGVFVASTPVISDAEWLVILGPIFLTLLLLFVSGIPLLESSADKRYGRLEEYRAYKNTTRLPSSLSSRSTILGREVIQSVEWCLQTVLLPFSDELV

SEQ ID NO: 1834 - protein, 193 aa, Zea mays subsp. mays
  peptide (1)..(193): Ceres Seq. ID no. 12351941
  misc_feature (1)..(156): Homolog of NCBI NO: 39997421 NR Description: membrane protein, putative [Geobacter
  misc_feature (1)..(156): Homolog of NCBI NO: 21355723 NR Description: CG6282-PA [Drosophila melanogaster]
  misc_feature (1)..(136): Homolog of NCBI NO: 25406281 NR Description: unknown protein F25P22.7 [imported] - Arabidopsis
  misc_feature (1)..(193): Homolog of NCBI NO: 9719732 NR Description: T10F20.18 [Arabidopsis thaliana]
  misc_feature (1)..(156): Homolog of NCBI NO: 21537359 NR Description: unknown [Arabidopsis thaliana]
  misc_feature (1)..(156): Homolog of NCBI NO: 30698953 NR Description: expressed protein [Arabidopsis thaliana]
  misc_feature (1)..(156): Homolog of NCBI NO: 18410409 NR Description: expressed protein
  misc_feature (1)..(193): Homolog of NCBI NO: 25402844 NR Description: protein T10O22.15 [imported] - Arabidopsis
  misc_feature (1)..(188): Homolog of NCBI NO: 15221003 NR Description: hypothetical protein; protein id: At1g18180.1
  misc_feature (1)..(156): Homolog of NCBI NO: 13937298 NR Description: unknown protein [Oryza sativa]
MRDNLGKLAVFWIFQAVWVWSVSLPVTVVNASDRNPSIEARDIIGWIIWLVGICVEATADQQKLVLKNSPSNRGKWCDAGLWKYSRHPNYFGEIFLWWGVFVASTPVISDAEWLVILGPIFLTLLLLFVSGIPLLESSADKRYGRLEEYRAYKNTTRLPSSLSSRSTILGREVIQSVEWCLQTVLLPFSDELV

SEQ ID NO: 1835 - DNA, 1396 bp, Zea mays subsp. mays
  misc_feature (1)..(1396): Ceres Seq. ID no. 12414291
  misc_feature: MA Experiment ID: 108528 Result: Down-regulated in Transcription
  misc_feature: MA Experiment 108528 PARAMETER Experiment Name: Zm_Imbibed_Seeds_P Parameter: Age (day) Value: 5 vs. 2
  misc_feature: MA Experiment 108528 PARAMETER Experiment Name: Zm_Imbibed_Seeds_P Parameter: Organism Value: Zea mays
  misc_feature: MA Experiment 108528 PARAMETER Experiment Name: Zm_Imbibed_Seeds_P Parameter: Plant Line Value: 35A19
  misc_feature: MA Experiment 108528 PARAMETER Experiment Name: Zm_Imbibed_Seeds_P Parameter: Tissue Value: Aerial vs. Embryo
  misc_feature: MA Experiment ID: 108530 Result: Down-regulated in Transcription
  misc_feature: MA Experiment 108530 PARAMETER Experiment Name: Zm_Imbibed_Seeds_P Parameter: Age (day) Value: 6 vs. 2
  misc_feature: MA Experiment 108530 PARAMETER Experiment Name: Zm_Imbibed_Seeds_P Parameter: Organism Value: Zea mays
  misc_feature: MA Experiment 108530 PARAMETER Experiment Name: Zm_Imbibed_Seeds_P Parameter: Plant Line Value: 35A19
  misc_feature: MA Experiment 108530 PARAMETER Experiment Name: Zm_Imbibed_Seeds_P Parameter: Tissue Value: Aerial vs. Embryo
  misc_feature: MA Experiment ID: 108535 Result: Down-regulated in Transcription
  misc_feature: MA Experiment 108535 PARAMETER Experiment Name: Zm_Meristem_P Parameter: Age (day) Value: 8
  misc_feature: MA Experiment 108535 PARAMETER Experiment Name: Zm_Meristem_P Parameter: Organism Value: Zea mays
  misc_feature: MA Experiment 108535 PARAMETER Experiment Name: Zm_Meristem_P Parameter: Plant Line Value: 35A19
  misc_feature: MA Experiment 108535 PARAMETER Experiment Name: Zm_Meristem_P Parameter: Tissue Value: Root Meristem vs. Above Root Meristem
  misc_feature: MA Experiment ID: 108543 Result: Down-regulated in Transcription
ctccgtccccatctcgcgaagctagcgggaataacaagcaacgatacctacgacgacctacccccctttccctgctctctccttccaactcttgtttctgcaacgccagggcgcaaccatgggtcagcagcagcaagggccggcggccaggcggatggccacgctcgcctcccacctgcgccatccctccgtctctcaccctcagatggaagatgttcccctcttgaggggatccaattgccgtgcaaaaggtgcggcgccaggcttcaaagtcgcgatcttgggtgcagcaggtgggattgggcagccacttgcgctattgatgaagatgaaccctcttgtttcggtgctccatctatacgatgtcgtcaacgcacctggtgtcacagccgacatcagccacatgaacactggtgctgtggtacgtggcttcttgggccagccacagttggaaaatgccctggctggaatggatcttgtaataattcctgctggtgtccctcggaaacctgggatgacaagggatgatttgttcaacataaatgctggaatagtccgtaccctgtgtgaaggaattgcaaaatgctgccctaatgcaattgtgaatgtgatcagtaatcctgtcaactctaccgtcccaattgctgctgaagttttcaagaaagctggaacttatgaccctaagcggcttttaggtgtgaccacacttgacgtagtgagagcaaatacgtttgtgggagaggttcttggacttgaccccagagaggtaaatgttccagtcattggtgggcatgcaggaattacgatactaccactcctttcacaggtgaatccttcctgctcattcacctcggaagaggttaaatacctcacttctcgcatacagaatggtgggacagaagtagtcgaggctaaagctggagcaggatcagcaactctttcaatggcctatgcagctgccaaatttgcagatgcttgcctgagaggattgcgtggtgatgctgggataatagagtgctcttatgtggcttctcaggtcacagagttgcctttctttgcatccaaagtgcggctagggcgatgtggcattgaggagatcctaccacttggaccattaaatgagttcgagagatctggtctggagaaggcaaagaaagagctggcggagagtatccagaagggcgtctctttcatcaagtgaggccggcgacggccagcccaacatagaaatagatgtggcgtgtttctgcttcttgagaactcatcttgttatctctctgtaagactgagtgcatgacacgaataatccacgtacacggctgtactaaaaagatgatgaatctgtggtggctaaaaaaagggaaatagaaaagtctggtaataaaagttgtttctg

SEQ ID NO: 1836 - protein, 360 aa, Zea mays subsp. mays
  peptide (1)..(360): Ceres Seq. ID no. 12414292
  misc_feature (195)..(359): Pfam Name: lactate/malate dehydrogenase, alpha/beta Pfam Description: lactate/malate dehydrogenase, alpha/beta
  misc_feature (6)..(360): Homolog of NCBI NO: 15242466 NR Description: microbody NAD-dependent malate dehydrogenase
  misc_feature (6)..(360): Homolog of NCBI NO: 12644436 NR Description: Malate dehydrogenase 1, glyoxysomal precursor
  misc_feature (6)..(360): Homolog of NCBI NO: 11133654 NR Description: Malate dehydrogenase 2, glyoxysomal precursor
  misc_feature (11)..(360): Homolog of NCBI NO: 15227752 NR Description: putative glyoxysomal malate dehydrogenase
  misc_feature (5)..(359): Homolog of NCBI NO: 34915204 NR Description: putative  glyoxysomal malate dehydrogenase
  misc_feature (9)..(360): Homolog of NCBI NO: 1346501 NR Description: MALATE DEHYDROGENASE, GLYOXYSOMAL PRECURSOR
  misc_feature (9)..(360): Homolog of NCBI NO: 169977 NR Description: malate dehydrogenase
  misc_feature (11)..(360): Homolog of NCBI NO: 1170897 NR Description: MALATE DEHYDROGENASE, GLYOXYSOMAL PRECURSOR
  misc_feature (11)..(360): Homolog of NCBI NO: 126894 NR Description: MALATE DEHYDROGENASE, GLYOXYSOMAL PRECURSOR
  misc_feature (9)..(359): Homolog of NCBI NO: 3183079 NR Description: MALATE DEHYDROGENASE, GLYOXYSOMAL PRECURSOR
MGQQQQGPAARRMATLASHLRHPSVSHPQMEDVPLLRGSNCRAKGAAPGFKVAILGAAGGIGQPLALLMKMNPLVSVLHLYDVVNAPGVTADISHMNTGAVVRGFLGQPQLENALAGMDLVIIPAGVPRKPGMTRDDLFNINAGIVRTLCEGIAKCCPNAIVNVISNPVNSTVPIAAEVFKKAGTYDPKRLLGVTTLDVVRANTFVGEVLGLDPREVNVPVIGGHAGITILPLLSQVNPSCSFTSEEVKYLTSRIQNGGTEVVEAKAGAGSATLSMAYAAAKFADACLRGLRGDAGIIECSYVASQVTELPFFASKVRLGRCGIEEILPLGPLNEFERSGLEKAKKELAESIQKGVSFIK

SEQ ID NO: 1837 - protein, 348 aa, Zea mays subsp. mays
  peptide (1)..(348): Ceres Seq. ID no. 12414293
  misc_feature (183)..(347): Pfam Name: lactate/malate dehydrogenase, alpha/beta Pfam Description: lactate/malate dehydrogenase, alpha/beta
  misc_feature (1)..(348): Homolog of NCBI NO: 15242466 NR Description: microbody NAD-dependent malate dehydrogenase
  misc_feature (1)..(348): Homolog of NCBI NO: 12644436 NR Description: Malate dehydrogenase 1, glyoxysomal precursor
  misc_feature (1)..(348): Homolog of NCBI NO: 11133654 NR Description: Malate dehydrogenase 2, glyoxysomal precursor
  misc_feature (1)..(348): Homolog of NCBI NO: 15227752 NR Description: putative glyoxysomal malate dehydrogenase
  misc_feature (1)..(347): Homolog of NCBI NO: 34915204 NR Description: putative  glyoxysomal malate dehydrogenase
  misc_feature (1)..(348): Homolog of NCBI NO: 1346501 NR Description: MALATE DEHYDROGENASE, GLYOXYSOMAL PRECURSOR
  misc_feature (1)..(348): Homolog of NCBI NO: 169977 NR Description: malate dehydrogenase
  misc_feature (1)..(348): Homolog of NCBI NO: 1170897 NR Description: MALATE DEHYDROGENASE, GLYOXYSOMAL PRECURSOR
  misc_feature (1)..(348): Homolog of NCBI NO: 126894 NR Description: MALATE DEHYDROGENASE, GLYOXYSOMAL PRECURSOR
  misc_feature (1)..(347): Homolog of NCBI NO: 3183079 NR Description: MALATE DEHYDROGENASE, GLYOXYSOMAL PRECURSOR
MATLASHLRHPSVSHPQMEDVPLLRGSNCRAKGAAPGFKVAILGAAGGIGQPLALLMKMNPLVSVLHLYDVVNAPGVTADISHMNTGAVVRGFLGQPQLENALAGMDLVIIPAGVPRKPGMTRDDLFNINAGIVRTLCEGIAKCCPNAIVNVISNPVNSTVPIAAEVFKKAGTYDPKRLLGVTTLDVVRANTFVGEVLGLDPREVNVPVIGGHAGITILPLLSQVNPSCSFTSEEVKYLTSRIQNGGTEVVEAKAGAGSATLSMAYAAAKFADACLRGLRGDAGIIECSYVASQVTELPFFASKVRLGRCGIEEILPLGPLNEFERSGLEKAKKELAESIQKGVSFIK

SEQ ID NO: 1838 - protein, 331 aa, Zea mays subsp. mays
  peptide (1)..(331): Ceres Seq. ID no. 12414294
  misc_feature (166)..(330): Pfam Name: lactate/malate dehydrogenase, alpha/beta Pfam Description: lactate/malate dehydrogenase, alpha/beta
  misc_feature (1)..(331): Homolog of NCBI NO: 15242466 NR Description: microbody NAD-dependent malate dehydrogenase
  misc_feature (1)..(331): Homolog of NCBI NO: 12644436 NR Description: Malate dehydrogenase 1, glyoxysomal precursor
  misc_feature (1)..(331): Homolog of NCBI NO: 11133654 NR Description: Malate dehydrogenase 2, glyoxysomal precursor
  misc_feature (1)..(331): Homolog of NCBI NO: 15227752 NR Description: putative glyoxysomal malate dehydrogenase
  misc_feature (1)..(330): Homolog of NCBI NO: 34915204 NR Description: putative  glyoxysomal malate dehydrogenase
  misc_feature (1)..(331): Homolog of NCBI NO: 1346501 NR Description: MALATE DEHYDROGENASE, GLYOXYSOMAL PRECURSOR
  misc_feature (1)..(331): Homolog of NCBI NO: 169977 NR Description: malate dehydrogenase
  misc_feature (1)..(331): Homolog of NCBI NO: 1170897 NR Description: MALATE DEHYDROGENASE, GLYOXYSOMAL PRECURSOR
  misc_feature (1)..(331): Homolog of NCBI NO: 126894 NR Description: MALATE DEHYDROGENASE, GLYOXYSOMAL PRECURSOR
  misc_feature (1)..(330): Homolog of NCBI NO: 3183079 NR Description: MALATE DEHYDROGENASE, GLYOXYSOMAL PRECURSOR
MEDVPLLRGSNCRAKGAAPGFKVAILGAAGGIGQPLALLMKMNPLVSVLHLYDVVNAPGVTADISHMNTGAVVRGFLGQPQLENALAGMDLVIIPAGVPRKPGMTRDDLFNINAGIVRTLCEGIAKCCPNAIVNVISNPVNSTVPIAAEVFKKAGTYDPKRLLGVTTLDVVRANTFVGEVLGLDPREVNVPVIGGHAGITILPLLSQVNPSCSFTSEEVKYLTSRIQNGGTEVVEAKAGAGSATLSMAYAAAKFADACLRGLRGDAGIIECSYVASQVTELPFFASKVRLGRCGIEEILPLGPLNEFERSGLEKAKKELAESIQKGVSFIK

SEQ ID NO: 1839 - DNA, 1453 bp, Zea mays subsp. mays
  misc_feature (1)..(1453): Ceres Seq. ID no. 12355877
  misc_feature: MA Experiment ID: 108527 Result: Up-regulated in Transcription
  misc_feature: MA Experiment 108527 PARAMETER Experiment Name: Zm_5mM_NO_P Parameter: Age (day) Value: 8
  misc_feature: MA Experiment 108527 PARAMETER Experiment Name: Zm_5mM_NO_P Parameter: Organism Value: Zea mays
  misc_feature: MA Experiment 108527 PARAMETER Experiment Name: Zm_5mM_NO_P Parameter: Plant Line Value: 35A19
  misc_feature: MA Experiment 108527 PARAMETER Experiment Name: Zm_5mM_NO_P Parameter: Timepoint (hr) Value: 6
  misc_feature: MA Experiment 108527 PARAMETER Experiment Name: Zm_5mM_NO_P Parameter: Tissue Value: Aerial
  misc_feature: MA Experiment 108527 PARAMETER Experiment Name: Zm_5mM_NO_P Parameter: Treatment Value: 5mM NO vs. No Treatment
  misc_feature: MA Experiment ID: 108544 Result: Down-regulated in Transcription
  misc_feature: MA Experiment ID: 20000626 Result: Up-regulated in Transcription
  misc_feature: MA Experiment 20000626 PARAMETER Experiment Name: Zm_Herbicide-Treatments_P Parameter: Timepoint (hr) Value: 12
  misc_feature: MA Experiment 20000626 PARAMETER Experiment Name: Zm_Herbicide-Treatments_P Parameter: Tissue Value: Aerial
  misc_feature: MA Experiment 20000626 PARAMETER Experiment Name: Zm_Herbicide-Treatments_P Parameter: Treatment Value: Roundup vs. No Treatment
ctcttttccgccctccacccctcgcgagctctccacccctccacacgaccgccgcccatggtggccgcgccaccaccgccgccgcagtttgccaagcacttcgctgctgggccgcccccgccgccccaagctggtgctgggcgccgcacgccgaccccgccctcgtctggatccggcgggaacgggtgcgaagaaaataaaaccatttgggtcggtgacctccagtactggatggatgaaaactacctacataactgcttcgggcccagcggcgaggtggttacaataaaagttatccgcaataggcaaacaggacagtcagaggggtatggatttgttgagttcttttctcatgcatcagcagagaaagctcttcagaattttactggtcatgtgatgccaaacactgaccggccatttaaattgaactgggcatcgtatagcatgggtgaaaagcgatctgaagtggcttctgatcactcgatatttgttggcgatctagctgctgatgtcactgatgaaatgctgctggagcttttctccagcaagtaccgctcggtgaaaggagctaaagttattattgatgcaaacacaggccgttccaggggctatggatttgtcaggtttggagacgacaacgacaaatctcatgccatgtctgaaatgaatggtgtatattgctctacgaggccaattcgtataggacctgcgactcccagaagatcttcaggtgattctggctcctcgactcctggtcattcagatggtgattcttctaacagaacggtatatgttggtgggcttgaccccaatgtcagtgaagatgaactgagaaaagcctttgccaaatatgatcttgcctctgtgaaaattcctctaggaaagcaatgtggctttgttcaatttgttagcagaactgatgctgaagaagcactacaaggattaaatggatcactcattggaaagcaggcagttcgcctttcatgggtccgcagcccatcgcataagcagtctaggggtgactccgtcaacaggaggaacaacatgtactatggcacaccattctacggcggatatggctatgcctccccggtgccacacccaaacatgtacgctgcagcgtatggcacgtacccgctatatggcaaccagcagctagtgagctagagagctcccctccgacgtgtcccctctgacgggaaacaaaggttttggtccggtgagcatagtagcgtcaggtgagaaggtgcctttataaggctgtcctaagaagtgggcgagatatgttgttgcatcgttatcgttatggtgcctgtaactgttgtgtgtgccgtgtgcgtccggaagaattggatggaatggaactcgtggcttgttgtagtacatcagagagtcatgttattctttcaagaaattttgacttggtaataaattaaactattgtttgtgcgtc

SEQ ID NO: 1840 - protein, 388 aa, Zea mays subsp. mays
  peptide (1)..(388): Ceres Seq. ID no. 12355878
  misc_feature (162)..(234): Pfam Name: RNA recognition motif. (a.k.a. RRM, RBD, or RNP domain) Pfam Description: RNA recognition motif. (a.k.a. RRM, RBD, or RNP
  misc_feature (14)..(388): Homolog of NCBI NO: 15220233 NR Description: RNA binding protein 47 (RBP47), putative
  misc_feature (13)..(388): Homolog of NCBI NO: 15220241 NR Description: RNA binding protein 47 (RBP47), putative; protein
  misc_feature (246)..(388): Homolog of NCBI NO: 7489112 NR Description: DNA binding protein ACBF - common tobacco
  misc_feature (48)..(260): Homolog of NCBI NO: 7489112 NR Description: DNA binding protein ACBF - common tobacco
  misc_feature (17)..(385): Homolog of NCBI NO: 34896988 NR Description: putative RNA binding protein [Oryza sativa]
  misc_feature (246)..(388): Homolog of NCBI NO: 7489196 NR Description: RNA binding protein homolog - common tobacco
  misc_feature (48)..(260): Homolog of NCBI NO: 7489196 NR Description: RNA binding protein homolog - common tobacco
  misc_feature (246)..(388): Homolog of NCBI NO: 9663769 NR Description: RNA Binding Protein 47 [Nicotiana plumbaginifolia]
  misc_feature (48)..(260): Homolog of NCBI NO: 9663769 NR Description: RNA Binding Protein 47 [Nicotiana plumbaginifolia]
  misc_feature (19)..(381): Homolog of NCBI NO: 15594035 NR Description: nucleic acid binding protein [Nicotiana tabacum]
LFSALHPSRALHPSTRPPPMVAAPPPPPQFAKHFAAGPPPPPQAGAGRRTPTPPSSGSGGNGCEENKTIWVGDLQYWMDENYLHNCFGPSGEVVTIKVIRNRQTGQSEGYGFVEFFSHASAEKALQNFTGHVMPNTDRPFKLNWASYSMGEKRSEVASDHSIFVGDLAADVTDEMLLELFSSKYRSVKGAKVIIDANTGRSRGYGFVRFGDDNDKSHAMSEMNGVYCSTRPIRIGPATPRRSSGDSGSSTPGHSDGDSSNRTVYVGGLDPNVSEDELRKAFAKYDLASVKIPLGKQCGFVQFVSRTDAEEALQGLNGSLIGKQAVRLSWVRSPSHKQSRGDSVNRRNNMYYGTPFYGGYGYASPVPHPNMYAAAYGTYPLYGNQQLVS

SEQ ID NO: 1841 - protein, 369 aa, Zea mays subsp. mays
  peptide (1)..(369): Ceres Seq. ID no. 12355879
  misc_feature (143)..(215): Pfam Name: RNA recognition motif. (a.k.a. RRM, RBD, or RNP domain) Pfam Description: RNA recognition motif. (a.k.a. RRM, RBD, or RNP
  misc_feature (1)..(369): Homolog of NCBI NO: 15220233 NR Description: RNA binding protein 47 (RBP47), putative
  misc_feature (1)..(369): Homolog of NCBI NO: 15220241 NR Description: RNA binding protein 47 (RBP47), putative; protein
  misc_feature (227)..(369): Homolog of NCBI NO: 7489112 NR Description: DNA binding protein ACBF - common tobacco
  misc_feature (29)..(241): Homolog of NCBI NO: 7489112 NR Description: DNA binding protein ACBF - common tobacco
  misc_feature (1)..(366): Homolog of NCBI NO: 34896988 NR Description: putative RNA binding protein [Oryza sativa]
  misc_feature (227)..(369): Homolog of NCBI NO: 7489196 NR Description: RNA binding protein homolog - common tobacco
  misc_feature (29)..(241): Homolog of NCBI NO: 7489196 NR Description: RNA binding protein homolog - common tobacco
  misc_feature (227)..(369): Homolog of NCBI NO: 9663769 NR Description: RNA Binding Protein 47 [Nicotiana plumbaginifolia]
  misc_feature (29)..(241): Homolog of NCBI NO: 9663769 NR Description: RNA Binding Protein 47 [Nicotiana plumbaginifolia]
  misc_feature (1)..(362): Homolog of NCBI NO: 15594035 NR Description: nucleic acid binding protein [Nicotiana tabacum]
MVAAPPPPPQFAKHFAAGPPPPPQAGAGRRTPTPPSSGSGGNGCEENKTIWVGDLQYWMDENYLHNCFGPSGEVVTIKVIRNRQTGQSEGYGFVEFFSHASAEKALQNFTGHVMPNTDRPFKLNWASYSMGEKRSEVASDHSIFVGDLAADVTDEMLLELFSSKYRSVKGAKVIIDANTGRSRGYGFVRFGDDNDKSHAMSEMNGVYCSTRPIRIGPATPRRSSGDSGSSTPGHSDGDSSNRTVYVGGLDPNVSEDELRKAFAKYDLASVKIPLGKQCGFVQFVSRTDAEEALQGLNGSLIGKQAVRLSWVRSPSHKQSRGDSVNRRNNMYYGTPFYGGYGYASPVPHPNMYAAAYGTYPLYGNQQLVS

SEQ ID NO: 1842 - protein, 311 aa, Zea mays subsp. mays
  peptide (1)..(311): Ceres Seq. ID no. 12355880
  misc_feature (85)..(157): Pfam Name: RNA recognition motif. (a.k.a. RRM, RBD, or RNP domain) Pfam Description: RNA recognition motif. (a.k.a. RRM, RBD, or RNP
  misc_feature (1)..(311): Homolog of NCBI NO: 15220233 NR Description: RNA binding protein 47 (RBP47), putative
  misc_feature (1)..(311): Homolog of NCBI NO: 15220241 NR Description: RNA binding protein 47 (RBP47), putative; protein
  misc_feature (169)..(311): Homolog of NCBI NO: 7489112 NR Description: DNA binding protein ACBF - common tobacco
  misc_feature (1)..(183): Homolog of NCBI NO: 7489112 NR Description: DNA binding protein ACBF - common tobacco
  misc_feature (1)..(308): Homolog of NCBI NO: 34896988 NR Description: putative RNA binding protein [Oryza sativa]
  misc_feature (169)..(311): Homolog of NCBI NO: 7489196 NR Description: RNA binding protein homolog - common tobacco
  misc_feature (1)..(183): Homolog of NCBI NO: 7489196 NR Description: RNA binding protein homolog - common tobacco
  misc_feature (169)..(311): Homolog of NCBI NO: 9663769 NR Description: RNA Binding Protein 47 [Nicotiana plumbaginifolia]
  misc_feature (1)..(183): Homolog of NCBI NO: 9663769 NR Description: RNA Binding Protein 47 [Nicotiana plumbaginifolia]
  misc_feature (1)..(304): Homolog of NCBI NO: 15594035 NR Description: nucleic acid binding protein [Nicotiana tabacum]
MDENYLHNCFGPSGEVVTIKVIRNRQTGQSEGYGFVEFFSHASAEKALQNFTGHVMPNTDRPFKLNWASYSMGEKRSEVASDHSIFVGDLAADVTDEMLLELFSSKYRSVKGAKVIIDANTGRSRGYGFVRFGDDNDKSHAMSEMNGVYCSTRPIRIGPATPRRSSGDSGSSTPGHSDGDSSNRTVYVGGLDPNVSEDELRKAFAKYDLASVKIPLGKQCGFVQFVSRTDAEEALQGLNGSLIGKQAVRLSWVRSPSHKQSRGDSVNRRNNMYYGTPFYGGYGYASPVPHPNMYAAAYGTYPLYGNQQLVS

SEQ ID NO: 1843 - DNA, 1959 bp, Zea mays subsp. mays
  misc_feature (1)..(1959): Ceres Seq. ID no. 12373566
  misc_feature: MA Experiment ID: 108530 Result: Up-regulated in Transcription
  misc_feature: MA Experiment 108530 PARAMETER Experiment Name: Zm_Imbibed_Seeds_P Parameter: Age (day) Value: 6 vs. 2
  misc_feature: MA Experiment 108530 PARAMETER Experiment Name: Zm_Imbibed_Seeds_P Parameter: Organism Value: Zea mays
  misc_feature: MA Experiment 108530 PARAMETER Experiment Name: Zm_Imbibed_Seeds_P Parameter: Plant Line Value: 35A19
  misc_feature: MA Experiment 108530 PARAMETER Experiment Name: Zm_Imbibed_Seeds_P Parameter: Tissue Value: Aerial vs. Embryo
aaataataatcacattgtcctcgtcgtcctatcctccttcgcctgctcgctagtcgctagccgctccccccaacaaacaaccctaatccgtgaccgtggacacgccgcaagctccatcgcgcgaatagattggggggattcaatagaggctacgcggggattggtcgcgctcgagatctcagcaccctcgcgcctgaaatctttctattgttgtcgtggttcaggtgatgagatcttggggagcgcgactcgctcggtcctgagatgctggcgggctacggcggcggtggccgcagcgtccatctctcctcccacaaggacctcctcctcggccgctgcggccggagcttcctcttcggcaacacgtggtttctcctctccacttacccggcgcgcctcctgcacaccacggaccgtcgcgctccctccgctttcgtcgccgccatcaaccgggtcccctgcgtgcggtcgcactgcacggggcagggcctgctgcagagaggcagcattgtcatggctgcctgcggctatgttcttaggcgaactgagctgggtgctgccaagcgccagcagccggataaggacccatctggcggaacacgcgcctcccgtattgcagccatggggtcactgggcagtgctgcgcggccagaggtgtctttcaggtacagggggctggagcattgtaagaagattggtgcaagcttgaaatgccgtgagccatgggggaatagtgcgttctggacaaatgccactgggccgggttggaagttgagctttacagttgagccatggactaaggactttagtacggcgtgtgcagcgccgtattctgctggagccacagaggatcaattgccgctcaatgagaagatgaatagctccactgttggaatgtccccagtttctgaaaaattgaagttgctctctggttcatgttacttgcctcaccctgctaaggaggcaactggtggtgaggatgcacatttcattagcattgatgagcatgtgataggcgtagcagatggtgttggtggttgggcagatctcggtgtcgatgctggactatatgctaaggagctaatgagaaattcaatgagcgctatcaaagatgagccagaagggaccattgatccaaccagagttttggaaaaggcttatattagtacgaaagcaagggggtcatctaccgcgtgtatcatcactcttaaagatcagggtatccatgctgtaaatcttggggatagtggtttcgtagtagtccgagatggccgcactgttctcaggtcaccctcacagcagcatgatttcaattttacttatcagcttgagagtggaggtggcagtgatcttcctagttccgcacaagtatttcactttccggttgccccgggtgatgttatcgttgctggcacggatggactatttgacaatttatacaacaatgagataagtggtgttattgttgaagctctccgggttggacttgagcctcagattgcagcacaaaaaattgccgccctggctcgacaaagagctacggacaaaaataggcagtcaccttttgcatcagctgctcaagaagctgggtaccggtattatggtgggaagcttgatgacataacagtcgtggtctcatatgtgaaaagcgctggagccccatgatctgagcctttcttttattagatgtaatgtacataaatcattgtcccgaactggcggcgtatgtatgcaccagggcatagaagcttattctcaaggtgtggaatcccctgatcctagaagcaccctgtgctgggttcagtatggttgtgctttagccctggaacatgttagcaaaccattgcaccattttacttgtttgccactgtgagaaatcattttctctaattatctgaactcctgaagccagggtgggtttgtttccccccttggagttggaggataatgaccagctgg

SEQ ID NO: 1844 - protein, 466 aa, Zea mays subsp. mays
  peptide (1)..(466): Ceres Seq. ID no. 12373567
  misc_feature (227)..(428): Pfam Name: Protein phosphatase 2C Pfam Description: Protein phosphatase 2C
  misc_feature (205)..(463): Homolog of NCBI NO: 25366932 NR Description: hypothetical protein dl4315c [imported] - thaliana >gi|5302796|emb|CAB46038.1| hypothetical protein thaliana] >gi|7268408|emb|CAB78700.1| hypothetical protein
  misc_feature (205)..(463): Homolog of NCBI NO: 30683717 NR Description: expressed protein [Arabidopsis thaliana] unknown protein [Arabidopsis thaliana]
  misc_feature (178)..(463): Homolog of NCBI NO: 15240071 NR Description: putative protein; protein id: At5g66720.1 thaliana] >gi|8843730|dbj|BAA97278.1| contains similarity to protein~emb|CAB46038.1~gene_id:MSN2.11 [Arabidopsis thaliana]
  misc_feature (195)..(461): Homolog of NCBI NO: 18418226 NR Description: putative protein; protein id: At4g33500.1, by cDNA: gi_15293236 [Arabidopsis thaliana] unknown protein [Arabidopsis thaliana]
  misc_feature (195)..(459): Homolog of NCBI NO: 7485658 NR Description: hypothetical protein F17M5.260 - Arabidopsis >gi|4490317|emb|CAB38808.1| putative protein [Arabidopsis >gi|7270298|emb|CAB80067.1| putative protein [Arabidopsis
  misc_feature (232)..(463): Homolog of NCBI NO: 37533570 NR Description: putative protein phosphatase 2C [Oryza sativa
  misc_feature (211)..(463): Homolog of NCBI NO: 18402284 NR Description: expressed protein; protein id: At2g30170.1, by cDNA: gi_13878070, supported by cDNA: gi_17104662 [Arabidopsis >gi|13878071|gb|AAK44113.1|AF370298_1 unknown protein
  misc_feature (212)..(466): Homolog of NCBI NO: 34896100 NR Description: B1189A09.35 [Oryza sativa (japonica
  misc_feature (237)..(460): Homolog of NCBI NO: 24640366 NR Description: CG15035-PA [Drosophila melanogaster]
  misc_feature (227)..(460): Homolog of NCBI NO: 24655293 NR Description: CG12091-PA [Drosophila melanogaster]
MLAGYGGGGRSVHLSSHKDLLLGRCGRSFLFGNTWFLLSTYPARLLHTTDRRAPSAFVAAINRVPCVRSHCTGQGLLQRGSIVMAACGYVLRRTELGAAKRQQPDKDPSGGTRASRIAAMGSLGSAARPEVSFRYRGLEHCKKIGASLKCREPWGNSAFWTNATGPGWKLSFTVEPWTKDFSTACAAPYSAGATEDQLPLNEKMNSSTVGMSPVSEKLKLLSGSCYLPHPAKEATGGEDAHFISIDEHVIGVADGVGGWADLGVDAGLYAKELMRNSMSAIKDEPEGTIDPTRVLEKAYISTKARGSSTACIITLKDQGIHAVNLGDSGFVVVRDGRTVLRSPSQQHDFNFTYQLESGGGSDLPSSAQVFHFPVAPGDVIVAGTDGLFDNLYNNEISGVIVEALRVGLEPQIAAQKIAALARQRATDKNRQSPFASAAQEAGYRYYGGKLDDITVVVSYVKSAGAP

SEQ ID NO: 1845 - protein, 383 aa, Zea mays subsp. mays
  peptide (1)..(383): Ceres Seq. ID no. 12373568
  misc_feature (144)..(345): Pfam Name: Protein phosphatase 2C Pfam Description: Protein phosphatase 2C
  misc_feature (122)..(380): Homolog of NCBI NO: 25366932 NR Description: hypothetical protein dl4315c [imported] - thaliana >gi|5302796|emb|CAB46038.1| hypothetical protein thaliana] >gi|7268408|emb|CAB78700.1| hypothetical protein
  misc_feature (122)..(380): Homolog of NCBI NO: 30683717 NR Description: expressed protein [Arabidopsis thaliana] unknown protein [Arabidopsis thaliana]
  misc_feature (95)..(380): Homolog of NCBI NO: 15240071 NR Description: putative protein; protein id: At5g66720.1 thaliana] >gi|8843730|dbj|BAA97278.1| contains similarity to protein~emb|CAB46038.1~gene_id:MSN2.11 [Arabidopsis thaliana]
  misc_feature (112)..(378): Homolog of NCBI NO: 18418226 NR Description: putative protein; protein id: At4g33500.1, by cDNA: gi_15293236 [Arabidopsis thaliana] unknown protein [Arabidopsis thaliana]
  misc_feature (112)..(376): Homolog of NCBI NO: 7485658 NR Description: hypothetical protein F17M5.260 - Arabidopsis >gi|4490317|emb|CAB38808.1| putative protein [Arabidopsis >gi|7270298|emb|CAB80067.1| putative protein [Arabidopsis
  misc_feature (149)..(380): Homolog of NCBI NO: 37533570 NR Description: putative protein phosphatase 2C [Oryza sativa
  misc_feature (128)..(380): Homolog of NCBI NO: 18402284 NR Description: expressed protein; protein id: At2g30170.1, by cDNA: gi_13878070, supported by cDNA: gi_17104662 [Arabidopsis >gi|13878071|gb|AAK44113.1|AF370298_1 unknown protein
  misc_feature (129)..(383): Homolog of NCBI NO: 34896100 NR Description: B1189A09.35 [Oryza sativa (japonica
  misc_feature (154)..(377): Homolog of NCBI NO: 24640366 NR Description: CG15035-PA [Drosophila melanogaster]
  misc_feature (144)..(377): Homolog of NCBI NO: 24655293 NR Description: CG12091-PA [Drosophila melanogaster]
MAACGYVLRRTELGAAKRQQPDKDPSGGTRASRIAAMGSLGSAARPEVSFRYRGLEHCKKIGASLKCREPWGNSAFWTNATGPGWKLSFTVEPWTKDFSTACAAPYSAGATEDQLPLNEKMNSSTVGMSPVSEKLKLLSGSCYLPHPAKEATGGEDAHFISIDEHVIGVADGVGGWADLGVDAGLYAKELMRNSMSAIKDEPEGTIDPTRVLEKAYISTKARGSSTACIITLKDQGIHAVNLGDSGFVVVRDGRTVLRSPSQQHDFNFTYQLESGGGSDLPSSAQVFHFPVAPGDVIVAGTDGLFDNLYNNEISGVIVEALRVGLEPQIAAQKIAALARQRATDKNRQSPFASAAQEAGYRYYGGKLDDITVVVSYVKSAGAP

SEQ ID NO: 1846 - protein, 347 aa, Zea mays subsp. mays
  peptide (1)..(347): Ceres Seq. ID no. 12373569
  misc_feature (108)..(309): Pfam Name: Protein phosphatase 2C Pfam Description: Protein phosphatase 2C
  misc_feature (86)..(344): Homolog of NCBI NO: 25366932 NR Description: hypothetical protein dl4315c [imported] - thaliana >gi|5302796|emb|CAB46038.1| hypothetical protein thaliana] >gi|7268408|emb|CAB78700.1| hypothetical protein
  misc_feature (86)..(344): Homolog of NCBI NO: 30683717 NR Description: expressed protein [Arabidopsis thaliana] unknown protein [Arabidopsis thaliana]
  misc_feature (59)..(344): Homolog of NCBI NO: 15240071 NR Description: putative protein; protein id: At5g66720.1 thaliana] >gi|8843730|dbj|BAA97278.1| contains similarity to protein~emb|CAB46038.1~gene_id:MSN2.11 [Arabidopsis thaliana]
  misc_feature (76)..(342): Homolog of NCBI NO: 18418226 NR Description: putative protein; protein id: At4g33500.1, by cDNA: gi_15293236 [Arabidopsis thaliana] unknown protein [Arabidopsis thaliana]
  misc_feature (76)..(340): Homolog of NCBI NO: 7485658 NR Description: hypothetical protein F17M5.260 - Arabidopsis >gi|4490317|emb|CAB38808.1| putative protein [Arabidopsis >gi|7270298|emb|CAB80067.1| putative protein [Arabidopsis
  misc_feature (113)..(344): Homolog of NCBI NO: 37533570 NR Description: putative protein phosphatase 2C [Oryza sativa
  misc_feature (92)..(344): Homolog of NCBI NO: 18402284 NR Description: expressed protein; protein id: At2g30170.1, by cDNA: gi_13878070, supported by cDNA: gi_17104662 [Arabidopsis >gi|13878071|gb|AAK44113.1|AF370298_1 unknown protein
  misc_feature (93)..(347): Homolog of NCBI NO: 34896100 NR Description: B1189A09.35 [Oryza sativa (japonica
  misc_feature (118)..(341): Homolog of NCBI NO: 24640366 NR Description: CG15035-PA [Drosophila melanogaster]
  misc_feature (108)..(341): Homolog of NCBI NO: 24655293 NR Description: CG12091-PA [Drosophila melanogaster]
MGSLGSAARPEVSFRYRGLEHCKKIGASLKCREPWGNSAFWTNATGPGWKLSFTVEPWTKDFSTACAAPYSAGATEDQLPLNEKMNSSTVGMSPVSEKLKLLSGSCYLPHPAKEATGGEDAHFISIDEHVIGVADGVGGWADLGVDAGLYAKELMRNSMSAIKDEPEGTIDPTRVLEKAYISTKARGSSTACIITLKDQGIHAVNLGDSGFVVVRDGRTVLRSPSQQHDFNFTYQLESGGGSDLPSSAQVFHFPVAPGDVIVAGTDGLFDNLYNNEISGVIVEALRVGLEPQIAAQKIAALARQRATDKNRQSPFASAAQEAGYRYYGGKLDDITVVVSYVKSAGAP

SEQ ID NO: 1847 - DNA, 1692 bp, Zea mays subsp. mays
  misc_feature (1)..(1692): Ceres Seq. ID no. 12410974
  misc_feature: MA Experiment ID: 108535 Result: Down-regulated in Transcription
  misc_feature: MA Experiment 108535 PARAMETER Experiment Name: Zm_Meristem_P Parameter: Age (day) Value: 8
  misc_feature: MA Experiment 108535 PARAMETER Experiment Name: Zm_Meristem_P Parameter: Organism Value: Zea mays
  misc_feature: MA Experiment 108535 PARAMETER Experiment Name: Zm_Meristem_P Parameter: Plant Line Value: 35A19
  misc_feature: MA Experiment 108535 PARAMETER Experiment Name: Zm_Meristem_P Parameter: Tissue Value: Root Meristem vs. Above Root Meristem
  misc_feature: MA Experiment ID: 20000477 Result: Down-regulated in Transcription
  misc_feature: MA Experiment 20000477 PARAMETER Experiment Name: Zm_5mM_SA_P Parameter: Age (day) Value: 10
  misc_feature: MA Experiment 20000477 PARAMETER Experiment Name: Zm_5mM_SA_P Parameter: Organism Value: Zea mays
  misc_feature: MA Experiment 20000477 PARAMETER Experiment Name: Zm_5mM_SA_P Parameter: Plant Line Value: 35A19
  misc_feature: MA Experiment 20000477 PARAMETER Experiment Name: Zm_5mM_SA_P Parameter: Timepoint (hr) Value: 48
  misc_feature: MA Experiment 20000477 PARAMETER Experiment Name: Zm_5mM_SA_P Parameter: Tissue Value: Aerial
  misc_feature: MA Experiment 20000477 PARAMETER Experiment Name: Zm_5mM_SA_P Parameter: Treatment Value: 5mM SA vs. No Treatment
  misc_feature: MA Experiment ID: 20000492 Result: Down-regulated in Transcription
  misc_feature: MA Experiment 20000492 PARAMETER Experiment Name: Zm_Hybrid_Seed_Dev_P Parameter: DAP Value: 12
  misc_feature: MA Experiment 20000492 PARAMETER Experiment Name: Zm_Hybrid_Seed_Dev_P Parameter: Organism Value: Zea mays
  misc_feature: MA Experiment 20000492 PARAMETER Experiment Name: Zm_Hybrid_Seed_Dev_P Parameter: Plant Line Value: 35A19
  misc_feature: MA Experiment 20000492 PARAMETER Experiment Name: Zm_Hybrid_Seed_Dev_P Parameter: Tissue Value: Fert Kernel vs. Unfert Floret
atcaacgacagtcgacagttgcagtgcagccggtgagcttagatgacgcgcgtcccctaaaagcaggatctggcataaggctacgtgctggtttacagttacagctcaggcttaccatttctttaaccaattcgcttcttgttctttaaaagttcagagttcaagagttcagtttagagagagagagagggagagtgatttgccgacttgccagttgccgcacaaagctcctctagcacctctgtgtggccgacttgtccccggtatcaccaagtctgcaggcctccccagtcgtcgccggcgagggaacgcgccgcccgtgacgccgcgggttgttggcgccggcgttgaggccacaagcgcgccagcatcaggacctcacaggtgattcaatcctgaaggcatcaactatgttcaattttcaagaaatgtcttgctgttttacgtgtgcgacgggcatggaacgaaataatgaaaacgaaggaggaagcaaggtgaggattttttcctacagtgagatgaggaaagctacgcatgattttagtggagcaaacaagattggcgagggcggtttcggctccgttttcagggggaagcttaaagatggaacgatcgtcgcggtgaaagtcctttctgctaattcaaggcagggtgttcgagagttcgtaaccgaacttacagcaatttcagatatcgtgcatgaaaacctaattacattggttggttgctgtgccgaagggtcccagaggattcttgtgtacaattatctcgagaacaatagtctttcatatacacttctaggttcgggccggagcaacattcggttcaactggagagcccgtgtcaagattgctgtaggcgttgctcgtgggcttgcttatcttcacgatggaattcggccccctataattcatcgagatataaaggcgagcaacattctccttgacaaggacctcaccccaaagatctctgatttcgggctggcaaggctcctccccccaaacgcaactcatgtgagcactagggttgcaggaacaataggatacctggctcctgaatacgctgtgagggggcaagtgacgaagaaatcggatatctatagtttcggcgttttgctactggaaattgttgctggtagatgtaactacaacagtagattgcctcagggagaccagtttctgcttgagaagacatgggcatactacgtgcagggaaagctagagaaggtcatagacgccgaagcaggggaggacctgaacgtcgaggaggcatgccgtttcttgaaggttggcctactatgcgcccaagacgcgatgaagctgcgtccgaacatggccagcgtcgtcctgatgctgataggagagaagggaatctccgtggacaggatcaccaagccagccgtgatcggtgacccgtacctcgaccggaggccaagcaacgcagactctaccacgatgaagtccttcgccacgaccgaagctttaacgtcatcagaggcaaacacggagtggtctctgtgatggggggaaaaaacgtcatcatcgatggagatttgtttttgtggatgctgcagttgccaaacaaataccgcatcgcttctgttgattatgtttgtttgttatttttgtgtgtgtgtatatatacttgaaatggaaccacgggagtgaaacgaggattgaatatgctttaccc

SEQ ID NO: 1848 - protein, 369 aa, Zea mays subsp. mays
  peptide (1)..(369): Ceres Seq. ID no. 12410975
  misc_feature (18)..(331): Homolog of NCBI NO: 18398327 NR Description: putative receptor ser/thr protein kinase
  misc_feature (18)..(331): Homolog of NCBI NO: 5923666 NR Description: putative receptor ser/thr protein kinase
  misc_feature (23)..(366): Homolog of NCBI NO: 34901978 NR Description: putative receptor ser/thr protein
  misc_feature (29)..(365): Homolog of NCBI NO: 38344039 NR Description: OSJNBb0017I01.6 [Oryza sativa (japonica
  misc_feature (29)..(338): Homolog of NCBI NO: 25287648 NR Description: hypothetical protein F19K19.4 [imported] -
  misc_feature (7)..(338): Homolog of NCBI NO: 18394385 NR Description: receptor-like serine/threonine kinase, putative
  misc_feature (61)..(369): Homolog of NCBI NO: 5679843 NR Description: Putitive Ser/Thr protein kinase
  misc_feature (23)..(148): Homolog of NCBI NO: 5852099 NR Description: zwh22.1 [Oryza sativa (indica cultivar-group)]
  misc_feature (171)..(344): Homolog of NCBI NO: 5852099 NR Description: zwh22.1 [Oryza sativa (indica cultivar-group)]
  misc_feature (7)..(369): Homolog of NCBI NO: 38344329 NR Description: OSJNBa0058K23.11 [Oryza sativa (japonica
MFNFQEMSCCFTCATGMERNNENEGGSKVRIFSYSEMRKATHDFSGANKIGEGGFGSVFRGKLKDGTIVAVKVLSANSRQGVREFVTELTAISDIVHENLITLVGCCAEGSQRILVYNYLENNSLSYTLLGSGRSNIRFNWRARVKIAVGVARGLAYLHDGIRPPIIHRDIKASNILLDKDLTPKISDFGLARLLPPNATHVSTRVAGTIGYLAPEYAVRGQVTKKSDIYSFGVLLLEIVAGRCNYNSRLPQGDQFLLEKTWAYYVQGKLEKVIDAEAGEDLNVEEACRFLKVGLLCAQDAMKLRPNMASVVLMLIGEKGISVDRITKPAVIGDPYLDRRPSNADSTTMKSFATTEALTSSEANTEWSL

SEQ ID NO: 1849 - protein, 363 aa, Zea mays subsp. mays
  peptide (1)..(363): Ceres Seq. ID no. 12410976
  misc_feature (12)..(325): Homolog of NCBI NO: 18398327 NR Description: putative receptor ser/thr protein kinase
  misc_feature (12)..(325): Homolog of NCBI NO: 5923666 NR Description: putative receptor ser/thr protein kinase
  misc_feature (17)..(360): Homolog of NCBI NO: 34901978 NR Description: putative receptor ser/thr protein
  misc_feature (23)..(359): Homolog of NCBI NO: 38344039 NR Description: OSJNBb0017I01.6 [Oryza sativa (japonica
  misc_feature (23)..(332): Homolog of NCBI NO: 25287648 NR Description: hypothetical protein F19K19.4 [imported] -
  misc_feature (1)..(332): Homolog of NCBI NO: 18394385 NR Description: receptor-like serine/threonine kinase, putative
  misc_feature (55)..(363): Homolog of NCBI NO: 5679843 NR Description: Putitive Ser/Thr protein kinase
  misc_feature (17)..(142): Homolog of NCBI NO: 5852099 NR Description: zwh22.1 [Oryza sativa (indica cultivar-group)]
  misc_feature (165)..(338): Homolog of NCBI NO: 5852099 NR Description: zwh22.1 [Oryza sativa (indica cultivar-group)]
  misc_feature (1)..(363): Homolog of NCBI NO: 38344329 NR Description: OSJNBa0058K23.11 [Oryza sativa (japonica
MSCCFTCATGMERNNENEGGSKVRIFSYSEMRKATHDFSGANKIGEGGFGSVFRGKLKDGTIVAVKVLSANSRQGVREFVTELTAISDIVHENLITLVGCCAEGSQRILVYNYLENNSLSYTLLGSGRSNIRFNWRARVKIAVGVARGLAYLHDGIRPPIIHRDIKASNILLDKDLTPKISDFGLARLLPPNATHVSTRVAGTIGYLAPEYAVRGQVTKKSDIYSFGVLLLEIVAGRCNYNSRLPQGDQFLLEKTWAYYVQGKLEKVIDAEAGEDLNVEEACRFLKVGLLCAQDAMKLRPNMASVVLMLIGEKGISVDRITKPAVIGDPYLDRRPSNADSTTMKSFATTEALTSSEANTEWSL

SEQ ID NO: 1850 - protein, 353 aa, Zea mays subsp. mays
  peptide (1)..(353): Ceres Seq. ID no. 12410977
  misc_feature (2)..(315): Homolog of NCBI NO: 18398327 NR Description: putative receptor ser/thr protein kinase
  misc_feature (2)..(315): Homolog of NCBI NO: 5923666 NR Description: putative receptor ser/thr protein kinase
  misc_feature (7)..(350): Homolog of NCBI NO: 34901978 NR Description: putative receptor ser/thr protein
  misc_feature (13)..(349): Homolog of NCBI NO: 38344039 NR Description: OSJNBb0017I01.6 [Oryza sativa (japonica
  misc_feature (13)..(322): Homolog of NCBI NO: 25287648 NR Description: hypothetical protein F19K19.4 [imported] -
  misc_feature (1)..(322): Homolog of NCBI NO: 18394385 NR Description: receptor-like serine/threonine kinase, putative
  misc_feature (45)..(353): Homolog of NCBI NO: 5679843 NR Description: Putitive Ser/Thr protein kinase
  misc_feature (7)..(132): Homolog of NCBI NO: 5852099 NR Description: zwh22.1 [Oryza sativa (indica cultivar-group)]
  misc_feature (155)..(328): Homolog of NCBI NO: 5852099 NR Description: zwh22.1 [Oryza sativa (indica cultivar-group)]
  misc_feature (1)..(353): Homolog of NCBI NO: 38344329 NR Description: OSJNBa0058K23.11 [Oryza sativa (japonica
MERNNENEGGSKVRIFSYSEMRKATHDFSGANKIGEGGFGSVFRGKLKDGTIVAVKVLSANSRQGVREFVTELTAISDIVHENLITLVGCCAEGSQRILVYNYLENNSLSYTLLGSGRSNIRFNWRARVKIAVGVARGLAYLHDGIRPPIIHRDIKASNILLDKDLTPKISDFGLARLLPPNATHVSTRVAGTIGYLAPEYAVRGQVTKKSDIYSFGVLLLEIVAGRCNYNSRLPQGDQFLLEKTWAYYVQGKLEKVIDAEAGEDLNVEEACRFLKVGLLCAQDAMKLRPNMASVVLMLIGEKGISVDRITKPAVIGDPYLDRRPSNADSTTMKSFATTEALTSSEANTEWSL

SEQ ID NO: 1851 - DNA, 1533 bp, Zea mays subsp. mays
  misc_feature (1)..(1533): Ceres Seq. ID no. 13494573
  misc_feature: MA Experiment ID: 108535 Result: Up-regulated in Transcription
  misc_feature: MA Experiment 108535 PARAMETER Experiment Name: Zm_Meristem_P Parameter: Age (day) Value: 8
  misc_feature: MA Experiment 108535 PARAMETER Experiment Name: Zm_Meristem_P Parameter: Organism Value: Zea mays
  misc_feature: MA Experiment 108535 PARAMETER Experiment Name: Zm_Meristem_P Parameter: Plant Line Value: 35A19
  misc_feature: MA Experiment 108535 PARAMETER Experiment Name: Zm_Meristem_P Parameter: Tissue Value: Root Meristem vs. Above Root Meristem
  misc_feature: MA Experiment ID: 108544 Result: Down-regulated in Transcription
  misc_feature: MA Experiment ID: 20000478 Result: Down-regulated in Transcription
  misc_feature: MA Experiment 20000478 PARAMETER Experiment Name: Zm_5mM_SA_P Parameter: Age (day) Value: 11
  misc_feature: MA Experiment 20000478 PARAMETER Experiment Name: Zm_5mM_SA_P Parameter: Organism Value: Zea mays
  misc_feature: MA Experiment 20000478 PARAMETER Experiment Name: Zm_5mM_SA_P Parameter: Plant Line Value: 35A19
  misc_feature: MA Experiment 20000478 PARAMETER Experiment Name: Zm_5mM_SA_P Parameter: Timepoint (hr) Value: 72
  misc_feature: MA Experiment 20000478 PARAMETER Experiment Name: Zm_5mM_SA_P Parameter: Tissue Value: Aerial
  misc_feature: MA Experiment 20000478 PARAMETER Experiment Name: Zm_5mM_SA_P Parameter: Treatment Value: 5mM SA vs. No Treatment
  misc_feature: MA Experiment ID: 20000480 Result: Down-regulated in Transcription
  misc_feature: MA Experiment 20000480 PARAMETER Experiment Name: Zm_Drought_P Parameter: Age (day) Value: 11
  misc_feature: MA Experiment 20000480 PARAMETER Experiment Name: Zm_Drought_P Parameter: Organism Value: Zea mays
  misc_feature: MA Experiment 20000480 PARAMETER Experiment Name: Zm_Drought_P Parameter: Plant Line Value: 35A19
  misc_feature: MA Experiment 20000480 PARAMETER Experiment Name: Zm_Drought_P Parameter: Timepoint (hr) Value: 72
  misc_feature: MA Experiment 20000480 PARAMETER Experiment Name: Zm_Drought_P Parameter: Tissue Value: Aerial
  misc_feature: MA Experiment 20000480 PARAMETER Experiment Name: Zm_Drought_P Parameter: Treatment Value: Drought vs. No Drought
  misc_feature: MA Experiment ID: 20000488 Result: Up-regulated in Transcription
  misc_feature: MA Experiment 20000488 PARAMETER Experiment Name: Zm_50mM_NH4NO3_L_to_H_P Parameter: Organism Value: Zea mays
  misc_feature: MA Experiment 20000488 PARAMETER Experiment Name: Zm_50mM_NH4NO3_L_to_H_P Parameter: Timepoint (hr) Value: 8
  misc_feature: MA Experiment 20000488 PARAMETER Experiment Name: Zm_50mM_NH4NO3_L_to_H_P Parameter: Tissue Value: Leaves
  misc_feature: MA Experiment 20000488 PARAMETER Experiment Name: Zm_50mM_NH4NO3_L_to_H_P Parameter: Treatment Value: 50mM NH4NO3 vs. 100mM Mannitol
aatctcagttgtccttgtcccctcgaacgcgcactgttcaaacaaaccctccactgccctccccactctccccttcaccgcgccgcactcccaagtcccaactcccaacaggcctaaatggcggcggccggaacaattcccggcgccgccgcagccattggcgcttctgtgtcccaacgccaacgtcgcgtcggcgctccttctttcgtagctgcctacgtctccgagggcacccgcctcgtctgccggaggcagctccgtccggctccggtcctcgcttcttccttcatctccctttctcatccagcgaggcggcggttcctctgcgatgctgcggccggagcctcctcaggtcccgctggagaagccaagccccagggatttgcagagagatacccagctcttgtcacaggtttcttcttcttcttgtggtattttctgaatgtaatatttaacatcctcaacaagaagatcttcgactacttcccctatccatattttgtgtcagtgagccatctttttattggagtactatactgccttattggctggagcttcggcatcccaaagcgcgcgccaatcaactcaacacttctgaagcagcttgttccagttgcggtttgccatgccattggccatgtaacaagcactgtgtcatttgctgctgtagctgtgtcatttgcccacactattaaagctctcgagccattcttcaatgcggctgcttcccagtttatccttggacaaccagttccattgacactctggctgtctcttgttccagtggtgattggtgtctcggtagcatccctcactgaactctcatttaattggactggcttcattaatgccatgatctcaaatatttctttcacctaccgaagcatctattctaagaaggctatgactgacatggatagtaccaacttgtatgcatacatatcaataattgctctctttgtctgcatcccccctgcaattattattgaaggacctcaattagtgcagcatggttttaaagatgcaattgccaaagttggattaacaaagttgatttctaatttttttgtggtgggcttattctatcacctttataaccaggttgctacaaacacattggagcgggtagcccctttaacacatgccatcggcaatgtgttgaaacgtgttttcgtcattggcttttccatcatcgcattcggcaacaagatcaccacacagactggaattggcacttccattgctgtttctggtgttgccctctactcatttataaaggctaagattgaggagaaaaagcaaataaagagtgcataaggtgttggctgatgtggatgcggttggtttgtcgctttgatggacctctattctctcggtgaacgaacaaacttgcaagatggataaaatcttgctatctcctagtacatttgattgttattcccagtctggtactgaggtgtgcggttgttgttggctaacttgtttatttgaagcaaatttgagcaatgctcagtggcatggaatttccattcc

SEQ ID NO: 1852 - protein, 399 aa, Zea mays subsp. mays
  peptide (1)..(399): Ceres Seq. ID no. 13494574
  misc_feature (35)..(399): Homolog of NCBI NO: 117290 NR Description: TRIOSE PHOSPHATE/PHOSPHATE TRANSLOCATOR,
  misc_feature (11)..(399): Homolog of NCBI NO: 9295273 NR Description: triose phosphate/phosphate translocator precursor
  misc_feature (7)..(399): Homolog of NCBI NO: 30694881 NR Description: phosphate/triose-phosphate translocator, putative
  misc_feature (35)..(398): Homolog of NCBI NO: 117291 NR Description: TRIOSE PHOSPHATE/PHOSPHATE TRANSLOCATOR,
  misc_feature (7)..(399): Homolog of NCBI NO: 21593093 NR Description: phosphate/triose-phosphate translocator precursor
  misc_feature (7)..(398): Homolog of NCBI NO: 9757731 NR Description: phosphate/triose-phosphate translocator precursor
  misc_feature (1)..(399): Homolog of NCBI NO: 13518113 NR Description: triose phosphate/phosphate translocator [Oryza
  misc_feature (1)..(399): Homolog of NCBI NO: 13195734 NR Description: triose phosphate translocator [Triticum aestivum]
  misc_feature (1)..(399): Homolog of NCBI NO: 34904488 NR Description: putative triose phosphate/phosphate translocator
  misc_feature (1)..(399): Homolog of NCBI NO: 1352200 NR Description: TRIOSE PHOSPHATE/PHOSPHATE TRANSLOCATOR,
MAAAGTIPGAAAAIGASVSQRQRRVGAPSFVAAYVSEGTRLVCRRQLRPAPVLASSFISLSHPARRRFLCDAAAGASSGPAGEAKPQGFAERYPALVTGFFFFLWYFLNVIFNILNKKIFDYFPYPYFVSVSHLFIGVLYCLIGWSFGIPKRAPINSTLLKQLVPVAVCHAIGHVTSTVSFAAVAVSFAHTIKALEPFFNAAASQFILGQPVPLTLWLSLVPVVIGVSVASLTELSFNWTGFINAMISNISFTYRSIYSKKAMTDMDSTNLYAYISIIALFVCIPPAIIIEGPQLVQHGFKDAIAKVGLTKLISNFFVVGLFYHLYNQVATNTLERVAPLTHAIGNVLKRVFVIGFSIIAFGNKITTQTGIGTSIAVSGVALYSFIKAKIEEKKQIKSA

SEQ ID NO: 1853 - DNA, 1697 bp, Zea mays subsp. mays
  misc_feature (1)..(1697): Ceres Seq. ID no. 12355964
  misc_feature: MA Experiment ID: 108544 Result: Down-regulated in Transcription
atactgcgcgttgcaagctcccacttcctgaggaacaggaactccatgagatccgcggcatccgccgtcccgttcatctgcacaaaaagaccgtaatccttctttttcctctcctccccatccgcggagtgtaaatcgtctctcgctagcgcgttcagtagaaaccctaaaccccgcctcctcccctcgccggggtaggggctacgggtgtcaacgcccgccatggacgcattccggaagcaactggatgtgctcatgggcgctaaccgcaacggcgacgtcgaggaggtgagccgcaactactacgaccgcgacgtctgccggctcttcctcgccggcctttgcccccacgacctcttccagctcacgaaaatggatcttggtccttgttctaagattcactcgcttcaactgcggaaagattatgaagaagcgaaagcaaagggaacagagaattttgacagagaactcgaggatatgatagaaaggctcattgtggagtgcgacaggaaaattcagagggccctgaaacgacttgcggatgacgatgccaaggctgctattgcgatatccgtctcggaggttactctgacggatgacatactgcagctgtcaaaacagatcaaggaaaaaatggtagaagttgatgcctttgattttgaagggagaactgatgataaaataaaggcccaggaagtagtggaagaactcagaactaaaagagctgatatgcaggctaccctcttgcttgatgcttttaacaaggacagagcttcattaactcagcctgctcaacctcctcaagtgacggcagcgccaccaccagctccacccgatgctcgtactcaagaaatgatcaatgaaaagcttaagaaagctgaagagcttggggaacaaggcatggttgatgaagctcagaaagctttggaagaggcagaagctctgaaaaagctggcgcgacgtccggagccaccttcagacccttctaaatatactgccgctgatgtttggattaccgatcaaaagttgcgcctctgtgatatatgtggagcatttctgagtgtatatgacaatgatcgacgtcttgctgaccattttggagggaaactgcatctaggctacatgctgattcgtgacaaacagaaagaacttcaggagcagagaaacaaaaggaggacaggcaaaactgaagatgataggcgatctagagagcagagcaaggatcgaaacggcccgccgtccagggatagagattcagaaaggagagacagggttgagtctcgagatggaagaagagattatgatagggaacgcgataggcgtcacgatagggaccgtcgccatgaccgcgaccgggatagggattatgaccgctcccgcggatatgactcaaggagaagagagcgttcacgctccagggagcgcagcaggcgccatgagagatactaaatgttactccatggctgacagattttggattgctggcgtctgttctggtttgtgttgtgctttgtgtcttatcttccgaagtttcctgttcctgctcgagaaatccgaaagccaatctgcgttctgcatcatgtcatgtcctagtgtcgtactgtttagttatatgccaagaacatctctttcatcaaatgaatatttggaaacaccaacgcacttgacgctaaatgggaatgaagtgtggagtattt

SEQ ID NO: 1854 - protein, 408 aa, Zea mays subsp. mays
  peptide (1)..(408): Ceres Seq. ID no. 12355965
  misc_feature (1)..(350): Pfam Name: LUC7 N_terminus Pfam Description: LUC7 N_terminus
  misc_feature (181)..(407): Homolog of NCBI NO: 21536228 NR Description: Luc7 homolog (S. cerevisiae)-like
  misc_feature (181)..(407): Homolog of NCBI NO: 8346914 NR Description: SR+89 [Homo sapiens]
  misc_feature (170)..(408): Homolog of NCBI NO: 31222227 NR Description: ENSANGP00000018276 [Anopheles gambiae]
  misc_feature (1)..(387): Homolog of NCBI NO: 24640172 NR Description: CG3198-PA [Drosophila melanogaster]
  misc_feature (98)..(408): Homolog of NCBI NO: 6017114 NR Description: unknown protein [Arabidopsis thaliana]
  misc_feature (73)..(407): Homolog of NCBI NO: 11357938 NR Description: hypothetical protein K3M16_10 - Arabidopsis
  misc_feature (51)..(408): Homolog of NCBI NO: 21595481 NR Description: unknown [Arabidopsis thaliana]
  misc_feature (1)..(408): Homolog of NCBI NO: 30678827 NR Description: expressed protein [Arabidopsis thaliana]
  misc_feature (1)..(407): Homolog of NCBI NO: 18418301 NR Description: putative protein
  misc_feature (1)..(408): Homolog of NCBI NO: 29367401 NR Description: sarcoplasmic reticulum protein-like protein
MDAFRKQLDVLMGANRNGDVEEVSRNYYDRDVCRLFLAGLCPHDLFQLTKMDLGPCSKIHSLQLRKDYEEAKAKGTENFDRELEDMIERLIVECDRKIQRALKRLADDDAKAAIAISVSEVTLTDDILQLSKQIKEKMVEVDAFDFEGRTDDKIKAQEVVEELRTKRADMQATLLLDAFNKDRASLTQPAQPPQVTAAPPPAPPDARTQEMINEKLKKAEELGEQGMVDEAQKALEEAEALKKLARRPEPPSDPSKYTAADVWITDQKLRLCDICGAFLSVYDNDRRLADHFGGKLHLGYMLIRDKQKELQEQRNKRRTGKTEDDRRSREQSKDRNGPPSRDRDSERRDRVESRDGRRDYDRERDRRHDRDRRHDRDRDRDYDRSRGYDSRRRERSRSRERSRRHERY

SEQ ID NO: 1855 - protein, 397 aa, Zea mays subsp. mays
  peptide (1)..(397): Ceres Seq. ID no. 12355966
  misc_feature (1)..(339): Pfam Name: LUC7 N_terminus Pfam Description: LUC7 N_terminus
  misc_feature (1)..(397): Homolog of NCBI NO: 29367401 NR Description: sarcoplasmic reticulum protein-like protein
  misc_feature (170)..(396): Homolog of NCBI NO: 21706650 NR Description: Similar to Luc7 homolog (S. cerevisiae)-like [Mus
  misc_feature (170)..(396): Homolog of NCBI NO: 8346914 NR Description: SR+89 [Homo sapiens]
  misc_feature (159)..(397): Homolog of NCBI NO: 31222227 NR Description: ENSANGP00000018276 [Anopheles gambiae]
  misc_feature (1)..(376): Homolog of NCBI NO: 24640172 NR Description: CG3198-PA [Drosophila melanogaster]
  misc_feature (87)..(397): Homolog of NCBI NO: 6017114 NR Description: unknown protein [Arabidopsis thaliana]
  misc_feature (62)..(396): Homolog of NCBI NO: 11357938 NR Description: hypothetical protein K3M16_10 - Arabidopsis
  misc_feature (40)..(397): Homolog of NCBI NO: 21595481 NR Description: unknown [Arabidopsis thaliana]
  misc_feature (1)..(397): Homolog of NCBI NO: 30678827 NR Description: expressed protein [Arabidopsis thaliana]
  misc_feature (1)..(396): Homolog of NCBI NO: 18418301 NR Description: putative protein
MGANRNGDVEEVSRNYYDRDVCRLFLAGLCPHDLFQLTKMDLGPCSKIHSLQLRKDYEEAKAKGTENFDRELEDMIERLIVECDRKIQRALKRLADDDAKAAIAISVSEVTLTDDILQLSKQIKEKMVEVDAFDFEGRTDDKIKAQEVVEELRTKRADMQATLLLDAFNKDRASLTQPAQPPQVTAAPPPAPPDARTQEMINEKLKKAEELGEQGMVDEAQKALEEAEALKKLARRPEPPSDPSKYTAADVWITDQKLRLCDICGAFLSVYDNDRRLADHFGGKLHLGYMLIRDKQKELQEQRNKRRTGKTEDDRRSREQSKDRNGPPSRDRDSERRDRVESRDGRRDYDRERDRRHDRDRRHDRDRDRDYDRSRGYDSRRRERSRSRERSRRHERY

SEQ ID NO: 1856 - protein, 358 aa, Zea mays subsp. mays
  peptide (1)..(358): Ceres Seq. ID no. 12355967
  misc_feature (1)..(300): Pfam Name: LUC7 N_terminus Pfam Description: LUC7 N_terminus
  misc_feature (131)..(357): Homolog of NCBI NO: 8922297 NR Description: LUC7-like; sarcoplasmic reticulum protein LUC7B1
  misc_feature (131)..(357): Homolog of NCBI NO: 8346914 NR Description: SR+89 [Homo sapiens]
  misc_feature (120)..(358): Homolog of NCBI NO: 31222227 NR Description: ENSANGP00000018276 [Anopheles gambiae]
  misc_feature (1)..(337): Homolog of NCBI NO: 24640172 NR Description: CG3198-PA [Drosophila melanogaster]
  misc_feature (48)..(358): Homolog of NCBI NO: 6017114 NR Description: unknown protein [Arabidopsis thaliana]
  misc_feature (23)..(357): Homolog of NCBI NO: 11357938 NR Description: hypothetical protein K3M16_10 - Arabidopsis
  misc_feature (1)..(358): Homolog of NCBI NO: 21595481 NR Description: unknown [Arabidopsis thaliana]
  misc_feature (1)..(358): Homolog of NCBI NO: 30678827 NR Description: expressed protein [Arabidopsis thaliana]
  misc_feature (1)..(357): Homolog of NCBI NO: 18418301 NR Description: putative protein
  misc_feature (1)..(358): Homolog of NCBI NO: 29367401 NR Description: sarcoplasmic reticulum protein-like protein
MDLGPCSKIHSLQLRKDYEEAKAKGTENFDRELEDMIERLIVECDRKIQRALKRLADDDAKAAIAISVSEVTLTDDILQLSKQIKEKMVEVDAFDFEGRTDDKIKAQEVVEELRTKRADMQATLLLDAFNKDRASLTQPAQPPQVTAAPPPAPPDARTQEMINEKLKKAEELGEQGMVDEAQKALEEAEALKKLARRPEPPSDPSKYTAADVWITDQKLRLCDICGAFLSVYDNDRRLADHFGGKLHLGYMLIRDKQKELQEQRNKRRTGKTEDDRRSREQSKDRNGPPSRDRDSERRDRVESRDGRRDYDRERDRRHDRDRRHDRDRDRDYDRSRGYDSRRRERSRSRERSRRHERY

SEQ ID NO: 1857 - DNA, 1482 bp, Zea mays subsp. mays
  misc_feature (1)..(1482): Ceres Seq. ID no. 12410966
  misc_feature: MA Experiment ID: 108543 Result: Down-regulated in Transcription
ggaccgacatgttactttaccctaaacctttgcagtttgcactgccaccgcgaaggcacacagccgccgtatcttttacttgcgctcggcacgcaggcgacggctgcggcgctcaggttggggttctcatcgacggcgtcagcggcttcccctcccgcctctcgtcagtcgcttcgcgccctcgcctccggtcctccgcacactggccggtgaccctgcatagtattatctgattttcctggaggccacattttaaggactgaggttacaatggcagatgccagccctagaacagaaacatcaacagatgatactgacgacaataacgggcttgaaccaggcagaggtggtcttgttgcttctgactccagtgacagatccaaagacaaacatggagatcaaaagacattgcgtcgccttgctcaaaatcgtgaggctgcaaggaagagccgactaaggaagaaggcatatgttcaacagttggagaatagcaggctaaaacttacccaactagagcaagagctgcaaagagctcgtcagcagggcatttttatatctagttcagttgatcagtcacactccatgagtggaaatggggcattggcctttgatatggagtatgcgaggtggttggaagagcacaatcggcaaattagtgaactaagggctggtgtcagtgctcatgcaagtgatactgatcttcgaagtgttgttgataagatcatgtcacactatgatgagatttttaggctcaaaggcaatgcagccaaggcagatgtttttcacgtcttatctggcatgtggaagacaccggcggagaggtgttttttgtggctaggaggtttccgaccatctgaggttttaaagcttctttcgacacaacttgaacctctcaccgaacagcagctgtcagggataagcaaccttcagcaatcttcacagcaggctgaggatgctctttcacaaggaatggaggcccttcagcaatcattggccgaaaccttggctgggtctctttcgtcttctggatcaacaggaaatgtggcaaactacatgggtcaaatggccatggctatgggaaaacttggaacgcttgagaatttccttcgtcagactctacaacagatgcaaaggatcctgaccactagacagtcagctcgggcgctacttgtgataagtgattactcttcacgtctccgtgccctaagctctctctggcttgctcggcccaaggaatagcaagaacatgctatttgactgcaatacttttcacaatttggttttcaatggtcaggagatttgacaaggctgcgacagacttgattcggacatatctgcacatactatgacccaaatggaaggggatgttcatgtagcttaggctgcttagctttgtagttaagtgttgttgatgtattattaccaactgctgtaaaattctcactctgtatgcccctgatttgcagcgaaccattagaatgc

SEQ ID NO: 1858 - protein, 322 aa, Zea mays subsp. mays
  peptide (1)..(322): Ceres Seq. ID no. 12410967
  misc_feature (43)..(104): Pfam Name: bZIP transcription factor Pfam Description: bZIP transcription factor
  misc_feature (1)..(322): Homolog of NCBI NO: 17025918 NR Description: bZIP transcription factor [Oryza sativa]
  misc_feature (1)..(322): Homolog of NCBI NO: 17025920 NR Description: bZIP transcription factor [Oryza sativa]
  misc_feature (1)..(322): Homolog of NCBI NO: 34921538 NR Description: Transcription factor HBP-1b(c1)
  misc_feature (1)..(322): Homolog of NCBI NO: 422029 NR Description: transcription factor OBF3.2 - maize
  misc_feature (1)..(322): Homolog of NCBI NO: 15148926 NR Description: TGA-type basic leucine zipper protein TGA2.2
  misc_feature (1)..(322): Homolog of NCBI NO: 15148924 NR Description: TGA-type basic leucine zipper protein TGA2.1
  misc_feature (1)..(322): Homolog of NCBI NO: 17025924 NR Description: bZIP transcription factor [Oryza sativa]
  misc_feature (1)..(322): Homolog of NCBI NO: 34909110 NR Description: putative transcription factor HBP-1b
  misc_feature (1)..(322): Homolog of NCBI NO: 122772 NR Description: Transcription factor HBP-1b
  misc_feature (1)..(322): Homolog of NCBI NO: 17025922 NR Description: bZIP transcription factor [Oryza sativa]
MADASPRTETSTDDTDDNNGLEPGRGGLVASDSSDRSKDKHGDQKTLRRLAQNREAARKSRLRKKAYVQQLENSRLKLTQLEQELQRARQQGIFISSSVDQSHSMSGNGALAFDMEYARWLEEHNRQISELRAGVSAHASDTDLRSVVDKIMSHYDEIFRLKGNAAKADVFHVLSGMWKTPAERCFLWLGGFRPSEVLKLLSTQLEPLTEQQLSGISNLQQSSQQAEDALSQGMEALQQSLAETLAGSLSSSGSTGNVANYMGQMAMAMGKLGTLENFLRQTLQQMQRILTTRQSARALLVISDYSSRLRALSSLWLARPKE

SEQ ID NO: 1859 - protein, 218 aa, Zea mays subsp. mays
  peptide (1)..(218): Ceres Seq. ID no. 12410968
  misc_feature (1)..(218): Homolog of NCBI NO: 17025918 NR Description: bZIP transcription factor [Oryza sativa]
  misc_feature (1)..(218): Homolog of NCBI NO: 17025920 NR Description: bZIP transcription factor [Oryza sativa]
  misc_feature (1)..(218): Homolog of NCBI NO: 34921538 NR Description: Transcription factor HBP-1b(c1)
  misc_feature (1)..(218): Homolog of NCBI NO: 422029 NR Description: transcription factor OBF3.2 - maize
  misc_feature (1)..(218): Homolog of NCBI NO: 15148926 NR Description: TGA-type basic leucine zipper protein TGA2.2
  misc_feature (1)..(218): Homolog of NCBI NO: 15148924 NR Description: TGA-type basic leucine zipper protein TGA2.1
  misc_feature (1)..(218): Homolog of NCBI NO: 17025924 NR Description: bZIP transcription factor [Oryza sativa]
  misc_feature (1)..(218): Homolog of NCBI NO: 34909110 NR Description: putative transcription factor HBP-1b
  misc_feature (1)..(218): Homolog of NCBI NO: 122772 NR Description: Transcription factor HBP-1b
  misc_feature (1)..(218): Homolog of NCBI NO: 17025922 NR Description: bZIP transcription factor [Oryza sativa]
MSGNGALAFDMEYARWLEEHNRQISELRAGVSAHASDTDLRSVVDKIMSHYDEIFRLKGNAAKADVFHVLSGMWKTPAERCFLWLGGFRPSEVLKLLSTQLEPLTEQQLSGISNLQQSSQQAEDALSQGMEALQQSLAETLAGSLSSSGSTGNVANYMGQMAMAMGKLGTLENFLRQTLQQMQRILTTRQSARALLVISDYSSRLRALSSLWLARPKE

SEQ ID NO: 1860 - protein, 208 aa, Zea mays subsp. mays
  peptide (1)..(208): Ceres Seq. ID no. 12410969
  misc_feature (1)..(208): Homolog of NCBI NO: 17025918 NR Description: bZIP transcription factor [Oryza sativa]
  misc_feature (1)..(208): Homolog of NCBI NO: 17025920 NR Description: bZIP transcription factor [Oryza sativa]
  misc_feature (1)..(208): Homolog of NCBI NO: 34921538 NR Description: Transcription factor HBP-1b(c1)
  misc_feature (1)..(208): Homolog of NCBI NO: 422029 NR Description: transcription factor OBF3.2 - maize
  misc_feature (1)..(208): Homolog of NCBI NO: 15148926 NR Description: TGA-type basic leucine zipper protein TGA2.2
  misc_feature (1)..(208): Homolog of NCBI NO: 15148924 NR Description: TGA-type basic leucine zipper protein TGA2.1
  misc_feature (1)..(208): Homolog of NCBI NO: 17025924 NR Description: bZIP transcription factor [Oryza sativa]
  misc_feature (1)..(208): Homolog of NCBI NO: 34909110 NR Description: putative transcription factor HBP-1b
  misc_feature (1)..(208): Homolog of NCBI NO: 122772 NR Description: Transcription factor HBP-1b
  misc_feature (1)..(208): Homolog of NCBI NO: 17025922 NR Description: bZIP transcription factor [Oryza sativa]
MEYARWLEEHNRQISELRAGVSAHASDTDLRSVVDKIMSHYDEIFRLKGNAAKADVFHVLSGMWKTPAERCFLWLGGFRPSEVLKLLSTQLEPLTEQQLSGISNLQQSSQQAEDALSQGMEALQQSLAETLAGSLSSSGSTGNVANYMGQMAMAMGKLGTLENFLRQTLQQMQRILTTRQSARALLVISDYSSRLRALSSLWLARPKE

SEQ ID NO: 1861 - DNA, 1761 bp, Zea mays subsp. mays
  misc_feature (1)..(1761): Ceres Seq. ID no. 12345231
  misc_feature: MA Experiment ID: 108527 Result: Down-regulated in Transcription
  misc_feature: MA Experiment 108527 PARAMETER Experiment Name: Zm_5mM_NO_P Parameter: Age (day) Value: 8
  misc_feature: MA Experiment 108527 PARAMETER Experiment Name: Zm_5mM_NO_P Parameter: Organism Value: Zea mays
  misc_feature: MA Experiment 108527 PARAMETER Experiment Name: Zm_5mM_NO_P Parameter: Plant Line Value: 35A19
  misc_feature: MA Experiment 108527 PARAMETER Experiment Name: Zm_5mM_NO_P Parameter: Timepoint (hr) Value: 6
  misc_feature: MA Experiment 108527 PARAMETER Experiment Name: Zm_5mM_NO_P Parameter: Tissue Value: Aerial
  misc_feature: MA Experiment 108527 PARAMETER Experiment Name: Zm_5mM_NO_P Parameter: Treatment Value: 5mM NO vs. No Treatment
  misc_feature: MA Experiment ID: 108528 Result: Up-regulated in Transcription
  misc_feature: MA Experiment 108528 PARAMETER Experiment Name: Zm_Imbibed_Seeds_P Parameter: Age (day) Value: 5 vs. 2
  misc_feature: MA Experiment 108528 PARAMETER Experiment Name: Zm_Imbibed_Seeds_P Parameter: Organism Value: Zea mays
  misc_feature: MA Experiment 108528 PARAMETER Experiment Name: Zm_Imbibed_Seeds_P Parameter: Plant Line Value: 35A19
  misc_feature: MA Experiment 108528 PARAMETER Experiment Name: Zm_Imbibed_Seeds_P Parameter: Tissue Value: Aerial vs. Embryo
  misc_feature: MA Experiment ID: 108530 Result: Up-regulated in Transcription
  misc_feature: MA Experiment 108530 PARAMETER Experiment Name: Zm_Imbibed_Seeds_P Parameter: Age (day) Value: 6 vs. 2
  misc_feature: MA Experiment 108530 PARAMETER Experiment Name: Zm_Imbibed_Seeds_P Parameter: Organism Value: Zea mays
  misc_feature: MA Experiment 108530 PARAMETER Experiment Name: Zm_Imbibed_Seeds_P Parameter: Plant Line Value: 35A19
  misc_feature: MA Experiment 108530 PARAMETER Experiment Name: Zm_Imbibed_Seeds_P Parameter: Tissue Value: Aerial vs. Embryo
  misc_feature: MA Experiment ID: 108534 Result: Down-regulated in Transcription
  misc_feature: MA Experiment 108534 PARAMETER Experiment Name: Zm_4deg_Cold_P Parameter: Age (hr) Value: 8
  misc_feature: MA Experiment 108534 PARAMETER Experiment Name: Zm_4deg_Cold_P Parameter: Organism Value: Zea mays
  misc_feature: MA Experiment 108534 PARAMETER Experiment Name: Zm_4deg_Cold_P Parameter: Plant Line Value: 35A19
  misc_feature: MA Experiment 108534 PARAMETER Experiment Name: Zm_4deg_Cold_P Parameter: Temperature (deg C) Value: 4 vs. 22
  misc_feature: MA Experiment 108534 PARAMETER Experiment Name: Zm_4deg_Cold_P Parameter: Timepoint (hr) Value: 6
  misc_feature: MA Experiment 108534 PARAMETER Experiment Name: Zm_4deg_Cold_P Parameter: Tissue Value: Aerial
  misc_feature: MA Experiment ID: 108536 Result: Down-regulated in Transcription
  misc_feature: MA Experiment 108536 PARAMETER Experiment Name: Zm_Meristem_P Parameter: Age (day) Value: 8
  misc_feature: MA Experiment 108536 PARAMETER Experiment Name: Zm_Meristem_P Parameter: Organism Value: Zea mays
  misc_feature: MA Experiment 108536 PARAMETER Experiment Name: Zm_Meristem_P Parameter: Plant Line Value: 35A19
  misc_feature: MA Experiment 108536 PARAMETER Experiment Name: Zm_Meristem_P Parameter: Tissue Value: Shoot Meristem vs. Above Shoot Meristem
  misc_feature: MA Experiment ID: 108545 Result: Up-regulated in Transcription
  misc_feature: MA Experiment 108545 PARAMETER Experiment Name: Zm_Imbibed_Seeds_P Parameter: Age (day) Value: 3 vs. 2
  misc_feature: MA Experiment 108545 PARAMETER Experiment Name: Zm_Imbibed_Seeds_P Parameter: Organism Value: Zea mays
  misc_feature: MA Experiment 108545 PARAMETER Experiment Name: Zm_Imbibed_Seeds_P Parameter: Plant Line Value: 35A19
  misc_feature: MA Experiment 108545 PARAMETER Experiment Name: Zm_Imbibed_Seeds_P Parameter: Tissue Value: Aerial vs. Embryo
  misc_feature: MA Experiment ID: 108547 Result: Up-regulated in Transcription
  misc_feature: MA Experiment 108547 PARAMETER Experiment Name: Zm_Imbibed_Seeds_P Parameter: Age (day) Value: 4 vs. 2
  misc_feature: MA Experiment 108547 PARAMETER Experiment Name: Zm_Imbibed_Seeds_P Parameter: Organism Value: Zea mays
  misc_feature: MA Experiment 108547 PARAMETER Experiment Name: Zm_Imbibed_Seeds_P Parameter: Plant Line Value: 35A19
  misc_feature: MA Experiment 108547 PARAMETER Experiment Name: Zm_Imbibed_Seeds_P Parameter: Tissue Value: Aerial vs. Embryo
  misc_feature: MA Experiment ID: 108559 Result: Down-regulated in Transcription
  misc_feature: MA Experiment 108559 PARAMETER Experiment Name: Zm_5mM_NO_P Parameter: Age (day) Value: 8
  misc_feature: MA Experiment 108559 PARAMETER Experiment Name: Zm_5mM_NO_P Parameter: Organism Value: Zea mays
  misc_feature: MA Experiment 108559 PARAMETER Experiment Name: Zm_5mM_NO_P Parameter: Plant Line Value: 35A19
  misc_feature: MA Experiment 108559 PARAMETER Experiment Name: Zm_5mM_NO_P Parameter: Timepoint (hr) Value: 12
  misc_feature: MA Experiment 108559 PARAMETER Experiment Name: Zm_5mM_NO_P Parameter: Tissue Value: Aerial
  misc_feature: MA Experiment 108559 PARAMETER Experiment Name: Zm_5mM_NO_P Parameter: Treatment Value: 5mM NO vs. No Treatment
  misc_feature: MA Experiment ID: 20000488 Result: Up-regulated in Transcription
  misc_feature: MA Experiment 20000488 PARAMETER Experiment Name: Zm_50mM_NH4NO3_L_to_H_P Parameter: Organism Value: Zea mays
  misc_feature: MA Experiment 20000488 PARAMETER Experiment Name: Zm_50mM_NH4NO3_L_to_H_P Parameter: Timepoint (hr) Value: 8
  misc_feature: MA Experiment 20000488 PARAMETER Experiment Name: Zm_50mM_NH4NO3_L_to_H_P Parameter: Tissue Value: Leaves
  misc_feature: MA Experiment 20000488 PARAMETER Experiment Name: Zm_50mM_NH4NO3_L_to_H_P Parameter: Treatment Value: 50mM NH4NO3 vs. 100mM Mannitol
  misc_feature: MA Experiment ID: 20000535 Result: Down-regulated in Transcription
  misc_feature: MA Experiment 20000535 PARAMETER Experiment Name: Zm_Hybrid_Seed_Dev_P Parameter: DAP Value: 30 vs. 12
  misc_feature: MA Experiment 20000535 PARAMETER Experiment Name: Zm_Hybrid_Seed_Dev_P Parameter: Organism Value: Zea mays
  misc_feature: MA Experiment 20000535 PARAMETER Experiment Name: Zm_Hybrid_Seed_Dev_P Parameter: Plant Line Value: 35A19
  misc_feature: MA Experiment 20000535 PARAMETER Experiment Name: Zm_Hybrid_Seed_Dev_P Parameter: Tissue Value: Embryo vs. Unfert Floret
accaaatggaccgtgttcttctgagctcccacctgccatctcacgctcttgcaaacacgaggttgcagctgggtcctggtggcctcaacagtataggatttgcagtcataaaaaagggatgcttgaagttaagatgttacgcgatcggcgatgaactcggtggtccagggcgcttaagtaagcattttgtcgagaacagtaatggacctgttttccagggactcgatgcgtctgctggttcttttagaactgtcggtgctgaaatcactcaggacactggagatttctttgtcagtgacgcagagggtgatccagacaaacctaccgatgggttctcctcgatcgaccaggctataggtgctttgcgtgaagggaagtttgttattgctgtagatgatgagaacggcgacaacgaaggcgaccttgtgatggcggccactctagtggaccagaagtcagtcgcattcatgatcaggaatggctctgggattatctcggtaggcatggaggaggaggacctgactagactgatgattccgatgatgtcccctatcacagaaatcgaagatatcacggctgctgcttccacggtgacagtggatgccagggttggcatatctacgggtgtgtcggctgcagacagggcgaagaccatcctcactctagcctcctctgactccaagcccagtgatctgaggagaccaggccacatattccccctcaagtaccggaacgggggcgtgctgaagagagctggccacacggaagcgtcggtggatctggttgcgttggcaggtctccgtcctgtgtccgttctctccaccgtcatggaccccagggacggttcgatggcaggcgtaacggttctccagcagatggctatggagcatgacatacccatcgtttcgattgctgatctcatccggtataggagaaagcgggagaagctggtggagctgattgctgtgtctcgcttgccgacgaaatggggcctcttccgagcctactgctaccagtccaggctcgatggaaccgagcacatcgctgttgtgaagggcgatatcggcgacggcgaagaggtcctggtgagggtgcactcggagtgcctgacgggggacatcctcggctcagcccgctgcgactgcggcaaccagctggagctggcgatgcagctgatcgagaaggccggccgtggcgtgctcgtgtacctccgcggccacgagggccgcggcattggcctgggccagaagctccgcgcctacaacctccaggacgagggccacgacaccgtcgaggccaacgtcgagctcggcctcgccgtggacgcccgcgagtacggcatcggcgcccagatactccgtgacatcggcgtgcgcacgatgcggctgatgaccaacaaccccgccaagttcatcgggctcaagggctacgggctcgccgtggtggggagggtgccggtgatctctcccatcaccaaggagaaccagaagtacctcgagaccaagcgcaccaagatgggccacgtctacggctccgatctcccgggaagcctgccggagttcgccaacccacaagaggcccccacagaacaagacgacgacgataaccaaaactgataaaaaaactatacggtgtcgtttttttaggaaaagataccaatataaccacaaattcttgtattccactgagaacgagtattgcagagtatttatttatcaactgcaaaattattaagtataatagagatacaaacttttatcg

SEQ ID NO: 1862 - protein, 537 aa, Zea mays subsp. mays
  peptide (1)..(537): Ceres Seq. ID no. 12345232
  misc_feature (315)..(486): Pfam Name: GTP cyclohydrolase II Pfam Description: GTP cyclohydrolase II
  misc_feature (111)..(508): Homolog of NCBI NO: 22299270 NR Description: riboflavin biosynthesis protein RibA includes GTP
  misc_feature (114)..(508): Homolog of NCBI NO: 23053279 NR Description: hypothetical protein [Geobacter metallireducens]
  misc_feature (114)..(515): Homolog of NCBI NO: 23018011 NR Description: hypothetical protein [Thermobifida fusca]
  misc_feature (80)..(488): Homolog of NCBI NO: 30681714 NR Description: GTP cyclohydrolase -related [Arabidopsis thaliana]
  misc_feature (80)..(488): Homolog of NCBI NO: 25290324 NR Description: probable GTP cyclohydrolase [imported] -
  misc_feature (143)..(519): Homolog of NCBI NO: 30697989 NR Description: GTP cyclohydrolase II
  misc_feature (78)..(513): Homolog of NCBI NO: 7436011 NR Description: GTP cyclohydrolase II (EC 3.5.4.25) / 3,
  misc_feature (74)..(519): Homolog of NCBI NO: 27735197 NR Description: Riboflavin biosynthesis protein ribA
  misc_feature (63)..(512): Homolog of NCBI NO: 18424277 NR Description: GTP cyclohydrolase II /
  misc_feature (80)..(537): Homolog of NCBI NO: 29367375 NR Description: GTP cyclohydrolase
QMDRVLLSSHLPSHALANTRLQLGPGGLNSIGFAVIKKGCLKLRCYAIGDELGGPGRLSKHFVENSNGPVFQGLDASAGSFRTVGAEITQDTGDFFVSDAEGDPDKPTDGFSSIDQAIGALREGKFVIAVDDENGDNEGDLVMAATLVDQKSVAFMIRNGSGIISVGMEEEDLTRLMIPMMSPITEIEDITAAASTVTVDARVGISTGVSAADRAKTILTLASSDSKPSDLRRPGHIFPLKYRNGGVLKRAGHTEASVDLVALAGLRPVSVLSTVMDPRDGSMAGVTVLQQMAMEHDIPIVSIADLIRYRRKREKLVELIAVSRLPTKWGLFRAYCYQSRLDGTEHIAVVKGDIGDGEEVLVRVHSECLTGDILGSARCDCGNQLELAMQLIEKAGRGVLVYLRGHEGRGIGLGQKLRAYNLQDEGHDTVEANVELGLAVDAREYGIGAQILRDIGVRTMRLMTNNPAKFIGLKGYGLAVVGRVPVISPITKENQKYLETKRTKMGHVYGSDLPGSLPEFANPQEAPTEQDDDDNQN

SEQ ID NO: 1863 - protein, 536 aa, Zea mays subsp. mays
  peptide (1)..(536): Ceres Seq. ID no. 12345233
  misc_feature (314)..(485): Pfam Name: GTP cyclohydrolase II Pfam Description: GTP cyclohydrolase II
  misc_feature (110)..(507): Homolog of NCBI NO: 22299270 NR Description: riboflavin biosynthesis protein RibA includes GTP
  misc_feature (113)..(507): Homolog of NCBI NO: 23053279 NR Description: hypothetical protein [Geobacter metallireducens]
  misc_feature (113)..(514): Homolog of NCBI NO: 23018011 NR Description: hypothetical protein [Thermobifida fusca]
  misc_feature (79)..(487): Homolog of NCBI NO: 30681714 NR Description: GTP cyclohydrolase -related [Arabidopsis thaliana]
  misc_feature (79)..(487): Homolog of NCBI NO: 25290324 NR Description: probable GTP cyclohydrolase [imported] -
  misc_feature (142)..(518): Homolog of NCBI NO: 30697989 NR Description: GTP cyclohydrolase II
  misc_feature (77)..(512): Homolog of NCBI NO: 7436011 NR Description: GTP cyclohydrolase II (EC 3.5.4.25) / 3,
  misc_feature (73)..(518): Homolog of NCBI NO: 27735197 NR Description: Riboflavin biosynthesis protein ribA
  misc_feature (62)..(511): Homolog of NCBI NO: 18424277 NR Description: GTP cyclohydrolase II /
  misc_feature (79)..(536): Homolog of NCBI NO: 29367375 NR Description: GTP cyclohydrolase
MDRVLLSSHLPSHALANTRLQLGPGGLNSIGFAVIKKGCLKLRCYAIGDELGGPGRLSKHFVENSNGPVFQGLDASAGSFRTVGAEITQDTGDFFVSDAEGDPDKPTDGFSSIDQAIGALREGKFVIAVDDENGDNEGDLVMAATLVDQKSVAFMIRNGSGIISVGMEEEDLTRLMIPMMSPITEIEDITAAASTVTVDARVGISTGVSAADRAKTILTLASSDSKPSDLRRPGHIFPLKYRNGGVLKRAGHTEASVDLVALAGLRPVSVLSTVMDPRDGSMAGVTVLQQMAMEHDIPIVSIADLIRYRRKREKLVELIAVSRLPTKWGLFRAYCYQSRLDGTEHIAVVKGDIGDGEEVLVRVHSECLTGDILGSARCDCGNQLELAMQLIEKAGRGVLVYLRGHEGRGIGLGQKLRAYNLQDEGHDTVEANVELGLAVDAREYGIGAQILRDIGVRTMRLMTNNPAKFIGLKGYGLAVVGRVPVISPITKENQKYLETKRTKMGHVYGSDLPGSLPEFANPQEAPTEQDDDDNQN

SEQ ID NO: 1864 - protein, 395 aa, Zea mays subsp. mays
  peptide (1)..(395): Ceres Seq. ID no. 12345234
  misc_feature (173)..(344): Pfam Name: GTP cyclohydrolase II Pfam Description: GTP cyclohydrolase II
  misc_feature (1)..(366): Homolog of NCBI NO: 22299270 NR Description: riboflavin biosynthesis protein RibA includes GTP
  misc_feature (1)..(366): Homolog of NCBI NO: 23053279 NR Description: hypothetical protein [Geobacter metallireducens]
  misc_feature (1)..(373): Homolog of NCBI NO: 23018011 NR Description: hypothetical protein [Thermobifida fusca]
  misc_feature (1)..(346): Homolog of NCBI NO: 30681714 NR Description: GTP cyclohydrolase -related [Arabidopsis thaliana]
  misc_feature (1)..(346): Homolog of NCBI NO: 25290324 NR Description: probable GTP cyclohydrolase [imported] -
  misc_feature (1)..(377): Homolog of NCBI NO: 30697989 NR Description: GTP cyclohydrolase II
  misc_feature (1)..(371): Homolog of NCBI NO: 7436011 NR Description: GTP cyclohydrolase II (EC 3.5.4.25) / 3,
  misc_feature (1)..(377): Homolog of NCBI NO: 27735197 NR Description: Riboflavin biosynthesis protein ribA
  misc_feature (1)..(370): Homolog of NCBI NO: 18424277 NR Description: GTP cyclohydrolase II /
  misc_feature (1)..(395): Homolog of NCBI NO: 29367375 NR Description: GTP cyclohydrolase
MAATLVDQKSVAFMIRNGSGIISVGMEEEDLTRLMIPMMSPITEIEDITAAASTVTVDARVGISTGVSAADRAKTILTLASSDSKPSDLRRPGHIFPLKYRNGGVLKRAGHTEASVDLVALAGLRPVSVLSTVMDPRDGSMAGVTVLQQMAMEHDIPIVSIADLIRYRRKREKLVELIAVSRLPTKWGLFRAYCYQSRLDGTEHIAVVKGDIGDGEEVLVRVHSECLTGDILGSARCDCGNQLELAMQLIEKAGRGVLVYLRGHEGRGIGLGQKLRAYNLQDEGHDTVEANVELGLAVDAREYGIGAQILRDIGVRTMRLMTNNPAKFIGLKGYGLAVVGRVPVISPITKENQKYLETKRTKMGHVYGSDLPGSLPEFANPQEAPTEQDDDDNQN

SEQ ID NO: 1865 - DNA, 1454 bp, Zea mays subsp. mays
  misc_feature (1)..(1454): Ceres Seq. ID no. 12355885
  misc_feature: MA Experiment ID: 108544 Result: Up-regulated in Transcription
  misc_feature: MA Experiment ID: 20000534 Result: Down-regulated in Transcription
  misc_feature: MA Experiment 20000534 PARAMETER Experiment Name: Zm_Hybrid_Pollen_P Parameter: Age (day) Value: 8
  misc_feature: MA Experiment 20000534 PARAMETER Experiment Name: Zm_Hybrid_Pollen_P Parameter: Organism Value: Zea mays
  misc_feature: MA Experiment 20000534 PARAMETER Experiment Name: Zm_Hybrid_Pollen_P Parameter: Plant Line Value: 35A19
  misc_feature: MA Experiment 20000534 PARAMETER Experiment Name: Zm_Hybrid_Pollen_P Parameter: Tissue Value: Pollen vs. Aerial
aaaaaattagaaaattctgcgttaattactccaggcttaaggttaagcacctcccaaacacgccctatgagggccctcgtccggatccacctgcccgcggccatctccaccggatccttcctccacacctcctcaaccgccgcctccaagaccctagtaccgaaccccaacctcgtcccgctccggctcgtccgccacttcccggccatggccgccaccgccgcagacgagttcgtgaagggccgcgtcttccccaacggcgtcgccgtcataacgctcgaccgacccaaggccctcaacgccatgaacctcgaaatggatgttagatacaaggcacttcttgatgaatgggaaacaaatccaagtgtcaagtgtattcttgtggaaagcagctcttctcgtgccttctcagcagggatggatattaagggggttgccgtggaaatacaaaaagacaaaaaaaacaccacttgtgcaaaaggtattcacagcagagtactctttaatttgtaagatacatgagtatgcaaaaccttatatatgcttgatggatggagtgacaatgggatttggaattgggctatcagggcatggccgctaccgcattattacagagagaacactcctagccatgcctgaaaatggtattggcctgttcccagacgttggctttgcttacattggtgcaaaagcaccaggagggggtgcagttggagtttaccttgggattactggaaaaaggatatcatcacctgctgatgctatgttcataggccttggtactcactatgtaccttctgcaaatttgggttcactcaaggagtccctgctgagtgctaacttcaccaatgatcctcatagagacgttgagtcagttctgacaggatacaagaaagaaccagagtctgaaccacaactaaaaaagcttttgccatatatcatttcttctttcagtcctgataaatcagtggctgaatctgtggaagagctaaagaaatgtagccgaagtggtgatgctgcagtggcagaatgggccattgaagctttagcaggaattgagaaaggcgctccattttctctttgtttaacacagaagcatttctctcaagttgcatcagcatatgggactagtgaacactatttatctaagctggctggtgttatgaaattggaatatcgcattgccttgaggtcgtcgattagaaacgattttgttgaaggtgtgcgtgctgttttagttgacaaggaccagaatccgaagtggaatccagccactctggaagaagtaaacatggccgaggtggaatcagttttcgagccattaggggccgaggctgagttgagtgtgtgaaatatggcctgccacactcagttttcttatttgtgctgcaataataatgtatacaaaacagaaatgcgatgcccacagaaacaataaatgctgtgtcttcatg

SEQ ID NO: 1866 - protein, 343 aa, Zea mays subsp. mays
  peptide (1)..(343): Ceres Seq. ID no. 12355886
  misc_feature (33)..(159): Pfam Name: Enoyl-CoA hydratase/isomerase family Pfam Description: Enoyl-CoA hydratase/isomerase family
  misc_feature (43)..(235): Homolog of NCBI NO: 15608211 NR Description: echA9 [Mycobacterium tuberculosis H37Rv]
  misc_feature (51)..(335): Homolog of NCBI NO: 26990203 NR Description: enoly-coenzyme A hydratase/isomerase family
  misc_feature (56)..(343): Homolog of NCBI NO: 15239206 NR Description: 3-hydroxyisobutyryl-coenzyme A hydrolase
  misc_feature (282)..(331): Homolog of NCBI NO: 23016278 NR Description: hypothetical protein [Magnetospirillum
  misc_feature (59)..(194): Homolog of NCBI NO: 23016278 NR Description: hypothetical protein [Magnetospirillum
  misc_feature (237)..(336): Homolog of NCBI NO: 23013936 NR Description: hypothetical protein [Magnetospirillum
  misc_feature (55)..(263): Homolog of NCBI NO: 23013936 NR Description: hypothetical protein [Magnetospirillum
  misc_feature (33)..(343): Homolog of NCBI NO: 15230101 NR Description: 3-hydroxyisobutyryl-coenzyme A hydrolase, putative
  misc_feature (33)..(343): Homolog of NCBI NO: 11994698 NR Description: 3-hydroxyisobutyryl-coenzyme A hydrolase-like
  misc_feature (33)..(340): Homolog of NCBI NO: 15235689 NR Description: 3-hydroxyisobutyryl-coenzyme A hydrolase - like
MLDTRHFLMNGKQIQVSSVFLWKAALLVPSQQGWILRGLPWKYKKTKKTPLVQKVFTAEYSLICKIHEYAKPYICLMDGVTMGFGIGLSGHGRYRIITERTLLAMPENGIGLFPDVGFAYIGAKAPGGGAVGVYLGITGKRISSPADAMFIGLGTHYVPSANLGSLKESLLSANFTNDPHRDVESVLTGYKKEPESEPQLKKLLPYIISSFSPDKSVAESVEELKKCSRSGDAAVAEWAIEALAGIEKGAPFSLCLTQKHFSQVASAYGTSEHYLSKLAGVMKLEYRIALRSSIRNDFVEGVRAVLVDKDQNPKWNPATLEEVNMAEVESVFEPLGAEAELSV

SEQ ID NO: 1867 - protein, 335 aa, Zea mays subsp. mays
  peptide (1)..(335): Ceres Seq. ID no. 12355887
  misc_feature (25)..(151): Pfam Name: Enoyl-CoA hydratase/isomerase family Pfam Description: Enoyl-CoA hydratase/isomerase family
  misc_feature (25)..(335): Homolog of NCBI NO: 11994698 NR Description: 3-hydroxyisobutyryl-coenzyme A hydrolase-like
  misc_feature (35)..(227): Homolog of NCBI NO: 15608211 NR Description: echA9 [Mycobacterium tuberculosis H37Rv]
  misc_feature (48)..(335): Homolog of NCBI NO: 15239206 NR Description: 3-hydroxyisobutyryl-coenzyme A hydrolase
  misc_feature (51)..(186): Homolog of NCBI NO: 23016278 NR Description: hypothetical protein [Magnetospirillum
  misc_feature (47)..(255): Homolog of NCBI NO: 23013936 NR Description: hypothetical protein [Magnetospirillum
  misc_feature (25)..(335): Homolog of NCBI NO: 15230101 NR Description: 3-hydroxyisobutyryl-coenzyme A hydrolase, putative
  misc_feature (229)..(328): Homolog of NCBI NO: 23013936 NR Description: hypothetical protein [Magnetospirillum
  misc_feature (274)..(323): Homolog of NCBI NO: 23016278 NR Description: hypothetical protein [Magnetospirillum
  misc_feature (43)..(327): Homolog of NCBI NO: 26990203 NR Description: enoly-coenzyme A hydratase/isomerase family
  misc_feature (25)..(332): Homolog of NCBI NO: 15235689 NR Description: 3-hydroxyisobutyryl-coenzyme A hydrolase - like
MNGKQIQVSSVFLWKAALLVPSQQGWILRGLPWKYKKTKKTPLVQKVFTAEYSLICKIHEYAKPYICLMDGVTMGFGIGLSGHGRYRIITERTLLAMPENGIGLFPDVGFAYIGAKAPGGGAVGVYLGITGKRISSPADAMFIGLGTHYVPSANLGSLKESLLSANFTNDPHRDVESVLTGYKKEPESEPQLKKLLPYIISSFSPDKSVAESVEELKKCSRSGDAAVAEWAIEALAGIEKGAPFSLCLTQKHFSQVASAYGTSEHYLSKLAGVMKLEYRIALRSSIRNDFVEGVRAVLVDKDQNPKWNPATLEEVNMAEVESVFEPLGAEAELSV

SEQ ID NO: 1868 - protein, 267 aa, Zea mays subsp. mays
  peptide (1)..(267): Ceres Seq. ID no. 12355888
  misc_feature (1)..(83): Pfam Name: Enoyl-CoA hydratase/isomerase family Pfam Description: Enoyl-CoA hydratase/isomerase family
  misc_feature (1)..(159): Homolog of NCBI NO: 15608211 NR Description: echA9 [Mycobacterium tuberculosis H37Rv]
  misc_feature (1)..(259): Homolog of NCBI NO: 26990203 NR Description: enoly-coenzyme A hydratase/isomerase family
  misc_feature (1)..(267): Homolog of NCBI NO: 15239206 NR Description: 3-hydroxyisobutyryl-coenzyme A hydrolase
  misc_feature (206)..(255): Homolog of NCBI NO: 23016278 NR Description: hypothetical protein [Magnetospirillum
  misc_feature (1)..(118): Homolog of NCBI NO: 23016278 NR Description: hypothetical protein [Magnetospirillum
  misc_feature (161)..(260): Homolog of NCBI NO: 23013936 NR Description: hypothetical protein [Magnetospirillum
  misc_feature (1)..(187): Homolog of NCBI NO: 23013936 NR Description: hypothetical protein [Magnetospirillum
  misc_feature (1)..(267): Homolog of NCBI NO: 15230101 NR Description: 3-hydroxyisobutyryl-coenzyme A hydrolase, putative
  misc_feature (1)..(267): Homolog of NCBI NO: 11994698 NR Description: 3-hydroxyisobutyryl-coenzyme A hydrolase-like
  misc_feature (1)..(264): Homolog of NCBI NO: 15235689 NR Description: 3-hydroxyisobutyryl-coenzyme A hydrolase - like
MDGVTMGFGIGLSGHGRYRIITERTLLAMPENGIGLFPDVGFAYIGAKAPGGGAVGVYLGITGKRISSPADAMFIGLGTHYVPSANLGSLKESLLSANFTNDPHRDVESVLTGYKKEPESEPQLKKLLPYIISSFSPDKSVAESVEELKKCSRSGDAAVAEWAIEALAGIEKGAPFSLCLTQKHFSQVASAYGTSEHYLSKLAGVMKLEYRIALRSSIRNDFVEGVRAVLVDKDQNPKWNPATLEEVNMAEVESVFEPLGAEAELSV

SEQ ID NO: 1869 - DNA, 1410 bp, Zea mays subsp. mays
  misc_feature (1)..(1410): Ceres Seq. ID no. 12342569
  misc_feature: MA Experiment ID: 108527 Result: Down-regulated in Transcription
  misc_feature: MA Experiment 108527 PARAMETER Experiment Name: Zm_5mM_NO_P Parameter: Age (day) Value: 8
  misc_feature: MA Experiment 108527 PARAMETER Experiment Name: Zm_5mM_NO_P Parameter: Organism Value: Zea mays
  misc_feature: MA Experiment 108527 PARAMETER Experiment Name: Zm_5mM_NO_P Parameter: Plant Line Value: 35A19
  misc_feature: MA Experiment 108527 PARAMETER Experiment Name: Zm_5mM_NO_P Parameter: Timepoint (hr) Value: 6
  misc_feature: MA Experiment 108527 PARAMETER Experiment Name: Zm_5mM_NO_P Parameter: Tissue Value: Aerial
  misc_feature: MA Experiment 108527 PARAMETER Experiment Name: Zm_5mM_NO_P Parameter: Treatment Value: 5mM NO vs. No Treatment
  misc_feature: MA Experiment ID: 108535 Result: Down-regulated in Transcription
  misc_feature: MA Experiment 108535 PARAMETER Experiment Name: Zm_Meristem_P Parameter: Age (day) Value: 8
  misc_feature: MA Experiment 108535 PARAMETER Experiment Name: Zm_Meristem_P Parameter: Organism Value: Zea mays
  misc_feature: MA Experiment 108535 PARAMETER Experiment Name: Zm_Meristem_P Parameter: Plant Line Value: 35A19
  misc_feature: MA Experiment 108535 PARAMETER Experiment Name: Zm_Meristem_P Parameter: Tissue Value: Root Meristem vs. Above Root Meristem
  misc_feature: MA Experiment ID: 108547 Result: Up-regulated in Transcription
  misc_feature: MA Experiment 108547 PARAMETER Experiment Name: Zm_Imbibed_Seeds_P Parameter: Age (day) Value: 4 vs. 2
  misc_feature: MA Experiment 108547 PARAMETER Experiment Name: Zm_Imbibed_Seeds_P Parameter: Organism Value: Zea mays
  misc_feature: MA Experiment 108547 PARAMETER Experiment Name: Zm_Imbibed_Seeds_P Parameter: Plant Line Value: 35A19
  misc_feature: MA Experiment 108547 PARAMETER Experiment Name: Zm_Imbibed_Seeds_P Parameter: Tissue Value: Aerial vs. Embryo
  misc_feature: MA Experiment ID: 108559 Result: Down-regulated in Transcription
  misc_feature: MA Experiment 108559 PARAMETER Experiment Name: Zm_5mM_NO_P Parameter: Age (day) Value: 8
  misc_feature: MA Experiment 108559 PARAMETER Experiment Name: Zm_5mM_NO_P Parameter: Organism Value: Zea mays
  misc_feature: MA Experiment 108559 PARAMETER Experiment Name: Zm_5mM_NO_P Parameter: Plant Line Value: 35A19
  misc_feature: MA Experiment 108559 PARAMETER Experiment Name: Zm_5mM_NO_P Parameter: Timepoint (hr) Value: 12
  misc_feature: MA Experiment 108559 PARAMETER Experiment Name: Zm_5mM_NO_P Parameter: Tissue Value: Aerial
  misc_feature: MA Experiment 108559 PARAMETER Experiment Name: Zm_5mM_NO_P Parameter: Treatment Value: 5mM NO vs. No Treatment
  misc_feature: MA Experiment ID: 20000492 Result: Down-regulated in Transcription
  misc_feature: MA Experiment 20000492 PARAMETER Experiment Name: Zm_Hybrid_Seed_Dev_P Parameter: DAP Value: 12
  misc_feature: MA Experiment 20000492 PARAMETER Experiment Name: Zm_Hybrid_Seed_Dev_P Parameter: Organism Value: Zea mays
  misc_feature: MA Experiment 20000492 PARAMETER Experiment Name: Zm_Hybrid_Seed_Dev_P Parameter: Plant Line Value: 35A19
  misc_feature: MA Experiment 20000492 PARAMETER Experiment Name: Zm_Hybrid_Seed_Dev_P Parameter: Tissue Value: Fert Kernel vs. Unfert Floret
gctcagataatagcgacacctcctttcctctccctcgaggtgtctctcccagaacgcacagcacagtcgcagaacaggaaggcagagagcagcgccgcgatgagaggaggaggagcggggcccactgcggcgttcatgtccgacgagccgcctccagccgacgcggaagaggtggaggagaactccggcgccgaggaggaggacgaggagacggtggtggagcaggacgacgacgagctggagctggggctctgcctcggctccaagcaacagcagcagcagcatccgccgccgtgccggatcctcacggcccgggacctgcagccgaggtccctgtcaccggattcctccgtgtcctcttcctcccccgcggcaggtgcaggtaccgcggcgccaagcaagagggccaaggcggatgcggcgcccaactcgccagggacggtcgcgtctggccacccacagagctttggagtggtgggatggccacccataagaactttcaggatgaacagcctatttaaccaggccaaagagaatgcatcggaggctggcgccaagaagcccatcgtcgaacctgacatcaggaagacaaggaggagagaaagaaaggccggaccgtcggttgggtgaaggtgaacatggaaggagatatcattggaaggaaggtcgatctcaatgcccatcgctcttacaagacccttgcctcagcacttgagctcatgttcatgaagccgtccattggtctttgcacttctagcagttcaaagactctaaagctattagacagctcatcggagtatcagctcacctatgaggacagggacggggactggatgcttgttggagatgttccctgggagatgtttgtaggttcagtgaagaggctcaagatcatgagaacctcagacgccaaaggtctcggtccacgattccaagggtctcacagacccacagcagcttgcacgagaggcaggacgtgaaaccaccgatgtgcgtttggtgctaacaccgctggtgaagcttgaactgtgtttgatatcacgtaacagtaacagcagcccatatcgctggcatagttgtgagattacggggctgtttggtttactgtctaaggcgccacaacatggctaacttttctgtctaagtttagttcttcaattcgaacgactaaacttagacagcttcattgtgtctagtggaaatagtagaagtatttttttttttttgcttcttccctgtggtgccctcgttgaacttttctcatgggctatacgagcatcatcgcccccagctcttctgtccacactgtttttacctgtgaggaatggtcgcccaaagtgttggtttttatccttgtgtttgctatggcagaagtatctgcactgctgtttcatatctgtgttcatatct

SEQ ID NO: 1870 - protein, 209 aa, Zea mays subsp. mays
  peptide (1)..(209): Ceres Seq. ID no. 12342570
  misc_feature (79)..(182): Pfam Name: AUX/IAA family Pfam Description: AUX/IAA family
  misc_feature (158)..(188): Homolog of NCBI NO: 20257219 NR Description: auxin-regulated protein [Zinnia elegans]
  misc_feature (116)..(189): Homolog of NCBI NO: 15219646 NR Description: putative IAA1 protein
  misc_feature (36)..(182): Homolog of NCBI NO: 20269057 NR Description: aux/IAA protein [Populus tremula x Populus
AQIIATPPFLSLEVSLPERTAQSQNRKAESSAAMRGGGAGPTAAFMSDEPPPADAEEVEENSGAEEEDEETVVEQDDDELELGLCLGSKQQQQQHPPPCRILTARDLQPRSLSPDSSVSSSSPAAGAGTAAPSKRAKADAAPNSPGTVASGHPQSFGVVGWPPIRTFRMNSLFNQAKENASEAGAKKPIVEPDIRKTRRRERKAGPSVG

SEQ ID NO: 1871 - protein, 176 aa, Zea mays subsp. mays
  peptide (1)..(176): Ceres Seq. ID no. 12342571
  misc_feature (46)..(149): Pfam Name: AUX/IAA family Pfam Description: AUX/IAA family
  misc_feature (125)..(155): Homolog of NCBI NO: 20257219 NR Description: auxin-regulated protein [Zinnia elegans]
  misc_feature (83)..(156): Homolog of NCBI NO: 15219646 NR Description: putative IAA1 protein
  misc_feature (3)..(149): Homolog of NCBI NO: 20269057 NR Description: aux/IAA protein [Populus tremula x Populus
MRGGGAGPTAAFMSDEPPPADAEEVEENSGAEEEDEETVVEQDDDELELGLCLGSKQQQQQHPPPCRILTARDLQPRSLSPDSSVSSSSPAAGAGTAAPSKRAKADAAPNSPGTVASGHPQSFGVVGWPPIRTFRMNSLFNQAKENASEAGAKKPIVEPDIRKTRRRERKAGPSVG

SEQ ID NO: 1872 - protein, 172 aa, Zea mays subsp. mays
  peptide (1)..(172): Ceres Seq. ID no. 12342572
  misc_feature (161)..(172): Homolog of NCBI NO: 11131105 NR Description: Auxin-induced protein 22E (Indole-3-acetic acid
  misc_feature (152)..(172): Homolog of NCBI NO: 30698143 NR Description: auxin-responsive protein IAA9 (Indoleacetic
  misc_feature (152)..(172): Homolog of NCBI NO: 21592701 NR Description: auxin-induced protein IAA9 [Arabidopsis thaliana]
  misc_feature (152)..(172): Homolog of NCBI NO: 10177324 NR Description: auxin-induced protein IAA9 [Arabidopsis thaliana]
  misc_feature (150)..(172): Homolog of NCBI NO: 20269059 NR Description: aux/IAA protein [Populus tremula x Populus
  misc_feature (152)..(172): Homolog of NCBI NO: 30698145 NR Description: auxin-responsive protein IAA9 (Indoleacetic
  misc_feature (145)..(172): Homolog of NCBI NO: 17976835 NR Description: putative auxin induced transcription factor
  misc_feature (130)..(172): Homolog of NCBI NO: 21593621 NR Description: putative auxin-induced protein, IAA12
  misc_feature (130)..(172): Homolog of NCBI NO: 15219761 NR Description: putative auxin-induced protein, IAA12
SDNSDTSFPLPRGVSPRTHSTVAEQEGREQRRDERRRSGAHCGVHVRRAASSRRGRGGGELRRRGGGRGDGGGAGRRRAGAGALPRLQATAAAASAAVPDPHGPGPAAEVPVTGFLRVLFLPRGRCRYRGAKQEGQGGCGAQLARDGRVWPPTELWSGGMATHKNFQDEQPI

SEQ ID NO: 1873 - DNA, 1501 bp, Zea mays subsp. mays
  misc_feature (1)..(1501): Ceres Seq. ID no. 12373953
  misc_feature: MA Experiment ID: 108527 Result: Up-regulated in Transcription
  misc_feature: MA Experiment 108527 PARAMETER Experiment Name: Zm_5mM_NO_P Parameter: Age (day) Value: 8
  misc_feature: MA Experiment 108527 PARAMETER Experiment Name: Zm_5mM_NO_P Parameter: Organism Value: Zea mays
  misc_feature: MA Experiment 108527 PARAMETER Experiment Name: Zm_5mM_NO_P Parameter: Plant Line Value: 35A19
  misc_feature: MA Experiment 108527 PARAMETER Experiment Name: Zm_5mM_NO_P Parameter: Timepoint (hr) Value: 6
  misc_feature: MA Experiment 108527 PARAMETER Experiment Name: Zm_5mM_NO_P Parameter: Tissue Value: Aerial
  misc_feature: MA Experiment 108527 PARAMETER Experiment Name: Zm_5mM_NO_P Parameter: Treatment Value: 5mM NO vs. No Treatment
  misc_feature: MA Experiment ID: 20000492 Result: Down-regulated in Transcription
  misc_feature: MA Experiment 20000492 PARAMETER Experiment Name: Zm_Hybrid_Seed_Dev_P Parameter: DAP Value: 12
  misc_feature: MA Experiment 20000492 PARAMETER Experiment Name: Zm_Hybrid_Seed_Dev_P Parameter: Organism Value: Zea mays
  misc_feature: MA Experiment 20000492 PARAMETER Experiment Name: Zm_Hybrid_Seed_Dev_P Parameter: Plant Line Value: 35A19
  misc_feature: MA Experiment 20000492 PARAMETER Experiment Name: Zm_Hybrid_Seed_Dev_P Parameter: Tissue Value: Fert Kernel vs. Unfert Floret
  misc_feature: MA Experiment ID: 20000535 Result: Down-regulated in Transcription
  misc_feature: MA Experiment 20000535 PARAMETER Experiment Name: Zm_Hybrid_Seed_Dev_P Parameter: DAP Value: 30 vs. 12
  misc_feature: MA Experiment 20000535 PARAMETER Experiment Name: Zm_Hybrid_Seed_Dev_P Parameter: Organism Value: Zea mays
  misc_feature: MA Experiment 20000535 PARAMETER Experiment Name: Zm_Hybrid_Seed_Dev_P Parameter: Plant Line Value: 35A19
  misc_feature: MA Experiment 20000535 PARAMETER Experiment Name: Zm_Hybrid_Seed_Dev_P Parameter: Tissue Value: Embryo vs. Unfert Floret
aaaagccttcgcctttttcctctcgtcttcctctctctcccccgctccaaatcccaccctctctctttctctctccacattctccctgctgtgcaccttgcagcagccttggctgtggatcggaaatggcaatcgacgatgaatcgccgctcagagtcaaccccagaggcggcgccatgggaggaggggagcgtgacggcgcggagaaccagcggtggccgccgtggctgaagccgctgctggggacgagcttcttcggccaatgcaagctgcacgcggacgcgcacaagagcgagtgcaacatgtactgcctcgactgcatgaacggcgcgctctgctcccagtgcctcgcctaccaccgcgaccaccacgccatccagatacggaggtcctcctaccacgacgtgatccgggtgtcggagatccagaaggtgctggacatcagcggcgtgcagacctacatcatcaacagcgcgcgcgtggtgttcctgaacgagcggccgcagccgaggcccggcaagggcgtcaccaacacctgcgaggtctgcgagcgcagcctcctcgacaccttccgcttctgctccctcggctgcaagatcgtcaggacctccggcgacttccgcatccggaagaagcacgccatcgtcgcaaagaagaagagggagaagaagcatgcgccgcagcagaagcagcacaggggcgcggcggactcggcggacgacgacgacgacgactcgtccaccagcaccagcggcggcagcgacaagagcagcgtggtgcagagcttcaccccgtcgaccccgccggcgacgaccgccaacagcttccgcgccgggaagcggcgcaagggcgtgccgcaccggtcgccgttcggcagcctcgtggtggagttctagacaaaaaaaaaggcgcgccgcccggtcccgatggacgcccaccaaaaaaaaaaacacagcggtacaccactgtagcatacgcacttcttctacataccatcatctataggcgctgccggatcgaccgggctacatacataagtacatagccagcccaaaaataggagcaagcaataaccagggccccacttgcacgccgcccgcgcttctggacggacgaggacgaggaggccggtgcaatgcggctcgtacggggcacggttacttccacttccatagcagttactgtgctggtaacaacggtttgggtttggtgcctcactgcctctctgaagggaaacgaggttgttatagcagttactcttgtcgtcgtcagcctcagccactactaagttttgcgagtttcacctataggtgtttgctagttttttttaccggtgcttggtatacgcgagtagaatgtacatgtacgtatactgtcagagatggggggaatggtggtaggggggtgtagctcccggtgttcatattcgtgtgttggcttgctgccctgtaataataataaaaataaaaagggataaggatgctgctcctggatggccttc

SEQ ID NO: 1874 - protein, 297 aa, Zea mays subsp. mays
  peptide (1)..(297): Ceres Seq. ID no. 12373954
  misc_feature (72)..(199): Pfam Name: Protein of unknown function, DUF597 Pfam Description: Protein of unknown function, DUF597
  misc_feature (56)..(290): Homolog of NCBI NO: 18411153 NR Description: expressed protein
  misc_feature (42)..(268): Homolog of NCBI NO: 37537092 NR Description: unknown protein [Oryza sativa (japonica
  misc_feature (42)..(291): Homolog of NCBI NO: 15236696 NR Description: putative protein; protein id: At4g17900.1
  misc_feature (241)..(297): Homolog of NCBI NO: 21554139 NR Description: unknown [Arabidopsis thaliana]
  misc_feature (66)..(199): Homolog of NCBI NO: 21554139 NR Description: unknown [Arabidopsis thaliana]
  misc_feature (241)..(297): Homolog of NCBI NO: 6714272 NR Description: F6N18.8 [Arabidopsis thaliana]
  misc_feature (69)..(199): Homolog of NCBI NO: 6714272 NR Description: F6N18.8 [Arabidopsis thaliana]
  misc_feature (241)..(297): Homolog of NCBI NO: 18398555 NR Description: expressed protein
  misc_feature (66)..(199): Homolog of NCBI NO: 18398555 NR Description: expressed protein
  misc_feature (60)..(297): Homolog of NCBI NO: 38346725 NR Description: OSJNBa0086O06.23 [Oryza sativa (japonica
KPSPFSSRLPLSPPLQIPPSLFLSPHSPCCAPCSSLGCGSEMAIDDESPLRVNPRGGAMGGGERDGAENQRWPPWLKPLLGTSFFGQCKLHADAHKSECNMYCLDCMNGALCSQCLAYHRDHHAIQIRRSSYHDVIRVSEIQKVLDISGVQTYIINSARVVFLNERPQPRPGKGVTNTCEVCERSLLDTFRFCSLGCKIVRTSGDFRIRKKHAIVAKKKREKKHAPQQKQHRGAADSADDDDDDSSTSTSGGSDKSSVVQSFTPSTPPATTANSFRAGKRRKGVPHRSPFGSLVVEF

SEQ ID NO: 1875 - protein, 260 aa, Zea mays subsp. mays
  peptide (1)..(260): Ceres Seq. ID no. 12373955
MQAARGRAQERVQHVLPRLHERRALLPVPRLPPRPPRHPDTEVLLPRRDPGVGDPEGAGHQRRADLHHQQRARGVPERAAAAEARQGRHQHLRGLRAQPPRHLPLLLPRLQDRQDLRRLPHPEEARHRRKEEEGEEACAAAEAAQGRGGLGGRRRRRLVHQHQRRQRQEQRGAELHPVDPAGDDRQQLPRREAAQGRAAPVAVRQPRGGVLDKKKGAPPGPDGRPPKKKTQRYTTVAYALLLHTIIYRRCRIDRATYIST

SEQ ID NO: 1876 - protein, 256 aa, Zea mays subsp. mays
  peptide (1)..(256): Ceres Seq. ID no. 12373956
  misc_feature (31)..(158): Pfam Name: Protein of unknown function, DUF597 Pfam Description: Protein of unknown function, DUF597
  misc_feature (15)..(249): Homolog of NCBI NO: 18411153 NR Description: expressed protein
  misc_feature (1)..(227): Homolog of NCBI NO: 37537092 NR Description: unknown protein [Oryza sativa (japonica
  misc_feature (1)..(250): Homolog of NCBI NO: 15236696 NR Description: putative protein; protein id: At4g17900.1
  misc_feature (200)..(256): Homolog of NCBI NO: 21554139 NR Description: unknown [Arabidopsis thaliana]
  misc_feature (25)..(158): Homolog of NCBI NO: 21554139 NR Description: unknown [Arabidopsis thaliana]
  misc_feature (200)..(256): Homolog of NCBI NO: 6714272 NR Description: F6N18.8 [Arabidopsis thaliana]
  misc_feature (28)..(158): Homolog of NCBI NO: 6714272 NR Description: F6N18.8 [Arabidopsis thaliana]
  misc_feature (200)..(256): Homolog of NCBI NO: 18398555 NR Description: expressed protein
  misc_feature (25)..(158): Homolog of NCBI NO: 18398555 NR Description: expressed protein
  misc_feature (19)..(256): Homolog of NCBI NO: 38346725 NR Description: OSJNBa0086O06.23 [Oryza sativa (japonica
MAIDDESPLRVNPRGGAMGGGERDGAENQRWPPWLKPLLGTSFFGQCKLHADAHKSECNMYCLDCMNGALCSQCLAYHRDHHAIQIRRSSYHDVIRVSEIQKVLDISGVQTYIINSARVVFLNERPQPRPGKGVTNTCEVCERSLLDTFRFCSLGCKIVRTSGDFRIRKKHAIVAKKKREKKHAPQQKQHRGAADSADDDDDDSSTSTSGGSDKSSVVQSFTPSTPPATTANSFRAGKRRKGVPHRSPFGSLVVEF

SEQ ID NO: 1877 - DNA, 1906 bp, Zea mays subsp. mays
  misc_feature (1)..(1906): Ceres Seq. ID no. 13498491
  misc_feature: MA Experiment ID: 108535 Result: Up-regulated in Transcription
  misc_feature: MA Experiment 108535 PARAMETER Experiment Name: Zm_Meristem_P Parameter: Age (day) Value: 8
  misc_feature: MA Experiment 108535 PARAMETER Experiment Name: Zm_Meristem_P Parameter: Organism Value: Zea mays
  misc_feature: MA Experiment 108535 PARAMETER Experiment Name: Zm_Meristem_P Parameter: Plant Line Value: 35A19
  misc_feature: MA Experiment 108535 PARAMETER Experiment Name: Zm_Meristem_P Parameter: Tissue Value: Root Meristem vs. Above Root Meristem
  misc_feature: MA Experiment ID: 108544 Result: Down-regulated in Transcription
  misc_feature: MA Experiment ID: 108556 Result: Down-regulated in Transcription
  misc_feature: MA Experiment 108556 PARAMETER Experiment Name: Zm_Drought_P Parameter: Age (day) Value: 9
  misc_feature: MA Experiment 108556 PARAMETER Experiment Name: Zm_Drought_P Parameter: Organism Value: Zea mays
  misc_feature: MA Experiment 108556 PARAMETER Experiment Name: Zm_Drought_P Parameter: Plant Line Value: 35A19
  misc_feature: MA Experiment 108556 PARAMETER Experiment Name: Zm_Drought_P Parameter: Timepoint (hr) Value: 24
  misc_feature: MA Experiment 108556 PARAMETER Experiment Name: Zm_Drought_P Parameter: Tissue Value: Aerial
  misc_feature: MA Experiment 108556 PARAMETER Experiment Name: Zm_Drought_P Parameter: Treatment Value: Drought vs. No Drought
  misc_feature: MA Experiment ID: 20000487 Result: Up-regulated in Transcription
  misc_feature: MA Experiment 20000487 PARAMETER Experiment Name: Zm_50mM_NH4NO3_L_to_H_P Parameter: Organism Value: Zea mays
  misc_feature: MA Experiment 20000487 PARAMETER Experiment Name: Zm_50mM_NH4NO3_L_to_H_P Parameter: Timepoint (hr) Value: 4
  misc_feature: MA Experiment 20000487 PARAMETER Experiment Name: Zm_50mM_NH4NO3_L_to_H_P Parameter: Tissue Value: Leaves
  misc_feature: MA Experiment 20000487 PARAMETER Experiment Name: Zm_50mM_NH4NO3_L_to_H_P Parameter: Treatment Value: 50mM NH4NO3 vs. 100mM Mannitol
cccacactccaccacccgcgccgccgcctcctactccgccccggcccctctgatccggaccgagcgccggccatggcgctcgccttcgacgagttcgggcgccccttcatcatcctgcgggagcaggagaagaagacgcgccttagggggctcgacgcgcagaaggccaacatcgcctcggccaaggccgtcgcgcggatcctccgcacgtcgcttggacccaagggcatggacaagatgctccagtcccccgacggcgacgtcatcatcacaaatgatggagcgaccatcctggagcagatggatgttgacaaccagatagcaaagctgatggtggagctgtcccgtagtcaagactatgaaatcggggatggtaccaccggggtggtagtcatggcaggggctcttctcgagcaggccgagaagcttctggagcgtggtattcaccccattagggtggctgaaggctatgagatggcgtcaaaggtagcttttgaccacctagaacatatctccgaaaagtttgagttcagtgcagacaacattgaacccctggtccagacctgcatgacaactctatcctcaaagattgttaaccgttgcaagcgggcgttggcagagattgctgtcaaagcagtacttgcggttgcaagatttggagaggaaggatgttaacttggatctaattaaagtagaaggcaaggttggtgggaagctggaggacactgaacttgtatatggaattattgttgacaaatatatgagccatccacaaatgccaaagagaattgaggatgctaagattgccatcttgacatgcccatttgagcctccgaagccaaagacaaagcataaggttgacattgacactgttgagaaattccagacactgcgtgagcaagagcagaaatactttgatgaaatggttcagaagtgcaaggatgctggtgcaaccctggttatttgccagtggggttttgatgatgaagccaatcatttattgatgcacagaaatctgccagcagttagatgggttggtggtgttgaattggaaattgattgccattgctacaggagggcggattgttccgagattccaagagttgagtcctgaaaagcttggaaaggctggatttagtcagagagaaatcattcggaacaacaaaggaccggatgctttacattgagaagtgtgccaattctagagctgttaaaacccattttcatccgtggtggaaacaaaatgatgattgaggagaccaagcgcagtcttcatgatgctctttgcgtggcaaggaatctgatccggaataactcaattgtgtacggtggcggctcagccgagatatcttgctcaattgctgttgaaactgctgcagataggcacccgggagttgagcagtatgctatcaggtcattcgctgatgcattagatgctgttccactagcgttggccgaaaacagtggtttgtcaccaattgataccttaactgcggtaaaagctcaacaagtcaaggagagcaacccccactgcggcatagactgcaacgacgttggcaccaccgacatgaaagaacagaacgtcttcgagaccctgattggcaagcagcaacagatcttgcttgccacccaggtggtgaagatgatcctgaagatcgacgacgtcatctcaccgtccgagtactgatggaaagaaggaacgggatggctatgctggatatgcgtaggcggcattgctgatgtgttgattggtgtacctccttatccaggcttgctgcctaccactcactccctgtgtgacgttttgccgaaattggtttgtattgtgcacgataatatctggaaatagactctagacagtccttagttatctttttattataaaaaaagtcagtgccttctcgtc

SEQ ID NO: 1878 - protein, 224 aa, Zea mays subsp. mays
  peptide (1)..(224): Ceres Seq. ID no. 13498492
  misc_feature (64)..(217): Pfam Name: TCP-1/cpn60 chaperonin family Pfam Description: TCP-1/cpn60 chaperonin family
  misc_feature (25)..(217): Homolog of NCBI NO: 1587206 NR Description: T complex protein
  misc_feature (25)..(217): Homolog of NCBI NO: 730919 NR Description: T-COMPLEX PROTEIN 1, EPSILON SUBUNIT
  misc_feature (25)..(217): Homolog of NCBI NO: 1729864 NR Description: T-COMPLEX PROTEIN 1, EPSILON SUBUNIT
  misc_feature (25)..(217): Homolog of NCBI NO: 15221770 NR Description: T-complex protein 1, epsilon subunit/chaperonin
  misc_feature (27)..(217): Homolog of NCBI NO: 27924333 NR Description: Similar to chaperonin containing TCP1, subunit 5
  misc_feature (27)..(217): Homolog of NCBI NO: 603955 NR Description: KIAA0098 protein [Homo sapiens]
  misc_feature (27)..(217): Homolog of NCBI NO: 12804225 NR Description: Unknown (protein for IMAGE:3543711) [Homo sapiens]
  misc_feature (27)..(217): Homolog of NCBI NO: 24307939 NR Description: chaperonin containing TCP1, subunit 5 (epsilon)
  misc_feature (27)..(217): Homolog of NCBI NO: 6683670 NR Description: CCT (chaperonin containing T-complex polypeptide
  misc_feature (27)..(217): Homolog of NCBI NO: 6671702 NR Description: chaperonin subunit 5 (epsilon) [Mus musculus]
PTLHHPRRRLLLRPGPSDPDRAPAMALAFDEFGRPFIILREQEKKTRLRGLDAQKANIASAKAVARILRTSLGPKGMDKMLQSPDGDVIITNDGATILEQMDVDNQIAKLMVELSRSQDYEIGDGTTGVVVMAGALLEQAEKLLERGIHPIRVAEGYEMASKVAFDHLEHISEKFEFSADNIEPLVQTCMTTLSSKIVNRCKRALAEIAVKAVLAVARFGEEGC

SEQ ID NO: 1879 - protein, 200 aa, Zea mays subsp. mays
  peptide (1)..(200): Ceres Seq. ID no. 13498493
  misc_feature (40)..(193): Pfam Name: TCP-1/cpn60 chaperonin family Pfam Description: TCP-1/cpn60 chaperonin family
  misc_feature (1)..(193): Homolog of NCBI NO: 1587206 NR Description: T complex protein
  misc_feature (1)..(193): Homolog of NCBI NO: 730919 NR Description: T-COMPLEX PROTEIN 1, EPSILON SUBUNIT
  misc_feature (1)..(193): Homolog of NCBI NO: 1729864 NR Description: T-COMPLEX PROTEIN 1, EPSILON SUBUNIT
  misc_feature (1)..(193): Homolog of NCBI NO: 15221770 NR Description: T-complex protein 1, epsilon subunit/chaperonin
  misc_feature (3)..(193): Homolog of NCBI NO: 27924333 NR Description: Similar to chaperonin containing TCP1, subunit 5
  misc_feature (3)..(193): Homolog of NCBI NO: 603955 NR Description: KIAA0098 protein [Homo sapiens]
  misc_feature (3)..(193): Homolog of NCBI NO: 24307939 NR Description: chaperonin containing TCP1, subunit 5 (epsilon)
  misc_feature (3)..(193): Homolog of NCBI NO: 12804225 NR Description: Unknown (protein for IMAGE:3543711) [Homo sapiens]
  misc_feature (3)..(193): Homolog of NCBI NO: 6683670 NR Description: CCT (chaperonin containing T-complex polypeptide
  misc_feature (3)..(193): Homolog of NCBI NO: 6671702 NR Description: chaperonin subunit 5 (epsilon) [Mus musculus]
MALAFDEFGRPFIILREQEKKTRLRGLDAQKANIASAKAVARILRTSLGPKGMDKMLQSPDGDVIITNDGATILEQMDVDNQIAKLMVELSRSQDYEIGDGTTGVVVMAGALLEQAEKLLERGIHPIRVAEGYEMASKVAFDHLEHISEKFEFSADNIEPLVQTCMTTLSSKIVNRCKRALAEIAVKAVLAVARFGEEGC

SEQ ID NO: 1880 - protein, 148 aa, Zea mays subsp. mays
  peptide (1)..(148): Ceres Seq. ID no. 13498494
  misc_feature (1)..(141): Pfam Name: TCP-1/cpn60 chaperonin family Pfam Description: TCP-1/cpn60 chaperonin family
  misc_feature (1)..(141): Homolog of NCBI NO: 1587206 NR Description: T complex protein
  misc_feature (1)..(141): Homolog of NCBI NO: 730919 NR Description: T-COMPLEX PROTEIN 1, EPSILON SUBUNIT
  misc_feature (1)..(141): Homolog of NCBI NO: 1729864 NR Description: T-COMPLEX PROTEIN 1, EPSILON SUBUNIT
  misc_feature (1)..(141): Homolog of NCBI NO: 15221770 NR Description: T-complex protein 1, epsilon subunit/chaperonin
  misc_feature (1)..(141): Homolog of NCBI NO: 27924333 NR Description: Similar to chaperonin containing TCP1, subunit 5
  misc_feature (1)..(141): Homolog of NCBI NO: 603955 NR Description: KIAA0098 protein [Homo sapiens]
  misc_feature (1)..(141): Homolog of NCBI NO: 24307939 NR Description: chaperonin containing TCP1, subunit 5 (epsilon)
  misc_feature (1)..(141): Homolog of NCBI NO: 12804225 NR Description: Unknown (protein for IMAGE:3543711) [Homo sapiens]
  misc_feature (1)..(141): Homolog of NCBI NO: 6683670 NR Description: CCT (chaperonin containing T-complex polypeptide
  misc_feature (1)..(141): Homolog of NCBI NO: 6671702 NR Description: chaperonin subunit 5 (epsilon) [Mus musculus]
MDKMLQSPDGDVIITNDGATILEQMDVDNQIAKLMVELSRSQDYEIGDGTTGVVVMAGALLEQAEKLLERGIHPIRVAEGYEMASKVAFDHLEHISEKFEFSADNIEPLVQTCMTTLSSKIVNRCKRALAEIAVKAVLAVARFGEEGC

SEQ ID NO: 1881 - DNA, 1510 bp, Zea mays subsp. mays
  misc_feature (1)..(1510): Ceres Seq. ID no. 12387174
  misc_feature: MA Experiment ID: 108504 Result: Up-regulated in Transcription
  misc_feature: MA Experiment 108504 PARAMETER Experiment Name: Zm_Drought_P Parameter: Age (day) Value: 8
  misc_feature: MA Experiment 108504 PARAMETER Experiment Name: Zm_Drought_P Parameter: Organism Value: Zea mays
  misc_feature: MA Experiment 108504 PARAMETER Experiment Name: Zm_Drought_P Parameter: Plant Line Value: 35A19
  misc_feature: MA Experiment 108504 PARAMETER Experiment Name: Zm_Drought_P Parameter: Timepoint (hr) Value: 12
  misc_feature: MA Experiment 108504 PARAMETER Experiment Name: Zm_Drought_P Parameter: Tissue Value: Aerial
  misc_feature: MA Experiment 108504 PARAMETER Experiment Name: Zm_Drought_P Parameter: Treatment Value: Drought vs. No Drought
  misc_feature: MA Experiment ID: 108522 Result: Up-regulated in Transcription
  misc_feature: MA Experiment 108522 PARAMETER Experiment Name: Zm_42deg_Heat_P Parameter: Age (day) Value: 8
  misc_feature: MA Experiment 108522 PARAMETER Experiment Name: Zm_42deg_Heat_P Parameter: Organism Value: Zea mays
  misc_feature: MA Experiment 108522 PARAMETER Experiment Name: Zm_42deg_Heat_P Parameter: Plant Line Value: 35A19
  misc_feature: MA Experiment 108522 PARAMETER Experiment Name: Zm_42deg_Heat_P Parameter: Temperature (deg C) Value: 42 vs. 22
  misc_feature: MA Experiment 108522 PARAMETER Experiment Name: Zm_42deg_Heat_P Parameter: Timepoint (hr) Value: 1
  misc_feature: MA Experiment 108522 PARAMETER Experiment Name: Zm_42deg_Heat_P Parameter: Tissue Value: Aerial
  misc_feature: MA Experiment ID: 108527 Result: Down-regulated in Transcription
  misc_feature: MA Experiment 108527 PARAMETER Experiment Name: Zm_5mM_NO_P Parameter: Age (day) Value: 8
  misc_feature: MA Experiment 108527 PARAMETER Experiment Name: Zm_5mM_NO_P Parameter: Organism Value: Zea mays
  misc_feature: MA Experiment 108527 PARAMETER Experiment Name: Zm_5mM_NO_P Parameter: Plant Line Value: 35A19
  misc_feature: MA Experiment 108527 PARAMETER Experiment Name: Zm_5mM_NO_P Parameter: Timepoint (hr) Value: 6
  misc_feature: MA Experiment 108527 PARAMETER Experiment Name: Zm_5mM_NO_P Parameter: Tissue Value: Aerial
  misc_feature: MA Experiment 108527 PARAMETER Experiment Name: Zm_5mM_NO_P Parameter: Treatment Value: 5mM NO vs. No Treatment
  misc_feature: MA Experiment ID: 108528 Result: Up-regulated in Transcription
  misc_feature: MA Experiment 108528 PARAMETER Experiment Name: Zm_Imbibed_Seeds_P Parameter: Age (day) Value: 5 vs. 2
  misc_feature: MA Experiment 108528 PARAMETER Experiment Name: Zm_Imbibed_Seeds_P Parameter: Organism Value: Zea mays
  misc_feature: MA Experiment 108528 PARAMETER Experiment Name: Zm_Imbibed_Seeds_P Parameter: Plant Line Value: 35A19
  misc_feature: MA Experiment 108528 PARAMETER Experiment Name: Zm_Imbibed_Seeds_P Parameter: Tissue Value: Aerial vs. Embryo
  misc_feature: MA Experiment ID: 108529 Result: Up-regulated in Transcription
  misc_feature: MA Experiment 108529 PARAMETER Experiment Name: Zm_Imbibed_Seeds_P Parameter: Age (day) Value: 5 vs. 2
  misc_feature: MA Experiment 108529 PARAMETER Experiment Name: Zm_Imbibed_Seeds_P Parameter: Organism Value: Zea mays
  misc_feature: MA Experiment 108529 PARAMETER Experiment Name: Zm_Imbibed_Seeds_P Parameter: Plant Line Value: 35A19
  misc_feature: MA Experiment 108529 PARAMETER Experiment Name: Zm_Imbibed_Seeds_P Parameter: Tissue Value: Roots vs. Embryo
  misc_feature: MA Experiment ID: 108530 Result: Up-regulated in Transcription
  misc_feature: MA Experiment 108530 PARAMETER Experiment Name: Zm_Imbibed_Seeds_P Parameter: Age (day) Value: 6 vs. 2
  misc_feature: MA Experiment 108530 PARAMETER Experiment Name: Zm_Imbibed_Seeds_P Parameter: Organism Value: Zea mays
  misc_feature: MA Experiment 108530 PARAMETER Experiment Name: Zm_Imbibed_Seeds_P Parameter: Plant Line Value: 35A19
  misc_feature: MA Experiment 108530 PARAMETER Experiment Name: Zm_Imbibed_Seeds_P Parameter: Tissue Value: Aerial vs. Embryo
  misc_feature: MA Experiment ID: 108535 Result: Down-regulated in Transcription
  misc_feature: MA Experiment 108535 PARAMETER Experiment Name: Zm_Meristem_P Parameter: Age (day) Value: 8
  misc_feature: MA Experiment 108535 PARAMETER Experiment Name: Zm_Meristem_P Parameter: Organism Value: Zea mays
  misc_feature: MA Experiment 108535 PARAMETER Experiment Name: Zm_Meristem_P Parameter: Plant Line Value: 35A19
  misc_feature: MA Experiment 108535 PARAMETER Experiment Name: Zm_Meristem_P Parameter: Tissue Value: Root Meristem vs. Above Root Meristem
  misc_feature: MA Experiment ID: 108539 Result: Up-regulated in Transcription
  misc_feature: MA Experiment 108539 PARAMETER Experiment Name: Zm_20percent_PEG_P Parameter: Age (day) Value: 8
  misc_feature: MA Experiment 108539 PARAMETER Experiment Name: Zm_20percent_PEG_P Parameter: Organism Value: Zea mays
  misc_feature: MA Experiment 108539 PARAMETER Experiment Name: Zm_20percent_PEG_P Parameter: Plant Line Value: 35A19
  misc_feature: MA Experiment 108539 PARAMETER Experiment Name: Zm_20percent_PEG_P Parameter: Timepoint (hr) Value: 1
  misc_feature: MA Experiment 108539 PARAMETER Experiment Name: Zm_20percent_PEG_P Parameter: Tissue Value: Aerial
  misc_feature: MA Experiment 108539 PARAMETER Experiment Name: Zm_20percent_PEG_P Parameter: Treatment Value: 20percent PEG vs. No Treatment
  misc_feature: MA Experiment ID: 108540 Result: Up-regulated in Transcription
  misc_feature: MA Experiment 108540 PARAMETER Experiment Name: Zm_20percent_PEG_P Parameter: Age (day) Value: 8
  misc_feature: MA Experiment 108540 PARAMETER Experiment Name: Zm_20percent_PEG_P Parameter: Organism Value: Zea mays
  misc_feature: MA Experiment 108540 PARAMETER Experiment Name: Zm_20percent_PEG_P Parameter: Plant Line Value: 35A19
  misc_feature: MA Experiment 108540 PARAMETER Experiment Name: Zm_20percent_PEG_P Parameter: Timepoint (hr) Value: 6
  misc_feature: MA Experiment 108540 PARAMETER Experiment Name: Zm_20percent_PEG_P Parameter: Tissue Value: Aerial
  misc_feature: MA Experiment 108540 PARAMETER Experiment Name: Zm_20percent_PEG_P Parameter: Treatment Value: 20percent PEG vs. No Treatment
  misc_feature: MA Experiment ID: 108547 Result: Up-regulated in Transcription
  misc_feature: MA Experiment 108547 PARAMETER Experiment Name: Zm_Imbibed_Seeds_P Parameter: Age (day) Value: 4 vs. 2
  misc_feature: MA Experiment 108547 PARAMETER Experiment Name: Zm_Imbibed_Seeds_P Parameter: Organism Value: Zea mays
  misc_feature: MA Experiment 108547 PARAMETER Experiment Name: Zm_Imbibed_Seeds_P Parameter: Plant Line Value: 35A19
  misc_feature: MA Experiment 108547 PARAMETER Experiment Name: Zm_Imbibed_Seeds_P Parameter: Tissue Value: Aerial vs. Embryo
  misc_feature: MA Experiment ID: 108556 Result: Up-regulated in Transcription
  misc_feature: MA Experiment 108556 PARAMETER Experiment Name: Zm_Drought_P Parameter: Age (day) Value: 9
  misc_feature: MA Experiment 108556 PARAMETER Experiment Name: Zm_Drought_P Parameter: Organism Value: Zea mays
  misc_feature: MA Experiment 108556 PARAMETER Experiment Name: Zm_Drought_P Parameter: Plant Line Value: 35A19
  misc_feature: MA Experiment 108556 PARAMETER Experiment Name: Zm_Drought_P Parameter: Timepoint (hr) Value: 24
  misc_feature: MA Experiment 108556 PARAMETER Experiment Name: Zm_Drought_P Parameter: Tissue Value: Aerial
  misc_feature: MA Experiment 108556 PARAMETER Experiment Name: Zm_Drought_P Parameter: Treatment Value: Drought vs. No Drought
  misc_feature: MA Experiment ID: 108559 Result: Down-regulated in Transcription
  misc_feature: MA Experiment 108559 PARAMETER Experiment Name: Zm_5mM_NO_P Parameter: Age (day) Value: 8
  misc_feature: MA Experiment 108559 PARAMETER Experiment Name: Zm_5mM_NO_P Parameter: Organism Value: Zea mays
  misc_feature: MA Experiment 108559 PARAMETER Experiment Name: Zm_5mM_NO_P Parameter: Plant Line Value: 35A19
  misc_feature: MA Experiment 108559 PARAMETER Experiment Name: Zm_5mM_NO_P Parameter: Timepoint (hr) Value: 12
  misc_feature: MA Experiment 108559 PARAMETER Experiment Name: Zm_5mM_NO_P Parameter: Tissue Value: Aerial
  misc_feature: MA Experiment 108559 PARAMETER Experiment Name: Zm_5mM_NO_P Parameter: Treatment Value: 5mM NO vs. No Treatment
  misc_feature: MA Experiment ID: 108687 Result: Down-regulated in Transcription
  misc_feature: MA Experiment 108687 PARAMETER Experiment Name: Zm_Embryos-Flowers__P Parameter: Tissue Value: Embryo vs. Aerial+
  misc_feature: MA Experiment ID: 20000477 Result: Down-regulated in Transcription
  misc_feature: MA Experiment 20000477 PARAMETER Experiment Name: Zm_5mM_SA_P Parameter: Age (day) Value: 10
  misc_feature: MA Experiment 20000477 PARAMETER Experiment Name: Zm_5mM_SA_P Parameter: Organism Value: Zea mays
  misc_feature: MA Experiment 20000477 PARAMETER Experiment Name: Zm_5mM_SA_P Parameter: Plant Line Value: 35A19
  misc_feature: MA Experiment 20000477 PARAMETER Experiment Name: Zm_5mM_SA_P Parameter: Timepoint (hr) Value: 48
  misc_feature: MA Experiment 20000477 PARAMETER Experiment Name: Zm_5mM_SA_P Parameter: Tissue Value: Aerial
  misc_feature: MA Experiment 20000477 PARAMETER Experiment Name: Zm_5mM_SA_P Parameter: Treatment Value: 5mM SA vs. No Treatment
  misc_feature: MA Experiment ID: 20000478 Result: Down-regulated in Transcription
  misc_feature: MA Experiment 20000478 PARAMETER Experiment Name: Zm_5mM_SA_P Parameter: Age (day) Value: 11
  misc_feature: MA Experiment 20000478 PARAMETER Experiment Name: Zm_5mM_SA_P Parameter: Organism Value: Zea mays
  misc_feature: MA Experiment 20000478 PARAMETER Experiment Name: Zm_5mM_SA_P Parameter: Plant Line Value: 35A19
  misc_feature: MA Experiment 20000478 PARAMETER Experiment Name: Zm_5mM_SA_P Parameter: Timepoint (hr) Value: 72
  misc_feature: MA Experiment 20000478 PARAMETER Experiment Name: Zm_5mM_SA_P Parameter: Tissue Value: Aerial
  misc_feature: MA Experiment 20000478 PARAMETER Experiment Name: Zm_5mM_SA_P Parameter: Treatment Value: 5mM SA vs. No Treatment
  misc_feature: MA Experiment ID: 20000479 Result: Up-regulated in Transcription
  misc_feature: MA Experiment 20000479 PARAMETER Experiment Name: Zm_Drought_P Parameter: Age (day) Value: 10
  misc_feature: MA Experiment 20000479 PARAMETER Experiment Name: Zm_Drought_P Parameter: Organism Value: Zea mays
  misc_feature: MA Experiment 20000479 PARAMETER Experiment Name: Zm_Drought_P Parameter: Plant Line Value: 35A19
  misc_feature: MA Experiment 20000479 PARAMETER Experiment Name: Zm_Drought_P Parameter: Timepoint (hr) Value: 48
  misc_feature: MA Experiment 20000479 PARAMETER Experiment Name: Zm_Drought_P Parameter: Tissue Value: Aerial
  misc_feature: MA Experiment 20000479 PARAMETER Experiment Name: Zm_Drought_P Parameter: Treatment Value: Drought vs. No Drought
  misc_feature: MA Experiment ID: 20001608 Result: Down-regulated in Transcription
  misc_feature: MA Experiment 20001608 PARAMETER Experiment Name: Zm_50ppm_KNO3_L-to-H_P Parameter: Age (day) Value: 21
  misc_feature: MA Experiment 20001608 PARAMETER Experiment Name: Zm_50ppm_KNO3_L-to-H_P Parameter: Organism Value: Zea mays
  misc_feature: MA Experiment 20001608 PARAMETER Experiment Name: Zm_50ppm_KNO3_L-to-H_P Parameter: Plant Line Value: 35A19
  misc_feature: MA Experiment 20001608 PARAMETER Experiment Name: Zm_50ppm_KNO3_L-to-H_P Parameter: Timepoint (hr) Value: 48
  misc_feature: MA Experiment 20001608 PARAMETER Experiment Name: Zm_50ppm_KNO3_L-to-H_P Parameter: Tissue Value: Shoots
  misc_feature: MA Experiment 20001608 PARAMETER Experiment Name: Zm_50ppm_KNO3_L-to-H_P Parameter: Treatment Value: 50ppm KNO3 vs. 50ppm KCl
gcacgagaccattacctagaacatcctaatcgaaaaaagcgaaagctcaagcaaatacaagctctcagttagaccacactcaaaccagccacggacagcctcaaaatcccgagcaggagctcgctcgtagccccgagaacccgaaagctctgcagcgagatgtctcccgagctgaccggcaagatggccgccaaggccgccgccgccgctgcggcggtgaagcccgcgacgagggcgtacgtgacgttcctggcgggcgacggcgactactggaagggcgtggtgggcctggccaagggcctgcgcaaggtcggctcggcctatcccctggtggtggcccttctgcccgacgtgccggagtcccaccgccgcatcctcgtctcgcagggctgcatcctccgcgagatcgagcccgtgtacccgcctgagaaccagacgcagttcgccatggcgtactacgtcatcaactactccaagctccgcatctgggagttcgtggagtacgagaggatggtgtacctggacgcggacatccaggtgttcgagaacatcgacgagctgttcgagctcgagaaggggtacttctacgcggtgatggactgcttctgcgagaagacgtggagccacaccccgcagtacaggatcggctactgccaacagtgcccggacaaggtggcgtggccgaccaccgagctgggccctccgcccccgctctacttcaacgccggcatgttcgcgcacgagcccagcatggccaccgccaaggcactcctcgacaccctccgcgtcactccgcccacccccttcgcagagcaggacttcctgaacatgttcttcagggaccagtacaggccgatccctaacgtgtacaacctcgtgctcgccatgctctggaggcaccccgagaacgtccagctggagaaggtgaaggtcgtgcactactgcgcggcggggtccaagccgtggaggttcacgggcaaggaggccaacatggacagggaggacatcaagacgctggtgaacaagtggtgggacatctacaacgacgaggcactggacttcaagggcctgcccctctcgcccgccgacgccgacgacgaggtggaggcggtggccaagaagccgctccgcgcggcgctggcggaggccggcacggtcaagtacgtcaccgcgccctcggccgcgtgacaccgtgcttcggcttcccgccggtggccgcgctatggcttttgcgcggtcctcacaagtccgtaaagaagaatctcactataaggcctttgttttgaattttgtttatgaattagggtgtctaattttggatcagttcctttcccttgtgtgtctatttagggtgtgagcttatatatatatagtaccaattcaaggtgcaagcgttcgtcaggaattgggctttatgaatacgcccttcggtcacagctagagtatttgtcctgtaccgagggattatgtgtattttgcttggtgaattaatatataaaatacgaagccg

SEQ ID NO: 1882 - protein, 342 aa, Zea mays subsp. mays
  peptide (1)..(342): Ceres Seq. ID no. 12387175
  misc_feature (1)..(342): Homolog of NCBI NO: 15223567 NR Description: water stress-induced protein, putative
  misc_feature (1)..(342): Homolog of NCBI NO: 15226522 NR Description: putative galactinol synthase
  misc_feature (2)..(342): Homolog of NCBI NO: 4588376 NR Description: galactinol synthase [Brassica napus]
  misc_feature (5)..(342): Homolog of NCBI NO: 34898096 NR Description: WSI76 protein induced by water stress
  misc_feature (25)..(342): Homolog of NCBI NO: 15217486 NR Description: putative galactinol synthase
  misc_feature (1)..(342): Homolog of NCBI NO: 5541885 NR Description: putative galactinol synthase [Pisum sativum]
  misc_feature (10)..(342): Homolog of NCBI NO: 29569824 NR Description: galactinol synthase [Cucumis sativus]
  misc_feature (1)..(342): Homolog of NCBI NO: 15219093 NR Description: galactinol synthase, putative; protein id:
  misc_feature (10)..(342): Homolog of NCBI NO: 18874402 NR Description: galactinol synthase [Cucumis melo]
  misc_feature (1)..(342): Homolog of NCBI NO: 20340247 NR Description: galactinol synthase-like protein [Thellungiella
MSPELTGKMAAKAAAAAAAVKPATRAYVTFLAGDGDYWKGVVGLAKGLRKVGSAYPLVVALLPDVPESHRRILVSQGCILREIEPVYPPENQTQFAMAYYVINYSKLRIWEFVEYERMVYLDADIQVFENIDELFELEKGYFYAVMDCFCEKTWSHTPQYRIGYCQQCPDKVAWPTTELGPPPPLYFNAGMFAHEPSMATAKALLDTLRVTPPTPFAEQDFLNMFFRDQYRPIPNVYNLVLAMLWRHPENVQLEKVKVVHYCAAGSKPWRFTGKEANMDREDIKTLVNKWWDIYNDEALDFKGLPLSPADADDEVEAVAKKPLRAALAEAGTVKYVTAPSAA

SEQ ID NO: 1883 - protein, 334 aa, Zea mays subsp. mays
  peptide (1)..(334): Ceres Seq. ID no. 12387176
  misc_feature (17)..(334): Homolog of NCBI NO: 15217486 NR Description: putative galactinol synthase
  misc_feature (1)..(334): Homolog of NCBI NO: 5541885 NR Description: putative galactinol synthase [Pisum sativum]
  misc_feature (2)..(334): Homolog of NCBI NO: 29569824 NR Description: galactinol synthase [Cucumis sativus]
  misc_feature (1)..(334): Homolog of NCBI NO: 15219093 NR Description: galactinol synthase, putative; protein id:
  misc_feature (2)..(334): Homolog of NCBI NO: 18874402 NR Description: galactinol synthase [Cucumis melo]
  misc_feature (1)..(334): Homolog of NCBI NO: 20340247 NR Description: galactinol synthase-like protein [Thellungiella
  misc_feature (1)..(334): Homolog of NCBI NO: 15223567 NR Description: water stress-induced protein, putative
  misc_feature (1)..(334): Homolog of NCBI NO: 15226522 NR Description: putative galactinol synthase
  misc_feature (1)..(334): Homolog of NCBI NO: 4588376 NR Description: galactinol synthase [Brassica napus]
  misc_feature (1)..(334): Homolog of NCBI NO: 34898096 NR Description: WSI76 protein induced by water stress
MAAKAAAAAAAVKPATRAYVTFLAGDGDYWKGVVGLAKGLRKVGSAYPLVVALLPDVPESHRRILVSQGCILREIEPVYPPENQTQFAMAYYVINYSKLRIWEFVEYERMVYLDADIQVFENIDELFELEKGYFYAVMDCFCEKTWSHTPQYRIGYCQQCPDKVAWPTTELGPPPPLYFNAGMFAHEPSMATAKALLDTLRVTPPTPFAEQDFLNMFFRDQYRPIPNVYNLVLAMLWRHPENVQLEKVKVVHYCAAGSKPWRFTGKEANMDREDIKTLVNKWWDIYNDEALDFKGLPLSPADADDEVEAVAKKPLRAALAEAGTVKYVTAPSAA

SEQ ID NO: 1884 - protein, 246 aa, Zea mays subsp. mays
  peptide (1)..(246): Ceres Seq. ID no. 12387177
  misc_feature (1)..(246): Homolog of NCBI NO: 15217486 NR Description: putative galactinol synthase
  misc_feature (1)..(246): Homolog of NCBI NO: 5541885 NR Description: putative galactinol synthase [Pisum sativum]
  misc_feature (1)..(246): Homolog of NCBI NO: 29569824 NR Description: galactinol synthase [Cucumis sativus]
  misc_feature (1)..(246): Homolog of NCBI NO: 15219093 NR Description: galactinol synthase, putative; protein id:
  misc_feature (1)..(246): Homolog of NCBI NO: 18874402 NR Description: galactinol synthase [Cucumis melo]
  misc_feature (1)..(246): Homolog of NCBI NO: 20340247 NR Description: galactinol synthase-like protein [Thellungiella
  misc_feature (1)..(246): Homolog of NCBI NO: 15223567 NR Description: water stress-induced protein, putative
  misc_feature (1)..(246): Homolog of NCBI NO: 15226522 NR Description: putative galactinol synthase
  misc_feature (1)..(246): Homolog of NCBI NO: 4588376 NR Description: galactinol synthase [Brassica napus]
  misc_feature (1)..(246): Homolog of NCBI NO: 34898096 NR Description: WSI76 protein induced by water stress
MAYYVINYSKLRIWEFVEYERMVYLDADIQVFENIDELFELEKGYFYAVMDCFCEKTWSHTPQYRIGYCQQCPDKVAWPTTELGPPPPLYFNAGMFAHEPSMATAKALLDTLRVTPPTPFAEQDFLNMFFRDQYRPIPNVYNLVLAMLWRHPENVQLEKVKVVHYCAAGSKPWRFTGKEANMDREDIKTLVNKWWDIYNDEALDFKGLPLSPADADDEVEAVAKKPLRAALAEAGTVKYVTAPSAA

SEQ ID NO: 1885 - DNA, 1651 bp, Zea mays subsp. mays
  misc_feature (1)..(1651): Ceres Seq. ID no. 12410958
  misc_feature: MA Experiment ID: 108527 Result: Up-regulated in Transcription
  misc_feature: MA Experiment 108527 PARAMETER Experiment Name: Zm_5mM_NO_P Parameter: Age (day) Value: 8
  misc_feature: MA Experiment 108527 PARAMETER Experiment Name: Zm_5mM_NO_P Parameter: Organism Value: Zea mays
  misc_feature: MA Experiment 108527 PARAMETER Experiment Name: Zm_5mM_NO_P Parameter: Plant Line Value: 35A19
  misc_feature: MA Experiment 108527 PARAMETER Experiment Name: Zm_5mM_NO_P Parameter: Timepoint (hr) Value: 6
  misc_feature: MA Experiment 108527 PARAMETER Experiment Name: Zm_5mM_NO_P Parameter: Tissue Value: Aerial
  misc_feature: MA Experiment 108527 PARAMETER Experiment Name: Zm_5mM_NO_P Parameter: Treatment Value: 5mM NO vs. No Treatment
aataccagcagtggccagtgggggggagactgggatctgcgaacgggagggcgttataattgtcggcgcgcggtagccagtaggcgccgttccgccgccgccgccccctcgcccgacgttactcgccgccagcacaggcgcggaccccgcgcgccactatggcaaggtcatggctgataacttgtaggggaattgctaagaaaataagatatgcaaatcctagcgctaatcgccaaataagccaactgattgcagaagcacggagggaatgcccaaactgcagttatgttattgataacagcgatgttgccatgcagtggcctggggctgcctgctggagtcaagtttgatccttctgaattggagttgcttcaacatttagaacaaaaggttggcctgggagattcaagaccacatgtgctcattgatgaatttattccaactatagacaatgatgagggaatctgctattcgcatcctgaaaatcttcctggtatgaaaacagatggtagcaatgctcatttcttccatagagtttcaaaagcgtatggttatggccagcgcaagcgtcgaaggattatcaactgcagcgatcacactgttcctgatgatcgtgtgagatggcacaagactggaagatccaaagccatatatgacaatggcgttataaaaggttggaagaagataatggtgctgcacaaaactttgcgaagtggtggtaagcgggagagagctaaatgggtaatgcatcagtatcaccttggaaaagaggaagatgaaaaggacggggagcttgtagtatctaaaatcttcttccagttggcaaataagagtatggaaatttctgaaacagaaactgcttgtgaagaacctgaagcacctgcttcagtgattggtccgaaaactccaaagacaatcacaccgcagccacgtcatcctaaaagtagtccatgtgaaactcagcagaatatttccattgtgcaggatcagctactactggacagcgaaggcgagcctaccatgcctattgttagtctggaggatgatgctatgaaccctgcatggtgtgctgtagctgaagaacggcaggttgttggagaggcatctcgggctcagtcgaactcagttgaaactcttctttgtcgtgaagacccaaattccttaaactacgaagcattgcttccctgggactatccgattctgtcccaatgcaggaatgagatgcttgatgggaacctgaatggatatgggttgcctgatcaccataatgtggatcttggaacgcctccagatcttcagcttgctgactttcagtttggttctcaggaaagccttggcagctggctggatcgcatctaggaagataactagtgtgaactgtttgctcgaacagcctgatcgatgggcttctttttgcacaggatatggtaaccggtggtggctattttgggacttacacaacacaaagattgcatgcttgcattagtattgtatttgtgttgcgctgtcaaacatcatctggaaaccaagaacctttcgcccttttctattttctttagaagaaatgaacaacctttaacagctggctactagacttgaagtttagttgtatgtttggcacggttggtgcaaccctgcattgccccgttgt

SEQ ID NO: 1886 - protein, 357 aa, Zea mays subsp. mays
  peptide (1)..(357): Ceres Seq. ID no. 12410959
  misc_feature (15)..(160): Pfam Name: No apical meristem (NAM) protein Pfam Description: No apical meristem (NAM) protein
  misc_feature (3)..(178): Homolog of NCBI NO: 15241889 NR Description: putative protein; protein id: At5g56620.1
  misc_feature (14)..(196): Homolog of NCBI NO: 15235314 NR Description: similar to NAM protein, putative; protein id:
  misc_feature (9)..(178): Homolog of NCBI NO: 15233497 NR Description: putative protein; protein id: At4g29230.1
  misc_feature (14)..(243): Homolog of NCBI NO: 15241416 NR Description: putative protein; protein id: At5g14490.1
  misc_feature (14)..(217): Homolog of NCBI NO: 25518116 NR Description: hypothetical protein F2J7.1 - Arabidopsis
  misc_feature (14)..(215): Homolog of NCBI NO: 15232150 NR Description: hypothetical protein; protein id: At3g01600.1
  misc_feature (269)..(353): Homolog of NCBI NO: 30689293 NR Description: No apical meristem (NAM) protein family
  misc_feature (14)..(217): Homolog of NCBI NO: 30689293 NR Description: No apical meristem (NAM) protein family
  misc_feature (269)..(353): Homolog of NCBI NO: 12320749 NR Description: unknown protein [Arabidopsis thaliana]
  misc_feature (14)..(217): Homolog of NCBI NO: 12320749 NR Description: unknown protein [Arabidopsis thaliana]
MLLITAMLPCSGLGLPAGVKFDPSELELLQHLEQKVGLGDSRPHVLIDEFIPTIDNDEGICYSHPENLPGMKTDGSNAHFFHRVSKAYGYGQRKRRRIINCSDHTVPDDRVRWHKTGRSKAIYDNGVIKGWKKIMVLHKTLRSGGKRERAKWVMHQYHLGKEEDEKDGELVVSKIFFQLANKSMEISETETACEEPEAPASVIGPKTPKTITPQPRHPKSSPCETQQNISIVQDQLLLDSEGEPTMPIVSLEDDAMNPAWCAVAEERQVVGEASRAQSNSVETLLCREDPNSLNYEALLPWDYPILSQCRNEMLDGNLNGYGLPDHHNVDLGTPPDLQLADFQFGSQESLGSWLDRI

SEQ ID NO: 1887 - protein, 351 aa, Zea mays subsp. mays
  peptide (1)..(351): Ceres Seq. ID no. 12410960
  misc_feature (9)..(154): Pfam Name: No apical meristem (NAM) protein Pfam Description: No apical meristem (NAM) protein
  misc_feature (1)..(172): Homolog of NCBI NO: 15241889 NR Description: putative protein; protein id: At5g56620.1
  misc_feature (8)..(190): Homolog of NCBI NO: 15235314 NR Description: similar to NAM protein, putative; protein id:
  misc_feature (3)..(172): Homolog of NCBI NO: 15233497 NR Description: putative protein; protein id: At4g29230.1
  misc_feature (8)..(237): Homolog of NCBI NO: 15241416 NR Description: putative protein; protein id: At5g14490.1
  misc_feature (8)..(211): Homolog of NCBI NO: 25518116 NR Description: hypothetical protein F2J7.1 - Arabidopsis
  misc_feature (8)..(209): Homolog of NCBI NO: 15232150 NR Description: hypothetical protein; protein id: At3g01600.1
  misc_feature (263)..(347): Homolog of NCBI NO: 30689293 NR Description: No apical meristem (NAM) protein family
  misc_feature (8)..(211): Homolog of NCBI NO: 30689293 NR Description: No apical meristem (NAM) protein family
  misc_feature (263)..(347): Homolog of NCBI NO: 12320749 NR Description: unknown protein [Arabidopsis thaliana]
  misc_feature (8)..(211): Homolog of NCBI NO: 12320749 NR Description: unknown protein [Arabidopsis thaliana]
MLPCSGLGLPAGVKFDPSELELLQHLEQKVGLGDSRPHVLIDEFIPTIDNDEGICYSHPENLPGMKTDGSNAHFFHRVSKAYGYGQRKRRRIINCSDHTVPDDRVRWHKTGRSKAIYDNGVIKGWKKIMVLHKTLRSGGKRERAKWVMHQYHLGKEEDEKDGELVVSKIFFQLANKSMEISETETACEEPEAPASVIGPKTPKTITPQPRHPKSSPCETQQNISIVQDQLLLDSEGEPTMPIVSLEDDAMNPAWCAVAEERQVVGEASRAQSNSVETLLCREDPNSLNYEALLPWDYPILSQCRNEMLDGNLNGYGLPDHHNVDLGTPPDLQLADFQFGSQESLGSWLDRI

SEQ ID NO: 1888 - protein, 287 aa, Zea mays subsp. mays
  peptide (1)..(287): Ceres Seq. ID no. 12410961
  misc_feature (1)..(90): Pfam Name: No apical meristem (NAM) protein Pfam Description: No apical meristem (NAM) protein
  misc_feature (1)..(108): Homolog of NCBI NO: 15241889 NR Description: putative protein; protein id: At5g56620.1
  misc_feature (1)..(126): Homolog of NCBI NO: 15235314 NR Description: similar to NAM protein, putative; protein id:
  misc_feature (1)..(108): Homolog of NCBI NO: 15233497 NR Description: putative protein; protein id: At4g29230.1
  misc_feature (1)..(173): Homolog of NCBI NO: 15241416 NR Description: putative protein; protein id: At5g14490.1
  misc_feature (1)..(147): Homolog of NCBI NO: 25518116 NR Description: hypothetical protein F2J7.1 - Arabidopsis
  misc_feature (1)..(145): Homolog of NCBI NO: 15232150 NR Description: hypothetical protein; protein id: At3g01600.1
  misc_feature (199)..(283): Homolog of NCBI NO: 30689293 NR Description: No apical meristem (NAM) protein family
  misc_feature (1)..(147): Homolog of NCBI NO: 30689293 NR Description: No apical meristem (NAM) protein family
  misc_feature (199)..(283): Homolog of NCBI NO: 12320749 NR Description: unknown protein [Arabidopsis thaliana]
  misc_feature (1)..(147): Homolog of NCBI NO: 12320749 NR Description: unknown protein [Arabidopsis thaliana]
MKTDGSNAHFFHRVSKAYGYGQRKRRRIINCSDHTVPDDRVRWHKTGRSKAIYDNGVIKGWKKIMVLHKTLRSGGKRERAKWVMHQYHLGKEEDEKDGELVVSKIFFQLANKSMEISETETACEEPEAPASVIGPKTPKTITPQPRHPKSSPCETQQNISIVQDQLLLDSEGEPTMPIVSLEDDAMNPAWCAVAEERQVVGEASRAQSNSVETLLCREDPNSLNYEALLPWDYPILSQCRNEMLDGNLNGYGLPDHHNVDLGTPPDLQLADFQFGSQESLGSWLDRI

SEQ ID NO: 1889 - DNA, 1558 bp, Zea mays subsp. mays
  misc_feature (1)..(1558): Ceres Seq. ID no. 12351948
  misc_feature: MA Experiment ID: 108522 Result: Up-regulated in Transcription
  misc_feature: MA Experiment 108522 PARAMETER Experiment Name: Zm_42deg_Heat_P Parameter: Age (day) Value: 8
  misc_feature: MA Experiment 108522 PARAMETER Experiment Name: Zm_42deg_Heat_P Parameter: Organism Value: Zea mays
  misc_feature: MA Experiment 108522 PARAMETER Experiment Name: Zm_42deg_Heat_P Parameter: Plant Line Value: 35A19
  misc_feature: MA Experiment 108522 PARAMETER Experiment Name: Zm_42deg_Heat_P Parameter: Temperature (deg C) Value: 42 vs. 22
  misc_feature: MA Experiment 108522 PARAMETER Experiment Name: Zm_42deg_Heat_P Parameter: Timepoint (hr) Value: 1
  misc_feature: MA Experiment 108522 PARAMETER Experiment Name: Zm_42deg_Heat_P Parameter: Tissue Value: Aerial
  misc_feature: MA Experiment ID: 20000492 Result: Up-regulated in Transcription
  misc_feature: MA Experiment 20000492 PARAMETER Experiment Name: Zm_Hybrid_Seed_Dev_P Parameter: DAP Value: 12
  misc_feature: MA Experiment 20000492 PARAMETER Experiment Name: Zm_Hybrid_Seed_Dev_P Parameter: Organism Value: Zea mays
  misc_feature: MA Experiment 20000492 PARAMETER Experiment Name: Zm_Hybrid_Seed_Dev_P Parameter: Plant Line Value: 35A19
  misc_feature: MA Experiment 20000492 PARAMETER Experiment Name: Zm_Hybrid_Seed_Dev_P Parameter: Tissue Value: Fert Kernel vs. Unfert Floret
aagcttccgcttctctcatggccgacgccaccgccgccctctcagctcggagcaaggtgcaggctttcctggaggctgcgcgcgccggcgacctccaatccctcaagaacctcgtcgcggcgctcgacgaggacggcacgggcgccgcctccgtcgccgccgccgtgcgtgacgccaacaagcgcaccgccctccacttcgcggcgatcggatgtcgcaccgacgtctgtgaattcctcatcggcgagctcggcctccctgtcgacccaaaggacgatgatggcgaaactccgctcatccatgcgacacgccagggccatctggacactgtcaagtatcttctcgaccatggagctgatccttcgctggccaccagcctaggagccacagcgctacaccatgctgcaggcatagggaacacggaactcatgaagcttctcctctccaagggagttgacgtcgagtcagaaagtgatgctggcactccccttgtgtgggctgctggtcatggcaaccaggatgctgtcaaacttctgcttcaacacaatgctaagccaaatactgaaaacgatgatggtgtcacagcattgttatctgctgttgctgcaggttccctcccatgcttggaggtcctaattgaggctggtgcaaacccaaatgtcaaggctggtggagcaaccccattgcatattgctgcagatagtggaaatatagaagtcatcaaatgtttgcttaaagctggagctgacccaaatacctgtgatgatgatgaattgaagccagttcaggttgctgcttggagaaataaccatgaagctgttgaacttcttttaccgttaacatccccaattccaggtgtttcaaactggaacgtagatgggattatagaacacatgctccctaaagagtatgaggaaaagtctcaactgaaggaagcgacatctctgaaatcaggcctaacacaaactattgaggtgtcatctgaagcaaaaaagaggtccttggaagccaaatcaagaggtgatgatgccttcagaagaaaggactaccttgtagcggtggatgcttatacgcaggctacagagttggacccaactgatgcaacagtgctctcaaacagaagcctgtgctggctgcgggcagggcaagctgagcgtgctctggaggacgccaaagcatgccgtgcattgagaccagattgggcgaaagcctgctacagggaaggtgcggcgcatcgtctgttacagaggtttgaggaagccgcaaacgccttctatgagggggtgcaacttgagccagagaacacggagctcgtcaacgcattcagggaggccatcgaagccgggaggaagttccatggcgtcgacacgccaagctcaacacaatgagactttgctgtttggttggataggtagatgatgaggcggatggacatgaacgttgtcttagttggaatttggtgagatgatgaatgagatgatcatgaaatttgaaagagcgaatttgccagatttattttgtgttttgtgattgttttcttaaacttgttttcttgcgc

SEQ ID NO: 1890 - protein, 461 aa, Zea mays subsp. mays
  peptide (1)..(461): Ceres Seq. ID no. 12351949
  misc_feature (401)..(434): Pfam Name: TPR Domain Pfam Description: TPR Domain
  misc_feature (324)..(437): Homolog of NCBI NO: 13435243 NR Description: putative gag-pol polyprotein [Oryza sativa]
  misc_feature (23)..(297): Homolog of NCBI NO: 13435243 NR Description: putative gag-pol polyprotein [Oryza sativa]
  misc_feature (300)..(455): Homolog of NCBI NO: 34896858 NR Description: putative ankyrin [Oryza sativa]
  misc_feature (22)..(281): Homolog of NCBI NO: 34896858 NR Description: putative ankyrin [Oryza sativa]
  misc_feature (57)..(452): Homolog of NCBI NO: 34896852 NR Description: putative ankyrin [Oryza sativa]
  misc_feature (25)..(447): Homolog of NCBI NO: 27542766 NR Description: ankyrin-like protein-like protein [Sorghum
  misc_feature (23)..(445): Homolog of NCBI NO: 27542768 NR Description: ankyrin-like protein-like protein [Sorghum
  misc_feature (8)..(459): Homolog of NCBI NO: 34329680 NR Description: unknown [Nicotiana benthamiana]
  misc_feature (8)..(459): Homolog of NCBI NO: 24745936 NR Description: ankyrin-like protein [Solanum tuberosum]
  misc_feature (8)..(453): Homolog of NCBI NO: 15229331 NR Description: ankyrin-like protein
ASASLMADATAALSARSKVQAFLEAARAGDLQSLKNLVAALDEDGTGAASVAAAVRDANKRTALHFAAIGCRTDVCEFLIGELGLPVDPKDDDGETPLIHATRQGHLDTVKYLLDHGADPSLATSLGATALHHAAGIGNTELMKLLLSKGVDVESESDAGTPLVWAAGHGNQDAVKLLLQHNAKPNTENDDGVTALLSAVAAGSLPCLEVLIEAGANPNVKAGGATPLHIAADSGNIEVIKCLLKAGADPNTCDDDELKPVQVAAWRNNHEAVELLLPLTSPIPGVSNWNVDGIIEHMLPKEYEEKSQLKEATSLKSGLTQTIEVSSEAKKRSLEAKSRGDDAFRRKDYLVAVDAYTQATELDPTDATVLSNRSLCWLRAGQAERALEDAKACRALRPDWAKACYREGAAHRLLQRFEEAANAFYEGVQLEPENTELVNAFREAIEAGRKFHGVDTPSSTQ

SEQ ID NO: 1891 - protein, 456 aa, Zea mays subsp. mays
  peptide (1)..(456): Ceres Seq. ID no. 12351950
  misc_feature (396)..(429): Pfam Name: TPR Domain Pfam Description: TPR Domain
  misc_feature (319)..(432): Homolog of NCBI NO: 13435243 NR Description: putative gag-pol polyprotein [Oryza sativa]
  misc_feature (18)..(292): Homolog of NCBI NO: 13435243 NR Description: putative gag-pol polyprotein [Oryza sativa]
  misc_feature (295)..(450): Homolog of NCBI NO: 34896858 NR Description: putative ankyrin [Oryza sativa]
  misc_feature (17)..(276): Homolog of NCBI NO: 34896858 NR Description: putative ankyrin [Oryza sativa]
  misc_feature (52)..(447): Homolog of NCBI NO: 34896852 NR Description: putative ankyrin [Oryza sativa]
  misc_feature (20)..(442): Homolog of NCBI NO: 27542766 NR Description: ankyrin-like protein-like protein [Sorghum
  misc_feature (18)..(440): Homolog of NCBI NO: 27542768 NR Description: ankyrin-like protein-like protein [Sorghum
  misc_feature (3)..(454): Homolog of NCBI NO: 34329680 NR Description: unknown [Nicotiana benthamiana]
  misc_feature (3)..(454): Homolog of NCBI NO: 24745936 NR Description: ankyrin-like protein [Solanum tuberosum]
  misc_feature (3)..(448): Homolog of NCBI NO: 15229331 NR Description: ankyrin-like protein
MADATAALSARSKVQAFLEAARAGDLQSLKNLVAALDEDGTGAASVAAAVRDANKRTALHFAAIGCRTDVCEFLIGELGLPVDPKDDDGETPLIHATRQGHLDTVKYLLDHGADPSLATSLGATALHHAAGIGNTELMKLLLSKGVDVESESDAGTPLVWAAGHGNQDAVKLLLQHNAKPNTENDDGVTALLSAVAAGSLPCLEVLIEAGANPNVKAGGATPLHIAADSGNIEVIKCLLKAGADPNTCDDDELKPVQVAAWRNNHEAVELLLPLTSPIPGVSNWNVDGIIEHMLPKEYEEKSQLKEATSLKSGLTQTIEVSSEAKKRSLEAKSRGDDAFRRKDYLVAVDAYTQATELDPTDATVLSNRSLCWLRAGQAERALEDAKACRALRPDWAKACYREGAAHRLLQRFEEAANAFYEGVQLEPENTELVNAFREAIEAGRKFHGVDTPSSTQ

SEQ ID NO: 1892 - protein, 319 aa, Zea mays subsp. mays
  peptide (1)..(319): Ceres Seq. ID no. 12351951
  misc_feature (259)..(292): Pfam Name: TPR Domain Pfam Description: TPR Domain
  misc_feature (182)..(295): Homolog of NCBI NO: 13435243 NR Description: putative gag-pol polyprotein [Oryza sativa]
  misc_feature (1)..(155): Homolog of NCBI NO: 13435243 NR Description: putative gag-pol polyprotein [Oryza sativa]
  misc_feature (158)..(313): Homolog of NCBI NO: 34896858 NR Description: putative ankyrin [Oryza sativa]
  misc_feature (1)..(139): Homolog of NCBI NO: 34896858 NR Description: putative ankyrin [Oryza sativa]
  misc_feature (1)..(310): Homolog of NCBI NO: 34896852 NR Description: putative ankyrin [Oryza sativa]
  misc_feature (1)..(305): Homolog of NCBI NO: 27542766 NR Description: ankyrin-like protein-like protein [Sorghum
  misc_feature (1)..(303): Homolog of NCBI NO: 27542768 NR Description: ankyrin-like protein-like protein [Sorghum
  misc_feature (1)..(317): Homolog of NCBI NO: 34329680 NR Description: unknown [Nicotiana benthamiana]
  misc_feature (1)..(317): Homolog of NCBI NO: 24745936 NR Description: ankyrin-like protein [Solanum tuberosum]
  misc_feature (1)..(311): Homolog of NCBI NO: 15229331 NR Description: ankyrin-like protein
MKLLLSKGVDVESESDAGTPLVWAAGHGNQDAVKLLLQHNAKPNTENDDGVTALLSAVAAGSLPCLEVLIEAGANPNVKAGGATPLHIAADSGNIEVIKCLLKAGADPNTCDDDELKPVQVAAWRNNHEAVELLLPLTSPIPGVSNWNVDGIIEHMLPKEYEEKSQLKEATSLKSGLTQTIEVSSEAKKRSLEAKSRGDDAFRRKDYLVAVDAYTQATELDPTDATVLSNRSLCWLRAGQAERALEDAKACRALRPDWAKACYREGAAHRLLQRFEEAANAFYEGVQLEPENTELVNAFREAIEAGRKFHGVDTPSSTQ

SEQ ID NO: 1893 - DNA, 1738 bp, Zea mays subsp. mays
  misc_feature (1)..(1738): Ceres Seq. ID no. 12372961
  misc_feature: MA Experiment ID: 108515 Result: Up-regulated in Transcription
  misc_feature: MA Experiment 108515 PARAMETER Experiment Name: Zm_2mM_SA_P Parameter: Age (day) Value: 8
  misc_feature: MA Experiment 108515 PARAMETER Experiment Name: Zm_2mM_SA_P Parameter: Organism Value: Zea mays
  misc_feature: MA Experiment 108515 PARAMETER Experiment Name: Zm_2mM_SA_P Parameter: Plant Line Value: 35A19
  misc_feature: MA Experiment 108515 PARAMETER Experiment Name: Zm_2mM_SA_P Parameter: Timepoint (hr) Value: 12
  misc_feature: MA Experiment 108515 PARAMETER Experiment Name: Zm_2mM_SA_P Parameter: Tissue Value: Aerial
  misc_feature: MA Experiment 108515 PARAMETER Experiment Name: Zm_2mM_SA_P Parameter: Treatment Value: 2mM SA vs. No Treatment
  misc_feature: MA Experiment ID: 108527 Result: Up-regulated in Transcription
  misc_feature: MA Experiment 108527 PARAMETER Experiment Name: Zm_5mM_NO_P Parameter: Age (day) Value: 8
  misc_feature: MA Experiment 108527 PARAMETER Experiment Name: Zm_5mM_NO_P Parameter: Organism Value: Zea mays
  misc_feature: MA Experiment 108527 PARAMETER Experiment Name: Zm_5mM_NO_P Parameter: Plant Line Value: 35A19
  misc_feature: MA Experiment 108527 PARAMETER Experiment Name: Zm_5mM_NO_P Parameter: Timepoint (hr) Value: 6
  misc_feature: MA Experiment 108527 PARAMETER Experiment Name: Zm_5mM_NO_P Parameter: Tissue Value: Aerial
  misc_feature: MA Experiment 108527 PARAMETER Experiment Name: Zm_5mM_NO_P Parameter: Treatment Value: 5mM NO vs. No Treatment
  misc_feature: MA Experiment ID: 108528 Result: Down-regulated in Transcription
  misc_feature: MA Experiment 108528 PARAMETER Experiment Name: Zm_Imbibed_Seeds_P Parameter: Age (day) Value: 5 vs. 2
  misc_feature: MA Experiment 108528 PARAMETER Experiment Name: Zm_Imbibed_Seeds_P Parameter: Organism Value: Zea mays
  misc_feature: MA Experiment 108528 PARAMETER Experiment Name: Zm_Imbibed_Seeds_P Parameter: Plant Line Value: 35A19
  misc_feature: MA Experiment 108528 PARAMETER Experiment Name: Zm_Imbibed_Seeds_P Parameter: Tissue Value: Aerial vs. Embryo
  misc_feature: MA Experiment ID: 108530 Result: Down-regulated in Transcription
  misc_feature: MA Experiment 108530 PARAMETER Experiment Name: Zm_Imbibed_Seeds_P Parameter: Age (day) Value: 6 vs. 2
  misc_feature: MA Experiment 108530 PARAMETER Experiment Name: Zm_Imbibed_Seeds_P Parameter: Organism Value: Zea mays
  misc_feature: MA Experiment 108530 PARAMETER Experiment Name: Zm_Imbibed_Seeds_P Parameter: Plant Line Value: 35A19
  misc_feature: MA Experiment 108530 PARAMETER Experiment Name: Zm_Imbibed_Seeds_P Parameter: Tissue Value: Aerial vs. Embryo
  misc_feature: MA Experiment ID: 108534 Result: Up-regulated in Transcription
  misc_feature: MA Experiment 108534 PARAMETER Experiment Name: Zm_4deg_Cold_P Parameter: Age (hr) Value: 8
  misc_feature: MA Experiment 108534 PARAMETER Experiment Name: Zm_4deg_Cold_P Parameter: Organism Value: Zea mays
  misc_feature: MA Experiment 108534 PARAMETER Experiment Name: Zm_4deg_Cold_P Parameter: Plant Line Value: 35A19
  misc_feature: MA Experiment 108534 PARAMETER Experiment Name: Zm_4deg_Cold_P Parameter: Temperature (deg C) Value: 4 vs. 22
  misc_feature: MA Experiment 108534 PARAMETER Experiment Name: Zm_4deg_Cold_P Parameter: Timepoint (hr) Value: 6
  misc_feature: MA Experiment 108534 PARAMETER Experiment Name: Zm_4deg_Cold_P Parameter: Tissue Value: Aerial
  misc_feature: MA Experiment ID: 108535 Result: Down-regulated in Transcription
  misc_feature: MA Experiment 108535 PARAMETER Experiment Name: Zm_Meristem_P Parameter: Age (day) Value: 8
  misc_feature: MA Experiment 108535 PARAMETER Experiment Name: Zm_Meristem_P Parameter: Organism Value: Zea mays
  misc_feature: MA Experiment 108535 PARAMETER Experiment Name: Zm_Meristem_P Parameter: Plant Line Value: 35A19
  misc_feature: MA Experiment 108535 PARAMETER Experiment Name: Zm_Meristem_P Parameter: Tissue Value: Root Meristem vs. Above Root Meristem
  misc_feature: MA Experiment ID: 108536 Result: Up-regulated in Transcription
  misc_feature: MA Experiment 108536 PARAMETER Experiment Name: Zm_Meristem_P Parameter: Age (day) Value: 8
  misc_feature: MA Experiment 108536 PARAMETER Experiment Name: Zm_Meristem_P Parameter: Organism Value: Zea mays
  misc_feature: MA Experiment 108536 PARAMETER Experiment Name: Zm_Meristem_P Parameter: Plant Line Value: 35A19
  misc_feature: MA Experiment 108536 PARAMETER Experiment Name: Zm_Meristem_P Parameter: Tissue Value: Shoot Meristem vs. Above Shoot Meristem
  misc_feature: MA Experiment ID: 108543 Result: Down-regulated in Transcription
  misc_feature: MA Experiment ID: 108544 Result: Down-regulated in Transcription
  misc_feature: MA Experiment ID: 108545 Result: Down-regulated in Transcription
  misc_feature: MA Experiment 108545 PARAMETER Experiment Name: Zm_Imbibed_Seeds_P Parameter: Age (day) Value: 3 vs. 2
  misc_feature: MA Experiment 108545 PARAMETER Experiment Name: Zm_Imbibed_Seeds_P Parameter: Organism Value: Zea mays
  misc_feature: MA Experiment 108545 PARAMETER Experiment Name: Zm_Imbibed_Seeds_P Parameter: Plant Line Value: 35A19
  misc_feature: MA Experiment 108545 PARAMETER Experiment Name: Zm_Imbibed_Seeds_P Parameter: Tissue Value: Aerial vs. Embryo
  misc_feature: MA Experiment ID: 108556 Result: Up-regulated in Transcription
  misc_feature: MA Experiment 108556 PARAMETER Experiment Name: Zm_Drought_P Parameter: Age (day) Value: 9
  misc_feature: MA Experiment 108556 PARAMETER Experiment Name: Zm_Drought_P Parameter: Organism Value: Zea mays
  misc_feature: MA Experiment 108556 PARAMETER Experiment Name: Zm_Drought_P Parameter: Plant Line Value: 35A19
  misc_feature: MA Experiment 108556 PARAMETER Experiment Name: Zm_Drought_P Parameter: Timepoint (hr) Value: 24
  misc_feature: MA Experiment 108556 PARAMETER Experiment Name: Zm_Drought_P Parameter: Tissue Value: Aerial
  misc_feature: MA Experiment 108556 PARAMETER Experiment Name: Zm_Drought_P Parameter: Treatment Value: Drought vs. No Drought
  misc_feature: MA Experiment ID: 108559 Result: Up-regulated in Transcription
  misc_feature: MA Experiment 108559 PARAMETER Experiment Name: Zm_5mM_NO_P Parameter: Age (day) Value: 8
  misc_feature: MA Experiment 108559 PARAMETER Experiment Name: Zm_5mM_NO_P Parameter: Organism Value: Zea mays
  misc_feature: MA Experiment 108559 PARAMETER Experiment Name: Zm_5mM_NO_P Parameter: Plant Line Value: 35A19
  misc_feature: MA Experiment 108559 PARAMETER Experiment Name: Zm_5mM_NO_P Parameter: Timepoint (hr) Value: 12
  misc_feature: MA Experiment 108559 PARAMETER Experiment Name: Zm_5mM_NO_P Parameter: Tissue Value: Aerial
  misc_feature: MA Experiment 108559 PARAMETER Experiment Name: Zm_5mM_NO_P Parameter: Treatment Value: 5mM NO vs. No Treatment
  misc_feature: MA Experiment ID: 108689 Result: Up-regulated in Transcription
  misc_feature: MA Experiment 108689 PARAMETER Experiment Name: Zm_Drought_Roots_P Parameter: Age (day) Value: 9
  misc_feature: MA Experiment 108689 PARAMETER Experiment Name: Zm_Drought_Roots_P Parameter: Organism Value: Zea mays
  misc_feature: MA Experiment 108689 PARAMETER Experiment Name: Zm_Drought_Roots_P Parameter: Plant Line Value: 35A19
  misc_feature: MA Experiment 108689 PARAMETER Experiment Name: Zm_Drought_Roots_P Parameter: Timepoint (hr) Value: 24
  misc_feature: MA Experiment 108689 PARAMETER Experiment Name: Zm_Drought_Roots_P Parameter: Tissue Value: Roots
  misc_feature: MA Experiment 108689 PARAMETER Experiment Name: Zm_Drought_Roots_P Parameter: Treatment Value: Drought vs. No Drought
  misc_feature: MA Experiment ID: 20000477 Result: Up-regulated in Transcription
  misc_feature: MA Experiment 20000477 PARAMETER Experiment Name: Zm_5mM_SA_P Parameter: Age (day) Value: 10
  misc_feature: MA Experiment 20000477 PARAMETER Experiment Name: Zm_5mM_SA_P Parameter: Organism Value: Zea mays
  misc_feature: MA Experiment 20000477 PARAMETER Experiment Name: Zm_5mM_SA_P Parameter: Plant Line Value: 35A19
  misc_feature: MA Experiment 20000477 PARAMETER Experiment Name: Zm_5mM_SA_P Parameter: Timepoint (hr) Value: 48
  misc_feature: MA Experiment 20000477 PARAMETER Experiment Name: Zm_5mM_SA_P Parameter: Tissue Value: Aerial
  misc_feature: MA Experiment 20000477 PARAMETER Experiment Name: Zm_5mM_SA_P Parameter: Treatment Value: 5mM SA vs. No Treatment
  misc_feature: MA Experiment ID: 20000478 Result: Up-regulated in Transcription
  misc_feature: MA Experiment 20000478 PARAMETER Experiment Name: Zm_5mM_SA_P Parameter: Age (day) Value: 11
  misc_feature: MA Experiment 20000478 PARAMETER Experiment Name: Zm_5mM_SA_P Parameter: Organism Value: Zea mays
  misc_feature: MA Experiment 20000478 PARAMETER Experiment Name: Zm_5mM_SA_P Parameter: Plant Line Value: 35A19
  misc_feature: MA Experiment 20000478 PARAMETER Experiment Name: Zm_5mM_SA_P Parameter: Timepoint (hr) Value: 72
  misc_feature: MA Experiment 20000478 PARAMETER Experiment Name: Zm_5mM_SA_P Parameter: Tissue Value: Aerial
  misc_feature: MA Experiment 20000478 PARAMETER Experiment Name: Zm_5mM_SA_P Parameter: Treatment Value: 5mM SA vs. No Treatment
  misc_feature: MA Experiment ID: 20000480 Result: Up-regulated in Transcription
  misc_feature: MA Experiment 20000480 PARAMETER Experiment Name: Zm_Drought_P Parameter: Age (day) Value: 11
  misc_feature: MA Experiment 20000480 PARAMETER Experiment Name: Zm_Drought_P Parameter: Organism Value: Zea mays
  misc_feature: MA Experiment 20000480 PARAMETER Experiment Name: Zm_Drought_P Parameter: Plant Line Value: 35A19
  misc_feature: MA Experiment 20000480 PARAMETER Experiment Name: Zm_Drought_P Parameter: Timepoint (hr) Value: 72
  misc_feature: MA Experiment 20000480 PARAMETER Experiment Name: Zm_Drought_P Parameter: Tissue Value: Aerial
  misc_feature: MA Experiment 20000480 PARAMETER Experiment Name: Zm_Drought_P Parameter: Treatment Value: Drought vs. No Drought
  misc_feature: MA Experiment ID: 20000487 Result: Down-regulated in Transcription
  misc_feature: MA Experiment 20000487 PARAMETER Experiment Name: Zm_50mM_NH4NO3_L_to_H_P Parameter: Organism Value: Zea mays
  misc_feature: MA Experiment 20000487 PARAMETER Experiment Name: Zm_50mM_NH4NO3_L_to_H_P Parameter: Timepoint (hr) Value: 4
  misc_feature: MA Experiment 20000487 PARAMETER Experiment Name: Zm_50mM_NH4NO3_L_to_H_P Parameter: Tissue Value: Leaves
  misc_feature: MA Experiment 20000487 PARAMETER Experiment Name: Zm_50mM_NH4NO3_L_to_H_P Parameter: Treatment Value: 50mM NH4NO3 vs. 100mM Mannitol
  misc_feature: MA Experiment ID: 20000488 Result: Down-regulated in Transcription
  misc_feature: MA Experiment 20000488 PARAMETER Experiment Name: Zm_50mM_NH4NO3_L_to_H_P Parameter: Organism Value: Zea mays
  misc_feature: MA Experiment 20000488 PARAMETER Experiment Name: Zm_50mM_NH4NO3_L_to_H_P Parameter: Timepoint (hr) Value: 8
  misc_feature: MA Experiment 20000488 PARAMETER Experiment Name: Zm_50mM_NH4NO3_L_to_H_P Parameter: Tissue Value: Leaves
  misc_feature: MA Experiment 20000488 PARAMETER Experiment Name: Zm_50mM_NH4NO3_L_to_H_P Parameter: Treatment Value: 50mM NH4NO3 vs. 100mM Mannitol
  misc_feature: MA Experiment ID: 20000533 Result: Up-regulated in Transcription
  misc_feature: MA Experiment 20000533 PARAMETER Experiment Name: Zm_0.001percent_MeJA_P Parameter: Age (day) Value: 11
  misc_feature: MA Experiment 20000533 PARAMETER Experiment Name: Zm_0.001percent_MeJA_P Parameter: Organism Value: Zea mays
  misc_feature: MA Experiment 20000533 PARAMETER Experiment Name: Zm_0.001percent_MeJA_P Parameter: Plant Line Value: 35A19
  misc_feature: MA Experiment 20000533 PARAMETER Experiment Name: Zm_0.001percent_MeJA_P Parameter: Timepoint (hr) Value: 72
  misc_feature: MA Experiment 20000533 PARAMETER Experiment Name: Zm_0.001percent_MeJA_P Parameter: Tissue Value: Aerial
  misc_feature: MA Experiment 20000533 PARAMETER Experiment Name: Zm_0.001percent_MeJA_P Parameter: Treatment Value: 0.001percent MeJA vs. No Treatment
  misc_feature: MA Experiment ID: 20000535 Result: Down-regulated in Transcription
  misc_feature: MA Experiment 20000535 PARAMETER Experiment Name: Zm_Hybrid_Seed_Dev_P Parameter: DAP Value: 30 vs. 12
  misc_feature: MA Experiment 20000535 PARAMETER Experiment Name: Zm_Hybrid_Seed_Dev_P Parameter: Organism Value: Zea mays
  misc_feature: MA Experiment 20000535 PARAMETER Experiment Name: Zm_Hybrid_Seed_Dev_P Parameter: Plant Line Value: 35A19
  misc_feature: MA Experiment 20000535 PARAMETER Experiment Name: Zm_Hybrid_Seed_Dev_P Parameter: Tissue Value: Embryo vs. Unfert Floret
  misc_feature: MA Experiment ID: 20000629 Result: Down-regulated in Transcription
  misc_feature: MA Experiment 20000629 PARAMETER Experiment Name: Zm_Herbicide-Treatments_P Parameter: Timepoint (hr) Value: 12
  misc_feature: MA Experiment 20000629 PARAMETER Experiment Name: Zm_Herbicide-Treatments_P Parameter: Tissue Value: Aerial
  misc_feature: MA Experiment 20000629 PARAMETER Experiment Name: Zm_Herbicide-Treatments_P Parameter: Treatment Value: Trimec vs. No Treatment
  misc_feature: MA Experiment ID: 20001610 Result: Down-regulated in Transcription
  misc_feature: MA Experiment 20001610 PARAMETER Experiment Name: Zm_50ppm_KNO3_L-to-H_P Parameter: Age (day) Value: 19
  misc_feature: MA Experiment 20001610 PARAMETER Experiment Name: Zm_50ppm_KNO3_L-to-H_P Parameter: Organism Value: Zea mays
  misc_feature: MA Experiment 20001610 PARAMETER Experiment Name: Zm_50ppm_KNO3_L-to-H_P Parameter: Plant Line Value: 35A19
  misc_feature: MA Experiment 20001610 PARAMETER Experiment Name: Zm_50ppm_KNO3_L-to-H_P Parameter: Timepoint (hr) Value: 2
  misc_feature: MA Experiment 20001610 PARAMETER Experiment Name: Zm_50ppm_KNO3_L-to-H_P Parameter: Tissue Value: Roots
  misc_feature: MA Experiment 20001610 PARAMETER Experiment Name: Zm_50ppm_KNO3_L-to-H_P Parameter: Treatment Value: 50ppm KNO3 vs. 50ppm KCl
atccatcaaagtcacagagacgaccagctgaagcgaacacagagctgctcgccgtgtaacgcagcaggcagcagcacccagaggcggcaggacacacacacagcacacgcagatcttcgatcaccaccatgggttctctcggcagcgccgcgcagcagcagccgcagcaaccgcacgccgtgtgcctgccgtacccagcgcagggccacatcaccccgatgctcaacgtggcgaagctgctgcacgcccggggcttccacgtcaccttcgtcaacaccgagtacaaccaggcgcgcctcgtccggacccgcggggcggcggccgtggccggcctcccgggcttccgcttcgccaccatccccgacggcctgccgccgtcggaggacgacgacgtcacgcaggacatcccctcgctgtgcaagtccaccacggagacctgcctcggtcccttccgccgcctgctcgcggacctcagcgacccgcccgtcacctgcgtcgtctccgacgtcgtcatgggcttctccatcgacgccaccaaggagctcggccttccctacgtccagctctggactgccagcaccatcagcttcctcggctaccgccactaccacctcctcaagagccgtggcctcgctccgctcaaaagtgtggagcagctgacgaacggattccttgacacggcggtggaggacgtgccggggctgcggaacatgaggttccgggacttcccgagcttcatccgctccacggacccggacgagtacatggtgggctacgtcctccaggagacggggcgcacggcgggcgcgtcggccgtgatcctcaacaccttcgacgagctggagggcgaggcggtggcggccatgcgctcgctcggcctggcgcgcaaggtgtacacgctgggcccgctcccgctgctggcgcgcgaggacccgcccaccccgcgctccgccatcagcctcagcctgtggaaggaggaggaggagtgcctgcggtggctcgacggcagggaccccggctccgtcgtctacgtcaacttcggcagcatcaccgtgatgaccagcgaccagctggtggagttcgcgtgggggctggccaacagcggcaggccgttcctgtggatcatccggcgcgacctcgtcaggggcgacactgccgtgctgccgccggagttcctgtccgagacggccggccgcgggctcatggccacctggtgcccgcagcaggcggtgctggaccacccggccgtggccgcgttcctcacgcacagcggatggaactccacgctggaggccatgtgcggcggcgtcccggtcatcagctggcccttcttcgccgaccagcagaccaactgccgctaccagtgcaacgagtggggcgtcgggatggagatcgacagcaacgtccggcgcgacgccgtggcgagcctcatcgctgagctcatggagggggagcaggggaaggagatgaggagaagggcactggaatggagggacaaggccatcgaggtggccaagcccggaggcacgtcttaccggaatttcgatgaactggttcgcaatgtgctcctgccaaagaactaggcaacttagctctatatttgcagtttgcacggtgcttctgccagtgccgtgtgattttgttcctttgttttggagggagatggacaggtcagtgtcgttgtgtaaacaataaaaatacatgcatacgagcgtccaattgaggatgggcaagtctg

SEQ ID NO: 1894 - protein, 484 aa, Zea mays subsp. mays
  peptide (1)..(484): Ceres Seq. ID no. 12372962
  misc_feature (16)..(481): Pfam Name: UDP-glucoronosyl and UDP-glucosyl transferase Pfam Description: UDP-glucoronosyl and UDP-glucosyl transferase
  misc_feature (13)..(481): Homolog of NCBI NO: 17065006 NR Description: UDP-glucose glucosyltransferase [Arabidopsis
  misc_feature (4)..(481): Homolog of NCBI NO: 25286821 NR Description: T16E15.2 protein - Arabidopsis thaliana
  misc_feature (13)..(481): Homolog of NCBI NO: 15219870 NR Description: UDP-glucose glucosyltransferase
  misc_feature (4)..(481): Homolog of NCBI NO: 38569139 NR Description: OSJNBb0033P05.7 [Oryza sativa (japonica
  misc_feature (13)..(484): Homolog of NCBI NO: 19911203 NR Description: glucosyltransferase-10 [Vigna angularis]
  misc_feature (13)..(481): Homolog of NCBI NO: 15219867 NR Description: UDP-glucose glucosyltransferase, putative
  misc_feature (4)..(481): Homolog of NCBI NO: 15219876 NR Description: UDP-glucose glucosyltransferase, putative
  misc_feature (4)..(481): Homolog of NCBI NO: 38344776 NR Description: OSJNBb0026L04.7 [Oryza sativa (japonica
  misc_feature (13)..(481): Homolog of NCBI NO: 38569140 NR Description: OSJNBb0033P05.8 [Oryza sativa (japonica
  misc_feature (4)..(481): Homolog of NCBI NO: 38569188 NR Description: OSJNBa0086B14.13 [Oryza sativa (japonica
MGSLGSAAQQQPQQPHAVCLPYPAQGHITPMLNVAKLLHARGFHVTFVNTEYNQARLVRTRGAAAVAGLPGFRFATIPDGLPPSEDDDVTQDIPSLCKSTTETCLGPFRRLLADLSDPPVTCVVSDVVMGFSIDATKELGLPYVQLWTASTISFLGYRHYHLLKSRGLAPLKSVEQLTNGFLDTAVEDVPGLRNMRFRDFPSFIRSTDPDEYMVGYVLQETGRTAGASAVILNTFDELEGEAVAAMRSLGLARKVYTLGPLPLLAREDPPTPRSAISLSLWKEEEECLRWLDGRDPGSVVYVNFGSITVMTSDQLVEFAWGLANSGRPFLWIIRRDLVRGDTAVLPPEFLSETAGRGLMATWCPQQAVLDHPAVAAFLTHSGWNSTLEAMCGGVPVISWPFFADQQTNCRYQCNEWGVGMEIDSNVRRDAVASLIAELMEGEQGKEMRRRALEWRDKAIEVAKPGGTSYRNFDELVRNVLLPKN

SEQ ID NO: 1895 - protein, 454 aa, Zea mays subsp. mays
  peptide (1)..(454): Ceres Seq. ID no. 12372963
  misc_feature (1)..(451): Pfam Name: UDP-glucoronosyl and UDP-glucosyl transferase Pfam Description: UDP-glucoronosyl and UDP-glucosyl transferase
  misc_feature (1)..(451): Homolog of NCBI NO: 15219867 NR Description: UDP-glucose glucosyltransferase, putative
  misc_feature (1)..(451): Homolog of NCBI NO: 15219876 NR Description: UDP-glucose glucosyltransferase, putative
  misc_feature (1)..(454): Homolog of NCBI NO: 19911203 NR Description: glucosyltransferase-10 [Vigna angularis]
  misc_feature (1)..(451): Homolog of NCBI NO: 17065006 NR Description: UDP-glucose glucosyltransferase [Arabidopsis
  misc_feature (1)..(451): Homolog of NCBI NO: 25286821 NR Description: T16E15.2 protein - Arabidopsis thaliana
  misc_feature (1)..(451): Homolog of NCBI NO: 15219870 NR Description: UDP-glucose glucosyltransferase
  misc_feature (1)..(451): Homolog of NCBI NO: 38569139 NR Description: OSJNBb0033P05.7 [Oryza sativa (japonica
  misc_feature (1)..(451): Homolog of NCBI NO: 38344776 NR Description: OSJNBb0026L04.7 [Oryza sativa (japonica
  misc_feature (1)..(451): Homolog of NCBI NO: 38569140 NR Description: OSJNBb0033P05.8 [Oryza sativa (japonica
  misc_feature (1)..(451): Homolog of NCBI NO: 38569188 NR Description: OSJNBa0086B14.13 [Oryza sativa (japonica
MLNVAKLLHARGFHVTFVNTEYNQARLVRTRGAAAVAGLPGFRFATIPDGLPPSEDDDVTQDIPSLCKSTTETCLGPFRRLLADLSDPPVTCVVSDVVMGFSIDATKELGLPYVQLWTASTISFLGYRHYHLLKSRGLAPLKSVEQLTNGFLDTAVEDVPGLRNMRFRDFPSFIRSTDPDEYMVGYVLQETGRTAGASAVILNTFDELEGEAVAAMRSLGLARKVYTLGPLPLLAREDPPTPRSAISLSLWKEEEECLRWLDGRDPGSVVYVNFGSITVMTSDQLVEFAWGLANSGRPFLWIIRRDLVRGDTAVLPPEFLSETAGRGLMATWCPQQAVLDHPAVAAFLTHSGWNSTLEAMCGGVPVISWPFFADQQTNCRYQCNEWGVGMEIDSNVRRDAVASLIAELMEGEQGKEMRRRALEWRDKAIEVAKPGGTSYRNFDELVRNVLLPKN

SEQ ID NO: 1896 - protein, 356 aa, Zea mays subsp. mays
  peptide (1)..(356): Ceres Seq. ID no. 12372964
  misc_feature (1)..(353): Pfam Name: UDP-glucoronosyl and UDP-glucosyl transferase Pfam Description: UDP-glucoronosyl and UDP-glucosyl transferase
  misc_feature (1)..(353): Homolog of NCBI NO: 15219867 NR Description: UDP-glucose glucosyltransferase, putative
  misc_feature (1)..(353): Homolog of NCBI NO: 15219876 NR Description: UDP-glucose glucosyltransferase, putative
  misc_feature (1)..(356): Homolog of NCBI NO: 19911203 NR Description: glucosyltransferase-10 [Vigna angularis]
  misc_feature (1)..(353): Homolog of NCBI NO: 17065006 NR Description: UDP-glucose glucosyltransferase [Arabidopsis
  misc_feature (1)..(353): Homolog of NCBI NO: 25286821 NR Description: T16E15.2 protein - Arabidopsis thaliana
  misc_feature (1)..(353): Homolog of NCBI NO: 15219870 NR Description: UDP-glucose glucosyltransferase
  misc_feature (1)..(353): Homolog of NCBI NO: 38569139 NR Description: OSJNBb0033P05.7 [Oryza sativa (japonica
  misc_feature (1)..(353): Homolog of NCBI NO: 38344776 NR Description: OSJNBb0026L04.7 [Oryza sativa (japonica
  misc_feature (1)..(353): Homolog of NCBI NO: 38569140 NR Description: OSJNBb0033P05.8 [Oryza sativa (japonica
  misc_feature (1)..(353): Homolog of NCBI NO: 38569188 NR Description: OSJNBa0086B14.13 [Oryza sativa (japonica
MGFSIDATKELGLPYVQLWTASTISFLGYRHYHLLKSRGLAPLKSVEQLTNGFLDTAVEDVPGLRNMRFRDFPSFIRSTDPDEYMVGYVLQETGRTAGASAVILNTFDELEGEAVAAMRSLGLARKVYTLGPLPLLAREDPPTPRSAISLSLWKEEEECLRWLDGRDPGSVVYVNFGSITVMTSDQLVEFAWGLANSGRPFLWIIRRDLVRGDTAVLPPEFLSETAGRGLMATWCPQQAVLDHPAVAAFLTHSGWNSTLEAMCGGVPVISWPFFADQQTNCRYQCNEWGVGMEIDSNVRRDAVASLIAELMEGEQGKEMRRRALEWRDKAIEVAKPGGTSYRNFDELVRNVLLPKN

SEQ ID NO: 1897 - DNA, 1175 bp, Zea mays subsp. mays
  misc_feature (1)..(1175): Ceres Seq. ID no. 12566396
  misc_feature: MA Experiment ID: 108527 Result: Down-regulated in Transcription
  misc_feature: MA Experiment 108527 PARAMETER Experiment Name: Zm_5mM_NO_P Parameter: Age (day) Value: 8
  misc_feature: MA Experiment 108527 PARAMETER Experiment Name: Zm_5mM_NO_P Parameter: Organism Value: Zea mays
  misc_feature: MA Experiment 108527 PARAMETER Experiment Name: Zm_5mM_NO_P Parameter: Plant Line Value: 35A19
  misc_feature: MA Experiment 108527 PARAMETER Experiment Name: Zm_5mM_NO_P Parameter: Timepoint (hr) Value: 6
  misc_feature: MA Experiment 108527 PARAMETER Experiment Name: Zm_5mM_NO_P Parameter: Tissue Value: Aerial
  misc_feature: MA Experiment 108527 PARAMETER Experiment Name: Zm_5mM_NO_P Parameter: Treatment Value: 5mM NO vs. No Treatment
  misc_feature: MA Experiment ID: 108535 Result: Up-regulated in Transcription
  misc_feature: MA Experiment 108535 PARAMETER Experiment Name: Zm_Meristem_P Parameter: Age (day) Value: 8
  misc_feature: MA Experiment 108535 PARAMETER Experiment Name: Zm_Meristem_P Parameter: Organism Value: Zea mays
  misc_feature: MA Experiment 108535 PARAMETER Experiment Name: Zm_Meristem_P Parameter: Plant Line Value: 35A19
  misc_feature: MA Experiment 108535 PARAMETER Experiment Name: Zm_Meristem_P Parameter: Tissue Value: Root Meristem vs. Above Root Meristem
  misc_feature: MA Experiment ID: 108544 Result: Down-regulated in Transcription
  misc_feature: MA Experiment ID: 108559 Result: Down-regulated in Transcription
  misc_feature: MA Experiment 108559 PARAMETER Experiment Name: Zm_5mM_NO_P Parameter: Age (day) Value: 8
  misc_feature: MA Experiment 108559 PARAMETER Experiment Name: Zm_5mM_NO_P Parameter: Organism Value: Zea mays
  misc_feature: MA Experiment 108559 PARAMETER Experiment Name: Zm_5mM_NO_P Parameter: Plant Line Value: 35A19
  misc_feature: MA Experiment 108559 PARAMETER Experiment Name: Zm_5mM_NO_P Parameter: Timepoint (hr) Value: 12
  misc_feature: MA Experiment 108559 PARAMETER Experiment Name: Zm_5mM_NO_P Parameter: Tissue Value: Aerial
  misc_feature: MA Experiment 108559 PARAMETER Experiment Name: Zm_5mM_NO_P Parameter: Treatment Value: 5mM NO vs. No Treatment
gacgtcgtcccgaccttcttttcaatcccgtctcggattcgttccgtctcagctaccgcgaccacgacgccgacgcgagagggcagggaacacagccactcgccgacgagaccccggcgcgcgcgagagaaagagaagagaggaggatcttttgttcgtgaaaaatattggaggcggagggaaggtgaaggagggggatcggagatgaacgtgttccggctggcgggggacatgacccacctcctcagcgtggtagtgctgctcctcaagatccataccatcaagtcctgcgcaggcatatctctgaagacacaggagctgtatgcacttgtttttgcagcacggtacctggacctgtttgttcattttgtgtctctgtataacactgtcatgaagctggtcttcttggcaagttctttctcgatagtttggtacatgaagcggcataagattgtgcggaggacatatgacaaggatcatgacacctttcgccattacgttttagtgttgccttgtcttcttctggctctcctcattaatgagaagtttacttttagagaggtgatgtgggcattctccatttatttggaagctgtcgcgatatttccacaacttgtgttgctacagcggacaaggaatattgacaacctgactggccaatatgtcttcttcttgggtgcctaccgtgtgctttatatccttaactggatttaccgatacttcactgagccccattttgtccactggataagttggatggcaggaatagtgcaaactctgttgtatgctgacttcttcttttattacataatgagctggaagaacaatgtgaagctagagctgccagcttaaggttgctgctcctgtccccaagatatagtagggtaatatatcagataggcaggccccatacacagcatgatcattgctatcgccaactgggttatgaaaaaagcattttagttgcgtggcttgtatcgccttgtatctctctgctattgttggaagaacaggaaagtcaggctcaccatgtaactttttacaataagctgcgtaagatcagcactagaaggttgtgaattgtgatcgtccttagggaattttgtgctgatgtaaccctttcggcaagtgattctcatacaatataatctcagactataattggtaattgtttc

SEQ ID NO: 1898 - protein, 283 aa, Zea mays subsp. mays
  peptide (1)..(283): Ceres Seq. ID no. 12566397
  misc_feature (69)..(273): Pfam Name: ER lumen protein retaining receptor Pfam Description: ER lumen protein retaining receptor
  misc_feature (69)..(283): Homolog of NCBI NO: 6685428 NR Description: ER lumen protein retaining receptor (HDEL (PGP169- 12) >gi|4105782|gb|AAD02548.1| PGPS/D6 [Petunia x
  misc_feature (69)..(283): Homolog of NCBI NO: 21592401 NR Description: ER lumen retaining receptor (HDEL receptor),
  misc_feature (69)..(283): Homolog of NCBI NO: 18404390 NR Description: ER lumen retaining receptor (HDEL receptor), protein id: At3g25040.1, supported by cDNA: 23341., supported by gi_17380929 [Arabidopsis thaliana] >gi|17380930|gb|AAL36277.1|
  misc_feature (69)..(283): Homolog of NCBI NO: 9293986 NR Description: ER lumen protein-retaining receptor-like protein
  misc_feature (69)..(283): Homolog of NCBI NO: 18397049 NR Description: ER lumen protein retaining receptor; protein id: supported by cDNA: gi_20260681 [Arabidopsis thaliana]
  misc_feature (69)..(283): Homolog of NCBI NO: 14285310 NR Description: ERD2 protein [Scherffelia dubia]
  misc_feature (69)..(282): Homolog of NCBI NO: 22656361 NR Description: endoplasmic reticulum retention receptor
  misc_feature (69)..(283): Homolog of NCBI NO: 17137442 NR Description: KDEL receptor CG5183-PA [Drosophila melanogaster]
  misc_feature (69)..(283): Homolog of NCBI NO: 17551392 NR Description: Yeast Endoplasmic Reticulum retention Defective
  misc_feature (69)..(270): Homolog of NCBI NO: 34870419 NR Description: similar to KDEL (Lys-Asp-Glu-Leu) endoplasmic
DVVPTFFSIPSRIRSVSATATTTPTREGREHSHSPTRPRRAREKEKRGGSFVREKYWRRREGEGGGSEMNVFRLAGDMTHLLSVVVLLLKIHTIKSCAGISLKTQELYALVFAARYLDLFVHFVSLYNTVMKLVFLASSFSIVWYMKRHKIVRRTYDKDHDTFRHYVLVLPCLLLALLINEKFTFREVMWAFSIYLEAVAIFPQLVLLQRTRNIDNLTGQYVFFLGAYRVLYILNWIYRYFTEPHFVHWISWMAGIVQTLLYADFFFYYIMSWKNNVKLELPA

SEQ ID NO: 1899 - protein, 215 aa, Zea mays subsp. mays
  peptide (1)..(215): Ceres Seq. ID no. 12566398
  misc_feature (1)..(205): Pfam Name: ER lumen protein retaining receptor Pfam Description: ER lumen protein retaining receptor
  misc_feature (1)..(215): Homolog of NCBI NO: 6685428 NR Description: ER lumen protein retaining receptor (HDEL (PGP169- 12) >gi|4105782|gb|AAD02548.1| PGPS/D6 [Petunia x
  misc_feature (1)..(215): Homolog of NCBI NO: 21592401 NR Description: ER lumen retaining receptor (HDEL receptor),
  misc_feature (1)..(215): Homolog of NCBI NO: 18404390 NR Description: ER lumen retaining receptor (HDEL receptor), protein id: At3g25040.1, supported by cDNA: 23341., supported by gi_17380929 [Arabidopsis thaliana] >gi|17380930|gb|AAL36277.1|
  misc_feature (1)..(215): Homolog of NCBI NO: 9293986 NR Description: ER lumen protein-retaining receptor-like protein
  misc_feature (1)..(215): Homolog of NCBI NO: 18397049 NR Description: ER lumen protein retaining receptor; protein id: supported by cDNA: gi_20260681 [Arabidopsis thaliana]
  misc_feature (1)..(215): Homolog of NCBI NO: 14285310 NR Description: ERD2 protein [Scherffelia dubia]
  misc_feature (1)..(214): Homolog of NCBI NO: 22656361 NR Description: endoplasmic reticulum retention receptor
  misc_feature (1)..(215): Homolog of NCBI NO: 17137442 NR Description: KDEL receptor CG5183-PA [Drosophila melanogaster]
  misc_feature (1)..(215): Homolog of NCBI NO: 17551392 NR Description: Yeast Endoplasmic Reticulum retention Defective
  misc_feature (1)..(202): Homolog of NCBI NO: 34870419 NR Description: similar to KDEL (Lys-Asp-Glu-Leu) endoplasmic
MNVFRLAGDMTHLLSVVVLLLKIHTIKSCAGISLKTQELYALVFAARYLDLFVHFVSLYNTVMKLVFLASSFSIVWYMKRHKIVRRTYDKDHDTFRHYVLVLPCLLLALLINEKFTFREVMWAFSIYLEAVAIFPQLVLLQRTRNIDNLTGQYVFFLGAYRVLYILNWIYRYFTEPHFVHWISWMAGIVQTLLYADFFFYYIMSWKNNVKLELPA

SEQ ID NO: 1900 - protein, 206 aa, Zea mays subsp. mays
  peptide (1)..(206): Ceres Seq. ID no. 12566399
  misc_feature (1)..(196): Pfam Name: ER lumen protein retaining receptor Pfam Description: ER lumen protein retaining receptor
  misc_feature (1)..(206): Homolog of NCBI NO: 6685428 NR Description: ER lumen protein retaining receptor (HDEL (PGP169- 12) >gi|4105782|gb|AAD02548.1| PGPS/D6 [Petunia x
  misc_feature (1)..(206): Homolog of NCBI NO: 21592401 NR Description: ER lumen retaining receptor (HDEL receptor),
  misc_feature (1)..(206): Homolog of NCBI NO: 18404390 NR Description: ER lumen retaining receptor (HDEL receptor), protein id: At3g25040.1, supported by cDNA: 23341., supported by gi_17380929 [Arabidopsis thaliana] >gi|17380930|gb|AAL36277.1|
  misc_feature (1)..(206): Homolog of NCBI NO: 9293986 NR Description: ER lumen protein-retaining receptor-like protein
  misc_feature (1)..(206): Homolog of NCBI NO: 18397049 NR Description: ER lumen protein retaining receptor; protein id: supported by cDNA: gi_20260681 [Arabidopsis thaliana]
  misc_feature (1)..(206): Homolog of NCBI NO: 14285310 NR Description: ERD2 protein [Scherffelia dubia]
  misc_feature (1)..(205): Homolog of NCBI NO: 22656361 NR Description: endoplasmic reticulum retention receptor
  misc_feature (1)..(206): Homolog of NCBI NO: 17137442 NR Description: KDEL receptor CG5183-PA [Drosophila melanogaster]
  misc_feature (1)..(206): Homolog of NCBI NO: 17551392 NR Description: Yeast Endoplasmic Reticulum retention Defective
  misc_feature (1)..(193): Homolog of NCBI NO: 34870419 NR Description: similar to KDEL (Lys-Asp-Glu-Leu) endoplasmic
MTHLLSVVVLLLKIHTIKSCAGISLKTQELYALVFAARYLDLFVHFVSLYNTVMKLVFLASSFSIVWYMKRHKIVRRTYDKDHDTFRHYVLVLPCLLLALLINEKFTFREVMWAFSIYLEAVAIFPQLVLLQRTRNIDNLTGQYVFFLGAYRVLYILNWIYRYFTEPHFVHWISWMAGIVQTLLYADFFFYYIMSWKNNVKLELPA

(The sequence listing continues in the following parts.)

1. An isolated nucleic acid molecule comprising:
a) a full length cDNA nucleic acid having a nucleotide sequence which encodes an amino acid sequence exhibiting at least 40% sequence identity to an amino acid sequence encoded by
(1) a full length cDNA nucleotide sequence described in the Sequence Listing or the Sequence Listing-Miscellaneous Feature documents, or a fragment thereof; or
(2) a complement of a full-length cDNA nucleotide sequence shown in the Sequence Listing or the Sequence Listing-Miscellaneous Feature documents, or a fragment thereof;
b) a nucleic acid which is the reverse of the nucleotide sequence according to subparagraph (a), such that the reverse nucleotide sequence has a sequence order which is the reverse of the sequence order of the nucleotide sequence according to subparagraph (a);
c) a nucleic acid capable of hybridizing to a nucleic acid having a sequence selected from the group consisting of:
a full-length cDNA nucleotide sequence which is shown in the Sequence Listing or the Sequence Listing-Miscellaneous Feature documents; and a nucleotide sequence which is complementary to a full-length cDNA nucleotide sequence shown in the Sequence Listing or the Sequence Listing-Miscellaneous Feature documents, under conditions that permit formation of a nucleic acid duplex at a temperature from about 40° C. and 48° C. below the melting temperature of the nucleic acid duplex, with the proviso that said nucleotide sequence is not any of the sequences described in the Tables of any of Patent Publication Nos. WO 200040695, CA 2300692 A1, EP 1033405 A2, CA 2302828 A1 and EP 1059354 A2 and any proteins listed in the application that are identified by gi number or otherwise as being from the non-redundant GenBank CDS translations or Protein Database (PDB), available via the internet, or (PIR-International) Database (PIR), available via the internet.

2. An isolated nucleic acid molecule comprising a nucleic acid having a nucleotide sequence which exhibits at least 65% sequence identity to
a) a full-length cDNA nucleotide sequence shown in the Sequence Listing or the Sequence Listing-Miscellaneous Feature documents, or a fragment thereof; or
b) a complement of a full-length cDNA nucleotide sequence described in the Sequence Listing or the Sequence Listing-Miscellaneous Feature documents, or a fragment thereof, with the proviso that said nucleotide sequence is not any of the sequences described in the Tables of any of Patent Publication Nos. WO 200040695, CA 2300692 A1, EP 1033405 A2, CA 2302828 A1 and EP 1059354 A2 and any proteins listed in the application that are identified by gi number or otherwise as being from the non-redundant GenBank CDS translations or Protein Database (PDB), or (PIR-International) Database (PIR).

3. The nucleic acid molecule according to claim 1, wherein said nucleic acid comprises an open reading frame.

4. (canceled)

5. (canceled)

6. A vector construct comprising:
a) a first nucleic acid having a regulatory sequence capable of causing transcription and/or translation; and
b) a second nucleic acid having the sequence of the isolated nucleic acid molecule according to claim 1;
wherein said first and second nucleic acids are operably linked and wherein said second nucleic acid is heterologous to any element in said vector construct.

7. The vector construct according to claim 6, wherein said first nucleic acid is native to said second nucleic acid.

8. The vector construct according to claim 6, wherein said first nucleic acid is heterologous to said second nucleic acid.

9. A host cell comprising an isolated nucleic acid molecule according to claim 1, wherein said nucleic acid molecule is flanked by exogenous sequence

10. A host cell comprising a vector construct of claim 6.

11. An isolated polypeptide comprising an amino acid sequence
a) exhibiting at least 40%, or 75%, or 85%, or 90% sequence identity of an amino acid sequence encoded by a sequence shown in the Sequence Listing or the Sequence Listing-Miscellaneous Feature documents, or a fragment thereof; and
b) capable of exhibiting at least one of the biological activities of the polypeptide encoded by said nucleotide sequence shown in the Sequence Listing or the Sequence Listing-Miscellaneous Feature documents, or a fragment thereof, with the proviso that said nucleotide sequence is not any of the sequences described in the Tables of any of Patent Publication Nos. WO 200040695, CA 2300692 A1, EP 1033405 A2, CA 2302828 A1 and EP 1059354 A2 and any proteins listed in the application that are identified by gi number or otherwise as being from the non-redundant GenBank CDS translations or Protein Database (PDB), or (PIR-International) Database (PIR).

12. An antibody capable of binding the isolated polypeptide of claim 11.

13. A method of introducing an isolated nucleic acid into a host cell comprising:
a) providing an isolated nucleic acid molecule according to claim 1; and
b) contacting said isolated nucleic with said host cell under conditions that permit insertion of said nucleic acid into said host cell.
c) A method of transforming a host cell which comprises contacting a host cell with a vector construct according to claim 6.
d) A method of modulating transcription and/or translation of a nucleic acid in a host cell comprising:
e) providing the host cell of claim 9; and
f) culturing said host cell under conditions that permit transcription or translation.

14. A method for detecting a nucleic acid in a sample which comprises:
a) providing an isolated nucleic acid molecule according to claim 1;
b) contacting said isolated nucleic acid molecule with a sample under conditions which permit a comparison of the sequence of said isolated nucleic acid molecule with the sequence of DNA in said sample; and
c) analyzing the result of said comparison.

15. A plant or cell of a plant which comprises a nucleic acid molecule according to claim 1 which is exogenous or heterologous to said plant or plant cell.

16. A plant or cell of a plant which comprises a vector construct according to claim 6.

17. A plant which has been regenerated from a plant cell according to claim 17.

18. A plant which has been regenerated from a plant cell according to claim
